United States Patent Application Publication US 2014/0057251 A1 - sequence listing, part 92

SEQ ID NO: 163423 - DNA, 3785 bp, Cannabis sativa
ttttgagttagagaatgttgcattctttttgtataaaccaaattaggaagaaaatgtaaagcaagacaacatgcattttaaagtgaaaatgtgctttatttctaatgttgaaactactattaacaaaaacgagcacattctttcaaacaaggaagaacaaaatgactacttagccataaatgctcatgatcctaaccctacactgaagttatctttctttacaaagaaaaaaaaaagaaataaaaaatgcaaaggaactcattactactatctattaacttgcaggatctaccaccttgcttccagaaactgggatgcacttgacaagccaaccaattggccaagacaaagctgcaatgccaatgctagcaccccattgcccccaattcagcctttcagtactagcaaacttcttcagaaactccaccatcaacacttgaagcagtattgtaactccaatgatacccaaaaagagtttattcttgtgtatcccttgaaatatattcttcttttccagtttccttgcattgaattcgttgaagacttggcatagaacaaaagtattgaaaatgattgtgttcttgaccttttcatctacattgaagattgatcttcccttgaattgtagagtcagcaagacagtcacttgaaacaaagcatgtgcaatgaggtttctccacatgattttggtaatgagaggctcctttcgacccacaggcggtttcttcatgagttcgttggttggttgttcagtggctaatgctaaagctgctaatgtatccatgataaggttcacccacaaaagctggacagcagtcaatgggactttaccagaagacacagaggctacaaagttgataactagagcagcaacattcacagtaagctgaaactgaatgaatttctgaatgttgttgtatacacaccttccccatcttagaacagttaccactgaagtaaaattatcatccaaaataactatatctgagctttcctttgctacttcagtaccttggatccccattgaaagcccaatatctgcttccttgagagctggtgcatcatttgttccatctccagtgactgccactacgtgacctttttgcttcaagcactcaaccattagaagtttgtcaaatggggacgacctagccatgactcggattctttcaactttctccaatctttcttcttgtgaataattcctgaacttaacaccttcaactacagcatcactttccatatcctcatcaggttttagaatcccacaatcaattgcgatggctctagcggtgtggacattgtcacctgttatcattttaatgctcacaccggcagcagtgcaagtctcgacagccatcctaactcctggtcgacatgggtcctttagacctgcaataccaagtaaagtgagttcactttcttcaagcttctcatgaacttgttgatcatctccttcaagttcttctctatgaacaaaagcaatgcatctcaagctcttggcagccatactctggatgtttatttcaatgagtcttctctcttcgtcattcatgacactaatggttccatctctgttataatagcttgaacacatagcaaggaccatttcagcagctcctttccagtgggtttgaagagtcttctcctgctctcttcttattataactccactcctctttttctctgaattgaaggactctacttggattatctcgcatcttgtcttgacttgatctatatccaaccccaagctgagcacaccccatgaaagtattgctttctcggtcgggctaccagaaatctcaagagcagaatcaggactttgcttataaacacttccagtggtgtttaaaccaatggattcctgcagtaagctgataactgttggagacatttgtgacacaccatcctcactcagagtcagaggttctttgccaagccaaacctccacaaccttcatctcatttaaagtaagagttcctgttttgtcagtacagattgttgtggctgaccccattgtctcacaagcagagagctttcgaaccattgcattgtctttcatcattctcttcatagaataagcaagagtaagagtaacagcaagcggcagaccttcaggaattgctaccacaacgattgtcactgctgcagcaataatgcctataacagcattcatgatatcatcaaacttagtcttactgccattgaattccctcaatccgttatcatcagtggtgtgccctgtgaaataacgaaccatcaaaacgacaagaacaagtgctgcaacagacagaccaacctttccgatcaaagatgtcaacttctcgagccgtgcttgcaaaggcgtctcttcatctaagtccctgcttactgagctcatcatctctccccaagcggtgttcatgcccacagaagtcacaagcatggttccaaacccatctgccacctttgttccagacaacaaaaagggattcccaccaacattgatctcaacatggtcactttctccagtcatactagactcatccactttcaaagcatggccttccaagaataacccatcagccggaatttgatcaccaatcttcaagcaaacgacatcacccaccacaatgtcaaagatagaaattggatgtcgtcgtccatctctaacaacttccacccttatgtcactgctctttgtggatagcttctgaaattgtctagactggttgaaattagacacagcagagaccacaacaacaagaaagacagcaaaaataatactccccccatcaaaccatccatctttccagccatgttgcttgataccaaaccccaaagagagcagggcacaaaccaagagtatgataataacggtgtctttaaacgcatcaaacataaaagtgagaaacccttttgcaggtggcttctggtattcattagctccaagaacattctttctatatatgaaatcagaattactaataccattcgtgacatcagtttgaagggtttcagcaagttctttgactcctccgtattgactcacaaggctttcaatgttcttagccctaacaatatgagcaagagctttcgggtcaatactatcaagaaaagaaaaagaatcattattatcattaccacctgatcgtttggagggctggacgtcaatggcgatataggagagggagcgcaaaagttttgctttgctttgggttacgttcttggcaagataacgaagagttgtagtgaaggatatggcagtgaaaaccaacctccatttgcgtttgtgggatttggttggtgagccattttgaggtaatttgttctgttcatcatgcatggatatttgcaaggattttcttggccttagagacatggaaatgtattgttaagttgaatctttagagaaggaaacaacaaaagaagagaggtattcactttatatttactatcacagaaattaaagtaaaggagtaataagaggtaatgagaaattattactgtaccatgtataaatatatgtatatgtacggtatatgacgcgttcagttaaatttagaaggtgatgagaaagagcactgtgtcttcgtcgaaattactaatttactacggttataaataacagagaagtttttgcttgaaaatagagaaattacttctctttctctattaagggtggttattttcattcaacttattcattgttttattaaagacatatttttttgttaactttgatagggaaattgcctctttctgtttgtacgattaataaggaattttcttttttttttttt

SEQ ID NO: 163424 - DNA, 2112 bp, Cannabis sativa
tggggggtggggtgtgtgcgtgtgggttcctgttgttgccttatgctcaaggcctctgcacatggtatgacaaccgaaagattacacaaatcacaatctcagtggaactaattttttgttgtgggtgtgcatgattttctctttatgagaacagatgctgttgttcagtactttatgtcacattagattacctccttcctcaccgattttgattttttgacttatggtgttttcttgtagatctgcctccacatctaattccacgtgtccttttttaagttgtatttgagtagccaataatatgcaggaatatgatgtttgcattgttttttacaggatggaaaataaaactttggcttttgttggagactcactgggcagacagcagttccagtctctaatgtgcatggtgacgggtggtcatgagagggatgatgtcattgatgttggggaagagtatggaattgcccgtgcttatggcaatgctcggcctagcgggtgggcatatcgattccccagtactaataccaccattctctactactggtcagcaagcctctgctatatagagcccattgacaagttaaatccaaatacagaatatgccatgcatcttgatcgtcctgcagcattcttagttcaaaatattcacagatttgatgctttgattctgaacacggggcaccattggaatcgaggaaagatcaatgcaaaccgctgggtaatgcatgttagaggtgcacggaacactgataagaatatacaaatgatttggaaggcaagaaatctgacagttcacagcgttatcaaatgggtgaactcccagttacctaaatatcctaatttgaaggtcttttatcgatctatctcacctaggcattttgttggcggggaatggaacaccgggggaagttgtgacaataccactcccatgtccataggcaaggaagtagaacgagatgagtctagtgattctgttgctgcagcagcggtgaagggaacaggggttaagctgttggacattacggatctgtcccagcttcgggatgaggctcatatatcccggttccacagttcaaccggatcatctgattgtctgcattggtgtttaccaggccttccggatacatggaatgaaattctttttgcacaattatagccttttttggttgattctaaaccacaatatgtttccataagatgccctgaacagcagcaggtaaaatggaagtctgtgaatgctttactgcccaagacaattgaagcaacgaatggagaagaaaatagcaatcgtataagtcacaggtatttgttgattgaaagtaacgaccatgctagtccccacggtcttggcattaatattatattcatgtctagctgtaggtagttagtgagccatacctacctcgttcccggttttgctgattctggtgtttctctagttgctggagttggagacactagagagaacaaccatgtaagtttttctcaactttcaaccaaacatcaggttgacgatttggtcgttttttctgtttaggaggagaatatacagattttaggacattctgaatttcactacccttaaattttatcaaaatgtacgataaatgtgtaatttattttgtgattatgttctattcatgttcatttttcaaaacactcactatttcactttttaatagctgtagatctttgtcctttgaaaattctgtgacattaaagattgtcaaaattatggaccatttgattatcatataattttaattactttacagttaacatatgtactccttggcctaggagcacgtgtatgtatctttcttgactaacttttgcttttctttctttagaagaaaccattgtaaattgcaaacagtttttaaaataattcaaaaaaaattatttaatgatagagaaagatccaactgtctagtcaaacttaacgagttttatgggaggcgtaactggcctgctaagaatatgacccaaaacatcatccacgttatgtatgaatttaatttttagggatatttgtggcataaataccacatttatatattatatttttttttactattgttagagtatctaatggagatgcaaatgagt

SEQ ID NO: 163425 - DNA, 1660 bp, Cannabis sativa
ctcaaaactcatcttttaaacatagaagtcttgtacaaaaattgagatgatttaacataagaacttaaattttatttgtggctacattatataaaagaagagaaaggtgataaagaaacatgaacttctgaaaatgcaaaatgattgttgttgtgaaagcatttgcaagtttgaatttttatcagaatgaaaattgtacttgcatgaaaactaaacaaaagcagtacaatttaggattaaaatatactctccaatcaagtctaaacatattgctgatctcaaaagtggaaaaccttcattaccaccacaagaaaaaaagaagtaatttgaaacccaaaaataaatggctttccttcaacaatggaagtggttttgatcaaaagccatgtagtactagtaactctctaactcagatcatgtcttgttaaaaaaaaggaaaaaagggtgagcttttctgagatatcatgagttgtttttgtgaccatggtagtgaaaagcttcttcgtctaggtcaaattcaaaggtaacaaacatttttcttcttctctctttctttctttgaaatctatttcttagaccttcgtggtcgaaagtgtctaagaatgaaagcatcagcaaacaaagggtacttctttttgatcaaacccttaatacatttccaatatgagaaatccacagactccccatctttccgtacaacaaacaaacattttgttctcttaaactccggatgaaacccaagctacaaaattaaaatcaacaaatgagcaaaatcccatgaacaacaacagattaataaaaggaccccagatgaaaaatcgtatctaaaaatgttaccataatggattgaactccacaaccagtcttggtttcataatctggatgaaaaggaagcaacttttcaagaattacattctcatgctcatcactgagtttatcaccaatcttatatctgctctaatacaaaatgtaatcaatcaaaggtaaaaaaaaatcatataagagcaaaagatcagaaagaatagaaaaattactttccagagtgaatgatggttcgaacaaagccaacaagaggaacagtctcctctaatatccgatcttcccaatctacccattgatcagaatcagacccatctttctctttctctttctctttatcttcttcgtgttgttcttcttctttgtagaattttgggtggggtatgacgacgggctttctgagtaagctgggagcataagagtcatggccgcgagtgactctggcttcgtccgacgacgccgttttgaggacgcagacaaaaggtggtttataagaagaggaagagtgagtgacccagttgcgtgtgaagcctgaatttggtggtggtgtggttctagagccggttgccgccatggctcctcctgaaactggtgattcagttattggaagtgaaaccccattggcattggcagaggagagtggtgctctgttctgttatggttttcgatagaccgcaatcttagcaaccaatcacattcctccaatctgctacttcatatgactaattcagatcgccttgggcttttctctctctcaaattaatgggcctaatcacttgttcaggcccataacctgcttttcttttcttttcttttctttttttttttttttttttgaaaa

SEQ ID NO: 163426 - DNA, 1255 bp, Cannabis sativa
tcatctcaaacaaactaaataaataaataagacaaaggtttattatagagcttgaagatcatgaaagccgctatcagattcttatgaatatatatatactgtcatttatgtcaaatatttgttaaggccagaatcatggatacgcaacaaattaggaaacaatgtctcattacttggtaatatgatgagaccatatagcttgctaatcatattcacttttttaatgcccatatacaactgccacactatatccttccaacaatgctaggcagcctcacgaatctcctattctcttgtgtctatcaaatgcttcttccatggagaaaaacatacacaagtatttgaaaaacgaaggctgaaaatcgagctgtttttgtagtacgcatgaacacatttcatttaacaactcagcaactggactcctttgtgttgtttaataaatgaacttcagaagatatgaacttattgcgggattgaaaaaattcccagtcaggaagtttgacatccaagcgctgcagccaattcttagcatccagcagcaaggttcttgcctgccgctgttcctcggattccccaggtgaaaaaattgaatcttttaacttgtaggaagcaagaccaaaaatgggcaaagagatttttgaagtgtctcccttcttggcgctggcagcaggatgcaaccgtggttgatttttgcctgtaacgttcataaatggatttagtaaatttttgctcctttgaaagcaaataagatgaggaatagagtgagggaaatatgtacctgaagaatgcgttgataaaggatggaatgtaagaaaagatgcctcgagactttgtagagttgggccaacaggtattctgtatattgggtacctacatccaatttgaaattaatctattttctaaaattaacatagtgaatattcaacaagaactaaaaactagatcttaccatgcaacagagagccaactagcaggcaatatatcacagcttttgtacacgttgagcccagggaatttagatgcaagattcaaaacctgatacagttggcaatcaaagcagaattagaggcacaagcataatatcatatcaggaaaaaaaaaagaattatgcagaaatcaatacataaaactccaaaaaaatagacttacctgatcatataaaggtttacgaacatatggtgattcactttcaaggtattcatatacaggttctcctggtgagttataagccttagtttctttacttgatggactc

SEQ ID NO: 163427 - DNA, 6150 bp, Cannabis sativa
tgagttgcttggaaaaataacaattaaagaaaagataattatggcaatagtcatcactaacccgacaaactggacagctagtaggattaatggcgatacctcttgccaacaagtgatctattgttaataagttattatgagaggcttgccaaaaaataaatatatgctttggtgcggataatccacaccaaatcattttgtgattatcaactttagcatgaggagtaagaaaataattgtaaagcttactgacccaaaatcttcccccttttccatcatccaaaattgtctctccattgttaacattcctaagattaagaagtttgcgccagtaccaactcacatcacctttctgatcagccaccaagaattttacccttcttcaacattccaagagctaaagaaacaattgactcaaccacgtgtgttgtcaaaacccttagacaatgaagagctagacgtgtacctagcagtcacaaaacatgttgtgagtgttgtccttacaagataagaagatggtgcacaataccttctatactacatcagcaagagactaatcgaagctgaaagtcagtacccactcatagaaaagctgacctacagcttgctcttccagaaagctaaggccctacttccaggcacaccctctgaaggtatacactaatcaaccattgcagcaggttttaaagaaacctaaagcatcaagccgactactcaagtgggtcattgagctttgccatttcgacatcacatgtaattaagaatagccataaagggtcaggcccttacagacttcatggctgagtgcgaaaactcatctcttaaaatccctcaagatccaagagaaaagcaagagccagagaagaagaaagagtaagagcagtagcacaaacctgaagaaccaacatggaaacttcatgtttatggaagctacactgatcaatttttcgatgcaagcattgcccttataacacatgggggcagtagctgcacggagcaatcaaattcggcttcaaagcctcaaataacgactctgaatatgaagccttaatagccagcctcaagctggcgtatgaagtacgggctgacaacttggacatattcagcgactctcaagtagttgtgaaccaagtcctaggtgaatacacagcttgaggtgaaaatatggtggcctgcttgagcaaaattaaagacttactaagttagctcaaaggctacacaattacgcagatccccagagaacataatgctacaacatatgcacttgcatgtcttgcaagcagcaccattaatgacaaggcaaacctggtgccaatacagtttctagaggaacccaacattaccatcttagaagaagttgacatgttggatgatactccaacatggatgacacctattgcagcttacccccaaaccagagccttgtcagaaggcaagaatgaagcgaaaaagataagaagaaaagttgataggtatctaatcttagacagagtaatatatagatagagcttctccatgctgctcttaaggtgtgtgactaaggctgaagccaagtggctaatgatagaattccatgagggcttctgcgacaaccatgctgggacaaagcctatccaaaaagatactctgactagggtacttttggccaataatgatctagggctcaatggaatacgtgaaaaagatatgacaagtgctagacgttctcaaaaattccaagagctccacgtaatgagctcacgatgatgtagtctccttggcccttcaaagtgtggggaatagacctaattggtcaactccaaaagggaaaaggacatgtacagtttaatgtagttctagtagactacttcaccaagtgggaagaattgaacccttggcaacaatcacctccaaataagtcattgactttgttgtcaagaatatcttatgtcgattcagacttccgtaaaaagattgtgttagacaatggaaaacagtttgacagtaacatgttcatgctttctgcaacagacatgacatcatcaaaagcttctctgtcgtggcccatcctcaagcaaacgggcatgtagaagctgtcaacaaaaccctcaaggacaccctaaagaagtgccttgaggaagcaaaaggtaattggcctgaattgctcctagaggccctatggtcgcataagactactgagaagacaaccactaggcaaactccatttgctctagcttatggctatgaagcgattttacctgtagagatggtgtcaccgtctcacaggagaacaacctatgactaagatacaaacaacatcctgctggcaaaaacctttgacgaaggagaagaaagaagagatcaagccaacataaagttataggcctaccaacaaaacgtaggaaggcacttcaacaagcaagttaaggacaggaaattttttgtaggagacctggtcctctgaagagtgttcctcaacaccaaagatccagcaacaagagtgtttggacccaacagggaatggccctatcaatttacaaaaataactagtaagggagcctacaagctgggaaggtacaacaaaattatgaagctcattctcctaccaagatactggaatggagagcacctttaaaaatactatcagtaaccagcttacaaaacgctactctaaagtagtagttctacctactcaacactagagtgtaaaagagctagtacccacgacctttttggcgtggactcccactgttcttcaatggtcgcctctactatgcaactcaaccatgggtagccacctgatatctagaagcaaaactttgttatgtaagcttttagattcaatttatgtaagttgtacaacaacgaagaccaattaataaaaaaataacaatgtttatgttcaaattattgtgtctaaatcacttgctaataagattaacttctcaaagttattctttttccagttccatatgcgtacaataggtagcaccccaagaaaattctcaggcaaggtctatgaaacttggtgaattacaagtgaccaagagatcgtaagtctgcgtgttcactttggggacacccacaccgtacaatgcatgaactagcacaaaaaacatatatagagagagaactagcacagagaaattaatgaataaataacaatgtttatgttcaaattattgtgtctcaaccacttgctattgattaacttttcaaagttattctttttctagctccacatgcgtacaataggtagcaccctaagaaaattccccagcaaggtctatgaaccttagtgaattacaagtgaccaagagaccgtaagtctgcgtgttcacttggggagcacccacaccgtaaaatgcatcgaactagcatagagaaattttaacgcttagaataagctactaacctacctctaaatttagaggttggccaagcagaggtgcctgtggtcgaccatggtgtggagagcctggacaacatgtccaaggttgaggaggctattcctactaggaagaggcagtacaagacctgttctattttctccaacaaccctctaggctcatatgatggtgacaggcagcccttgaataggcttggcaagcctttgctgatcggtgtagaccatgttctaatacacgttgctgagccctagattctcaatcaggagcgtagggagatcgttgggtctttcctccatctattgtcagtgtcgagactcttaacaagataagagaaagtggactggtgagaggcgaccagtgtgaggtgccgtcgagggaccaacaagcgcaccggttacccctcgactggttgacaacacgattgttgtgtgaaagactaaactttaaaaaggctaaacttcagaaaggcttaaaaacaaaacaaagtcaaaattaatgccagaagacaacgctggtcggctagcccctctatggtgctactagggccggttagcctcttaacaacactgcactagccatcatgccttgcacaactgctccttatggccagccagcttttaaaaatactgaaaagtgagaaaagttggatgtgcaacttaccgaggccaagtcttggagaccgctagatgatagcatatctagctcaccatcaccgagctccactcatcattgattgggggcagactctatcaatacgcctacgaactgccttcatggctctttaccccatggccaaatttgcccctcggctaggcctctaggcgcccttgcccgaaggccgagagggtaaacattcataggctgcccagctagtgcatgcttaggagtaggaagagaaggtcctgcagcgtcaccagaacaggtggtctaggccacttcaaaaatttctagaaaactagattctagcccacaaaggcaagacttactgaacctgtgaccacacggttgtcacatccccagaccgatactcgaaatcacatgcatagaagagacaaggggaggttagaaacctaacaaagtgataaggtatagacaaaactctggtcagtccatacccaacggtacttgccaaaaaaattactcatacaaggttgggtatcagtgaagtaccgtctcaagtataccaacttaagcaaatggggagtgttaagttgtacattagactataatagactcaccattaagtcttatacagagtttccaagggaatcacctatgacgttttagttgtatatgcctacaagcccttaacaaaacccttgtcgaggtcaaaagaggacaaaaacttggccgctcgcttggaacctaggccttgaccgcccaaggttcccaagcttagagaatgtcggccagggttccatgacccagccaagggctggccagggaccccaagccaaggcataggttggccagactttaaggtacatccctatggtcaaccagctcccatgagaaggccccatggcaagccaggtcttcaacaagacccctatgaccggtcaaggtgtgttacagatcaaagtgtgtgtttttcaagagctcaaatatgttcttcgtgctctttgtgactcaaagaatcaagaatcacaacggagcctaaaatcaaatctttttcatcgggaaatcatacattatacatcctaaaactatcttgcggatcaaaataccaaaatgattacaatctaacgtagaaatcaaaaaatattcaaagcaaataaaagctttaaacaaccaatgaaaaatgaaatgaaccagtgaataatgggatttgaaagcttacccgctactagaaactgttgataaagaagataggaagcttgaattgtcaaaatagtacgaaaatcctaggagatggagcactatgggcgtcgggctccagagagaaggaagagctttcaagagttactttttgtagagagagactaaaatgttggaaatgagaagtgatttccctcccataagcttatatagtttctgtgcgaccctttctcacttgacatgcagcatgtatctaaaaatacgtgtagaagagtaatgcagttaacttactggtaaggaatgtgatcagacagtcaagagcaaatatttcaaaggctaattgtactgcaatatttgttcagttaaggcttcatcagtcccaactaagctggaaagtccttatctgcacagacattcgcatagagacttgggaagaaaatattatccaaatttttgcccacctgacatggcatgtccacgtggccagtgtcagtgccacgtgagaatatagctcgccaacaagaaagtcaagccatctacttagcactgcaagcatcagtattatattcgactccgctgtcggttggccaaatttgaggtcaacaaaaaatataatggggtcctttttctttataaaagattaaatgttgtaaattaaaaatgaattaggtactaataataaaaatataaaatacaaatttttgaaaaataatttgtgatgtaaatacttaagtttaactctcggttgcagataaatacttaagtttaattttgacggtaataatatctaagttatatttttgaaactttaataggtatttgattatatagtatactaggtaacaatgtcgcgcttcgcgcagctcttcaaatatttttaaactatattattttttaaaatacgacaaactaaaaactaactaaagagtcatcatcaatctaa

SEQ ID NO: 163428 - DNA, 2173 bp, Cannabis sativa
tgtacacgcccaatagggctctctcactctctcttcttacttcatctctcacacgcctctaaggatgttcatctttctcattagagatttgcctacttgatttgtgttgtgtatccttatagagagctatatcagatcccacctatagaaatctgaatagtactatctctaagtattagtacaaccaaaaggagagtaggtcattacccgctatcacaacggagccaaacctctataataaatctctgtgtttattacttttcattcttgtttgtgtaacacgtggcaagcatcagatttctacaaacccaccgtcggttgatcacttttcaaggtcaacaggttatattatccactcttgaatgttattgtttaatcattttataatagtgaaatggataattaatttcatgtattttcttttattacttttcttgttgagtccttgtgactcacggatgctctgtggtgtaagtaaaggcaaagaaaagttagagcagccatgaagtggcagtcttctccagcaatgtatatattgaccctaccggcttgtgtaccgagttgccaagaattgttctgagttgtatctgctgtgtattttgatttcacattttgacttgtcattgtatataatcattttgtaaagcttttacaattaggatccacagaacacagttttagtatcgttatgatgtctgttgttagcgtttcatgttaatgaagtttttaatattatcacaaattttaataattaattaacttattagtactaaattagtttataaattacatacttggcatccttataaattagggcgttataatatggctactcataaattagctaagtttatgggtggatgagacttctcatgattagagaatattcctccaccttactattgttgtataataataggtagaggtattttctccttaaaaaaaattctaaatatccaactcgaaagactaaaacttgatcatcaagcatcaagtttaagtttaatgaccaagcgattcatagtatacccatatggaatctctcagcataacacactctactctatctcttgttctcaaggcctgtgcaagattgaaagtgattgagaaaagcaggatactacattttcttataaggggcacgagtttgatgagtgatattcaagttgggactgcaattgttggcttctatggttgttgatgatgccagtgaggtgttcgaccaaatgggtttgaaagatattgtcttgtggaatgatatgatacatgggtatgttgggttctgttgttttgagaaggctattaaattgtttatgcaaatgcagaaggagggctgaaacccaattcacatgtagttgtaggtttgctttcagcgtgtagagagttttatgaggtgagatttggacgggatatacatggttactatttgagaaacgaactgcttgatttggaccccgtgtgggaacttcttgttgaaggttttgaatatgacttggttacaataataggtaaagttcaaaagcctttaaattcatcaaatggacctttaaatttggccagaaatgatacgtttatagtaaatgctttgatcaacatgtagaatgactgtggaaatttagattcatcatgtaggttatttaaaaagtctccaaacatgatgttattttgtggaattctatgatgaagctttacatcaaatatagcgtttattactatgcggatgtaaggcgtgagagaagataagataactattgctataatgttgtcttcatattcaagtttagctagtgggatgagaattggtaagagtttacatgctcatgtaatcgaatgaaaatggaaattgaaatttctcttggaaatgcactcttaggtatgtgtgttgaattaaattttgtcagggcagcccaaaatgctttaacagagatgacaagtccagatgttgtctcgtgaaacactttaattatggcattggcttgcaacggattgagagtcaatacaagctttaaaagtaaaactcaactcaaacacaattagatttattatggctgctagtgatgatgaaactattgggttttatgccctaaataaagctcatttcaatataatcacatttactaattaataaagataaaaaatcgcattttatgttgcatggttcacatgttttatt

SEQ ID NO: 163429 - DNA, 3022 bp, Cannabis sativa
  modified_base (2252)..(2253): a, c, t, g, unknown or other
aagggcagggccgaggtccgggtccagtctgtggttcaggtttatgttcgaatccatggtcagggccaggttctgagctcgggttcgagttttggggtcggggtacgagtccagtttggggtcgaggtccaagtccaagttcgaggatcgacgtcgagatctggagcgagagtctggagctgagatcggagttcaaaatattaatgaaagaaaatacaaataaattataattgaaaaaaaattgtttaaaagtttttgaaagtgacaaatttttttaattttaaatttttttaaaaaaatttgattctcattcctaaaattataaagtgaaaacaaaatatttttacttttttaattaaaaaacaaaaaattaatttaaaaattacaaaatatacactaagtatatgaaactcgatacttaatcaccataataattctactatttgttaataattttggaaaggttgtaatggtcattctcttacttcaattatgaaaattttgtgttgttttctatcatagttacttctacatgaatcaaattctggtcagaaaggcacctaagtagattacaagaatcatattgactttctgagcttttttttcttccttataaataagaatcattgactttcatgcctgttttcatgtgacactactactaaactgagatactttttatttttattaaatatagatatggtgacaatttttccacatatagtttaactatatagaaaacagaaacattttcagctagttctaaaagttaaaaaccaggctcttcttaaatttgagtttttctttttctttgaaaattagaaataccatcttttctttttttgaaaattaccaaacttaactatcctttattaaataaaatgaaaatttatataatggattaaaaatttgaaaaaaaaaattatagaaacacgtcaacatagaaaaaaaattatttttactctttgaacctttttatttacaaaaatacatttttttgtaaaaataataaactattttttgattgttttatagtttatttatagttgtattatagtcaggggtgttcacggattggtttggtccggatttttatagtttttgaaccaaaccagtataacgattttttgaatattagaaaccaaaccagaccaaaaaatttctcaaaccaaaccattaagaacggtttggtttggttcgaaaccacggtttaagtggaatttataattattcatatttttaagtatttgtatactattattactaagtttttaattttatttttcaaaatatatatttaacatgataagtaatagatctataacatataaataagatataaaaatattctcaaaagtcaaacataacataaaaattcaaaattcatgcaataaaaaacgtgacacacaaaaaaattttaaattatacatatagtcatgtataaaaaatatataaattaattatttattataaacggtccggtccagtttaagcattaattatttattttgaaccgcaaccgaaccattacgccataaacggtcaggattgactaaattaccaaaaatagtttctccggttacggtttacaatggttcagattgtagtggtccgaatttaaactgcggtttttcggtttatatggacagccctaattatagttatcttctcatgagattgtattttagttgtttttaattattttatagctcatttatagttgattataattatcgtgaggttaatttctcattattttttaattgttttcttactctttgctgagtaagtgtatctttgcaatattaaaattttacaagcatattattgtaaataaaaattttttatcgtagaattataaataaaacattaacaaaatatatatttttaaaaattacctaaataatattgtaaaatagtatcaatgtgccaatactaccataagaaatttctggaaaagtaagtgttgttagtatactttaataaaataattatagtaaccattaaccaattgtaattgtagtgccattttataatcatgggtggactcatatagaggtgagaggaggcagtcgtcacccttgaaaaaaaaaattaagaaaaatattgttgatctcgcttttagccaacgacaatgagtcaattaataagcgataagaaatataattaagatagagaaaaaaccaataagccataaggaacacaaggttttaaaggggtttaacccctttagtttggtaatagcctactcnncttagattgtattaacttgagaacacaaaatacagtgtttcctctcccaaagctctcacaatgaaatctctgagtattttctcttagatctctttgaagcaattctttcggccccttttacagtgaggatggatcactatttatagggttaaacgcatgagggaaggtttcccttttgcttacaatatctataattggtaagaataaacattatatatttagaatacataaattgagggattcagacagctttccatatccctttgatacgatcccatgaatgtagggattgctcgtgtgcttcacgatatcaatcttgaagttgctaagtcttgatacattgctcggagagataacttcgtttgttttctggatcatctgcccttgccttgctcggccaggcaaactttgtttgtgcatatgcatggctgaggtctgttcggaatatctctccagccaaatgtagagaatagcaaacatgtgtcaccagtatgtgttgccacatcgtagtacgaaaaatggaataccaaatatatatattttagttagttatacaacatatattagtaattaaaggtgatatatataaatataataatagatttgatatgttagttaggctatctcgcacatactatagaggtcaagggttcaaattctagtaaaagcatctttacttttagggtaaatagcagcataagtacccaaaattttaagtttgtaagctgcataaacccaatatttatttttaacggcataagtacccaat

SEQ ID NO: 163430 - DNA, 1037 bp, Cannabis sativa
ttttttttcaccttcttaagcatgaccataatcatcatatatattttgaatatcctgttgtatgatatatacaatattgagcatagttaaaactttaaaatcccacaaaactatgttctagttctttcaaatgtgatacacaagagctgcaataataaccacaaaaacttgttgaaaaaataaaagtgaaagtcgaaagtcaagcataaaaaatcaatccaacaacattattatagttatcttgagcatctgtgaacttcctacaaaataaataaaattaaattagtagattaaatattaacatatatattaaaataatattcacaaaagtaatattttttttttcaaaaaattaaaaataaaaaaaaaaaaaaaacttgtatgatgtaaggatgtaaaacaataaatgaataaattaaaagactgctattacatttttcatataaaattagaataaattatcaaaatcataaataaactaaattcagatatatctacaactgaaactatatatttaattaagtaaatttataactcaccaaaataaaaaaataaaaatatatcctaattgaaatagtaattatttaattaaaaaatgataataatgtaacaagaaatgaaaaaaaaaaacatttaatactctatatgagtaacagaaggaaaaaaataaaacatttaatactctataaagaaaaagaaaaaaaaaagacaaataactttatcaaactaaaatagtttagaaggagttgaatgaacttactgcaataaatctactattgtatcttctaagcgatggattaaactgaacatgttcttaaaattaattatgatagttttcatctcactttattttagtctttttttgtatataatgatatgggaatcgctcaggtgaccgattagttgactcgtttttctaattcttatatgttggttgtgtttttaataaaagagatatctcgattgttagaaaattaatgatatacccaagatttatttgtatataacatagaacacaatagtaatatataataatt

SEQ ID NO: 163431 - DNA, 1357 bp, Cannabis sativa
taataataataataatagtattgtgttttttatttcaaactttcatcaaataagtacatttatctactaaaaaaaagaagtaattagttctattcttaattcaagagctttaattctttagcattattgtatatgtggaaagaatctatagtacaccatttttaaaaaattgttttgtagattaaaaattttaaatagttttttaaataaaatttaaatatatagttactattagaatttgttctacattgctaatgtgtagaattaaattgtgatatataagatgaatgggctactcctctcatagccaattggttttgagatgaaaccccattcatcttattttcaaattctaacatggtatcagagccacttgtgatctgttgtgagcccaaattatcatcggtctaataagtcgtttgtgatccgttgtagttatttattaagacgtcatgcactttgtttaattttaaaaaattcaaaataatttacaatacaaaaaataaaatttaaataaggtatcgtatacatatataaaatgaaagtgtgcatataattgtttaaattttattttcaattattttgaatttttcaaaaaattataaaataatttaaataaatgatgtatatgtaaaagaattaatattttttttacaatactatatcaataaaagaattaaaattaaaacaatctgaatattgaaaacatgaaaaggtgaacactcatttctaagagttccatactaggaatttctctatatattaattatcatatcaaactaataattcttaagattttaaaacttcactcaattattttaaacttcactcatttcaaagagatccattgtattcaattatttacaatagggttgatcatttaacctgttgggccgactaacccgaccaacccaaaccgaaaatgggttgaagtttatttggttaaaaaaattacaatctatgagttatgggtcagaatcggcctgggcaaattacaatccaatattaaacccaacccgggccgaccctgtaacatcaaaaaaaaaaatagtatgggccttaaatattgggctgctactatcactcttacctttaccctaaccttaacaaacataatacacccaacacaacacagtatatacacatacaaatgagaatgacatcataaactctctctctctctctaacagttgccctaaccctaacacgatactgcctcccctttgctagtctctgcctctctctctctcgttcttgactcgattgacacacactacgagaaaccaggtcaccatcgtaaatgagtgtattctccatgtcattttgtttgcttgagtttggtcttttaaatctacaa

SEQ ID NO: 163432 - DNA, 991 bp, Cannabis sativa
  modified_base (955)..(965): a, c, t, g, unknown or other
agacttggaccacaacacggtcccttgccccaaatttggacccaacctcggtccctagactttatatcctgaccccgtaccctagacccaaaccctagattggacattgtacactaccccaaccccgtactcaacctcaaacctagaattgtatgccgaacccagacctagacccagactcaaaccccaaccccgaacctggacccgacaccaggcagagcctaaattaggtcttggcctcaaaatcgcactcggtcggggacctagactcgaaccccaacctgaatcctgaacctagacccgacctcgggcaaaccctgaacctggcacccgctccctaccttggacactactgtcaaaccccaacccactttccctcccctgacccagacctaaactcgaaccccagacccgacctcaaactctggaccctagaccacaaaccccgaaccctagaccaagaccccaaacttagccctagacccgaactccaacctcagccctagacccaaacctcagcctcaacctcggcctcgaccaaggattcaggcacgggccctagccctagccgtggatccaagctcccaaaccaggacatggaccttggcctgcgacctgatctcaaacctcaaacttgaacccaacttcgaacttcaaacttggacttggatctcagaccctagacctcgaacacagactcgatcgtataccttagacccagacctagaccttaaatcctgacctagacccggatcagatcagattcatccaatgtaatagagatagtatttattggatatgattggatccattcaaatgataataataataattaaaaaataatcataatcttcacctatacatatatattttaagtataacaacataagtttgattaattatccaaaccaaataaaaatactaattagttatgttaatgttggaatttattttnnnnnnnnnnnagatttactcacaagtatgttgttta

SEQ ID NO: 163433 - DNA, 1171 bp, Cannabis sativa
ttgatattgttctcatttggagcagacctttactcagcactatcacctgtctgaaaaccagaccatgacaactcaagaagagagctttgagcatctgtccattgatcaagataatcttttgctaacactacaataccttccacacccaccaccttcttttgccaaacaaattcattacaagcactccagattgcccaatagagtgttgacatcaagagtttactgtccatatccgcacaaaaaagaaactagtatgcatcagtccaaaaatgaatagttctctgttgagatagttgtaccaataccaccccaatcccacacctatttaacacatgaacaggtcactatagcatgcataacagtctcctcttccaacctacaaattggacagaaagagctaacattgactctcttagtttgcaaaagacataaggttggaaggcagtttcttcctgtacgccaaactgtgtttctaaccttgggaggtatttttagacgccaaaaagaagaccagaatttagaagcattattgtcattatcttcttatctgccattagcttgttgaagtagtttgtaggcgtttttcactgagtgtaagcctgaaggctcatgagaccaaatcaatgtatccttagccaatgaaggaagaaaatgtatgctttcaataagttttttgtctctgtcttcaaacatatcctccaaaatctccacatcccaacgtccaccatcagttctcattaggttatttacagtagcatttactaaatttggatgaaaagaagtaatatacgggttatcattgcaaggcagccaagggtcatgaagaactctaatatctctaccattcatcacacaccagtatacacctttacaaaccagttgttgcgcttcccaaacactacgccacacataactagaattgtttcctaatgaagaagtgagatatataagaaccaataaaaaattaccctgctttaaataattttgctaccaaagagtcggggtaagagatcagtcgccatccttgctttcctagtaacgccaaattgaagtctcgaagatgacgaaaacccattccttccttacctttatgagagcataagtcgatccctaaaagccaatggatcccttttcctgacttattagaagattgccaccaaaactttgacat

SEQ ID NO: 163434 - DNA, 795 bp, Cannabis sativa
atcctattcgacaacagcttcgaaataattttataggaagtattacacagactaataggccggtaatcgtcaaaggtggatgcattagagcgcttcggaatcatgacaataaaggtgcggtttagctcagccacaaacctccctgtgcgaaagaattcctgcgcagtattcaccacatcaccaccgacaatatcccagaaagatttgtagaatttacctggaaaaccgtcggggcccggggatttaagaggaggtatctcccaaacaactctcctgatctcctcataagaagggatcgccataagactctgattctccgcttcactcaccaaggccgggaccaacgagtataagtcatcaggaatagaagggagggaagattcaaaaacctgctcgaactttccacggatatgctcctcaatcactcttctatcatccaggcaaaccccttgatcatttctcataaaccagatgaagttgcgttttcgccttatgaccatggaggcatgaaagaatttagagtttctatccccttccttaagccataattctttagattgttggcgccaaattgaattctgtctagtttcgatctcctccatctcgagcataatagcttcttccaaagaagcattctcctgggacggatttttcttttgaacctcccgtaggaccttttccaacatgttcaatttcaccttacagaaaccaaaatattccacattccactgctttaaagcattcgcagttgaggtcaatttttttgacaaaatgaaactatgataaccattaacc

SEQ ID NO: 163435 - DNA, 882 bp, Cannabis sativa
tctaaatgatcaaacttaacctctctccaactggaagaactagtccctagagtgtgcaccatagcttttacatcaccaaaaatcttaactaacttgtaaatgttagatttggcatcatacccaaatccagaccccctcacatccacattggaattgggaggagggtcaggtccccggacgaacttatagccgcggattgttggattaaagaggacagatgataaatggtttttactaaacatgtgaatgattccattacaatgagaaatttgtaagcgttgccttatttctaagaagacattcactttttcaatgtgacaatgaaaatcatcagagacagtaactagtgagagaaatgtttcagagtgattgtaacgatcccccaaaccatgtaagcaaagaaaagaaaccatcttctttttcttggcatttttatggtattggtggtgtttgattgagaataaaggatcattaataagattaaaccaagatttacaaacgaacctacaatcatctgttagagaatcaatgtcatccactctcaacaaaatattctccacaatctcgtttggaatcagccaaaatctattcatttttcttcctgtatgtatcaaattcagtcatatattataatatgctatatatatatatatataaaagtaggattattagaattggaagagagacgtacctgtgtgatgataatcaaggtgatgcgcgaggccatggccatcgaaacccattaagtgattattagaggcgactgtggaaaacaatttgggaaactaggggttttctaaattaattcattaattcaaattcatatgatcatatatatatatatactaatgaacataaagacaatatttcctagtgaaatat

SEQ ID NO: 163436 - DNA, 2061 bp, Cannabis sativa
ccattccctttcttcccagccattgccaccctcttccttccaccacggcccaaacctcaccacctgagcatcttccttgccgtccagacccttcaatgtgaagttcaacccaagtcgttgaagcttgactcaaccccgagactaagttttctcccagccagtcgcaagtcggacaacatccccctctctctctcttctatgtccctctctattgccaaaaactaactttcatcgttcctctcctcttaccaacctgtggattgcacgatctccctacatagccacaacttattctcttgcatgagtttatgagtgaaatagttttgtattttttccaatgatgctccaccatgagagagagagggtgtaggtgggtcgacgtctcctgcgatcacaggggatggagaggagggcttcaaccttcatgtctacatctcgaaccaggtttccatggtgatagattgaactaaggagatgcgcacaccaagatcccgatatttgttggagcacttggagttgtctatcctctaaacgttgaaggtctgttcccaggagaccgagtagatttttaagtttccatggtggcgaggttggaaagaatttcagagagagagcgtgaataggaaaggggattagggttctgagttttttcataaaataataataataatgataaatttttttgttttttttattattttattttaggaaattagggtttaaagaagaaagaaaaaaagattttttttatgattttagattaattaattttaaattttatttatttttaaatatttatttaaatgacccaataaaattataccatgtgtacactatgttgatgtagacaatactctgtgtatacatagacatgcctacatgatacttaatagctaaatttgaataaaaaatgtaaattgctaatggtattgtagttttagagattttatcggtaaaatttgaattttaggggttaagtacaagcaaagtaaaagtattgagagttttaccgcaattatccattaataattactagagtgacctttacaaatggtctaatactctcaaatgtttgtttatgtgaaataccattcatactcaaatgcattgcattgatgatgccacattactcattttatttagcttcatcaactatatatacatgtattttgtaggtttatatagagaagataattaataattttttgttatgtgtaggcaaagttcaaaattaaatcaatcctaatgatggcagcattcttttcactgacaaccccagttggtattgcaattggcattggaatttcgagtgtttacaatgaaaatagtccaacctcattaatagttgaagggcttttcaatgctgctgcagctggtattttgatttacatggccttggttgacctattagctgctgatttcatgaacccaagaatgctaaacaatattaggcttcaattaggggcaaatctctctcttcttcttggtgctggttgtatgtctgttttggcaaaatgggcttgaccaattaagcactacatataaatattatatatatatatactcacatgtactgatttatatatacatacatattgttttgcacttctttttaatttccggtgtgcctatcatttgcattcttttgtttgttcttaatttatgtttggatttgaaattgttttgaagtttatattatttgatttgcattttccatggagaccaagcttttactagcttttccatgtactataactttgttaacaaattttttttttaaaaaaattttgttaacaattgatttacattgataataaacttttttgtatttgattatgttgtttctaatataccactattctattaatttattatacacaatattgtcccatatgaactaaatataaaaaatactaagcgccatttataaatgtgagttcactataaaaaatcttacttttattcacaacaatatttgtgactaaagataaaaaaaattgtaactaattaattataaattattattattgtgttgtgttaaaaggtccgtggctaaaagta

SEQ ID NO: 163437 - DNA, 1229 bp, Cannabis sativa
agagagagagagagagaggtatgaagtgtgaactgggaaccatttgggtcccaattatactagttaaaatttggttcattgtatttggatttggacttatttggagaggtatgattcagggcaggatccagcattacctttttgaaatgaagtagagaatttgtctttgtaaacacaaatggcgaagccaatattggtaagccgacataaatatacagataaaggaaatcgtcctcctaaaattacaaggtcacagatttaaaatagatctgttttgcaacatggatttttgttttcttctatcaaaactatccttcttatttgatcatcagtgctattagtgctcaatgctcatggttagtaattttccatattacttatttaattaaaacataataaattccaccaattaataacgatttgcctcctcatgtaatctctggcagcttaaactgcccaaagcatttctacttcttgtttcagtttaaatctatatgcataagtgagagaacctaaatttaagaaagaacaaaataaaaaattaaaaagaaaaacattttttaaaaattaagagaagattttcgctctctctctatctttttttacaagtaatttttccaataggaaaactgaagttgcaaacgaaacctatagtagagttcactcatgatggtcacctagtgttaattattttggtggcttttaattacctaaggctaaatcaaattgcttaaagttaatttttttaccactacactaaataaagtttgttatattttctaaatatataatattttatctatataataatttttttttacaatgtcaaaactctcaacgttggagtgtacagttaacttgcctaccctcaaggccggcatgaatgcatgatttagtgtactacaaaataataaaagcagtaatttgatgtaatgattaagaatagtaaataatgatattgttattatagatgtttttttaaatgagaataaaaataagtagcgtattgtattgataatatgttttattactaaaaacttaggttattagtaaataggtgatagtctagggtgggcatccgatctaatctaatttttttttcctcatgcgaatccaattaattagtaattggatttgaaaaatcatcatccgatctaatttaattagacctcaaaatccaatccaatccaattactaattagatcattggatcggttttttaattggat

SEQ ID NO: 163438 - DNA, 1202 bp, Cannabis sativa
atatatatatatataaatataggatgctatatgcaattaataaatcgattaattagttttacagctattagatctttaagtatataaatataaatatatatatatttctttaataagttttccctgatgattatatatatactacaacttagattagtactttacttaatttgctaactgctgggattttttttctttgtttttcgtagatgaaattctcctcaagtcattaatttaatgggaatattatatgtatatatgcatgtctgaaatatatcgtaatatgtatatgtacatatacctagatagttcccagcaatatatatatttgatcttgatcttacaataagaagaggtgatatatttatatatatataccaatatataaaacactactttacttggctctataaacaattacaactttgatcaagactaattaaaatcccaaattaaaagtcaacgttatcgatccatgtattctgctaaaaaaacatatattaggtaatataaagaaataactgaatataaattgtagttatatatatatgtgtgtgtgcagatatgtgtagttagttttctcaattgtgctacgtactgtaacatgaataaataattaaacaatcgataaaatagttatttataggaaattctaaatattggtaaataacatgattttgtgtactatttgtatcatagtggatgagctaacgttgatagcttaaggattaagtctccaacatatactctaaccaacctttatatgcacattattaattaataaaacctctacacacaatgatttaggtcaaaatcctcatttcaaattagttgactactggttgatcaatatgtcgacaaaaaataaacattattagcgcatgcatagtattttatcaatggacaaaatactgcattacaatgtaattgatcaaataatatttgctatattttgttatataattatatttaaattataatataaagacaaatataacgtattgtaattttaaagaatcttgttataggtagaaacatatttgcttatcttttgtattttcatgcattaatttgatgaataattttttatgatatgaatccaagtagttatatctaggggtaatcactttcgaaaactcaattgattagatgataaatatattaacacttcttagacatacagtttatatatatatatatat

SEQ ID NO: 163439 - DNA, 2206 bp, Cannabis sativa
tagataaaccagaagctattaaaaatgccttcctggaatattatacacaattatttggctcaatatagctagtagaagagttgttatttctggtattgttggagagggaccaattataacagatagccaagattcttttcttatacaatcgtacacacaggaagttaaagctgcactgttctcaattcttgactctaaggcgtcggggccagatggttttattagcggctttttccaaaaaaaaaaaaccttggaacgtaagaggggaagatttcacaattgtggttctttctatgcttaatactagaaagttgcttaagggggtaaatactacaaccttaactcttattcctaaggatatttactacaagaaatgacacttttgccagcatatttttgtgtggcaagagtttggtattgcacttgtaaaatagaatttacttctgatgtgttggcaaaagggattggcaaatcaatgttggtattaaaacttttgccagcacaaactgaaaagcgctgataataatgactttttccagagcgtaaatgctctagtaaaagttagaatttagccactgcaaatgtgcgctagtcaaactttgacctttttaccaacgcagtttgcgaaatgcgctggtaaaagtttaccagcacagtagcgaactgtgctggtaaaagaaatatttcttatagtgattataatacccaagtacctaaatagtgttagtaattttagacccattttgtgttgcaatgtggtctaaaaaaacaataactaagttcatttgtgctcggttaagattgattcttcctaccttgattgcatctaatcaagggagttttgtgcatgatagcgtatattgctcaaaatattttaatttttgaagatttggtcaagcattatggtcggcataataatactccttcttgtatggtcaaaatatattttttaaaaaacttatgacactatgaaatggagattcattggggagatgttagaggctttaaatattcctcttccttttttgtggatttggtcatggacaatgtacctaggccaaagttttccttattaattaatggtactcttcatggctatttctcttttaaaaaaggtcttaagtgagggaccccatgtcacatttgctatttgtacttggcatggtgtacttctctaggttgatggctacaatctctttaagaaagaagttcaagcatcgttctcactatggacaaatcaaattgaatcacttatgctttgcggatgaccttcttcttttctcaagaggcgatatccaattataattattatgctctaagtctaaaccttcaagagcatcttggaaacttcaggtttccatgctaatattagtaaatctgttgtcaattgctctggaatggctaaagatgatgttcagtacatttttgatagctcagtgtatggtaaaagctctcttccttttagatatttcggtatttccattagttctaaaagaatttctaaagttgaatgtgattgtattattgagaaaatagtggctagaatttgaacatggagttctagaatgtttcttatacatgtcgttgcattttatttactcagttttgttagtataaacacttattggacaaattttatgatcgtgctgaagtatattctaggataaatcaatagcatctgtaggaatagtttttgttgaaaagtaacgttgaagctagtgaactgaggttagtttcttggtgtaatgtttgtaagtcaaaaggctatggttgtttagagtaggaatatttagcaatggaactttgcagctatggggagatatgtgtgggatattattgttcaaaagaaagataatttattggttaaaatgatcaattcgatgtatataaaagatcaagtttggtgttactgcagaagataagtgcctgatatgcgataatgcagtagaaaatcatcaacacctcttcgctcagtgtcattataacagaaccatcattaaagagttacttggctagcttaatattagttggaatcaatataaggttgttggaatactaaagtagattttgaggagcaagcactcttgagctaggaggctttcaagggtctaaaaagaggttttatggaaccacattgtatgttgtcatgttaaaattagtctaagtttcgggttatattttcggttagttttcactctttgtttct

SEQ ID NO: 163440 - DNA, 1685 bp, Cannabis sativa
  modified_base (1119)..(1123): a, c, t, g, unknown or other
tagccaataaaatctacccaatatcatatattagccttctacagtatagtatgagtttagatcacatcatgaaaagaaagaaattctaagtagcagagcagcctctggcttactaagatctaaaagataaaaatacaacacaaattcaatactgtttggaatcatccaagaattattacaatactgtttggcataacagtatcatcaaccctttaattaagagacccaggtgaatattcaacaaatatatgacactaaaagtaggaaaggcaacaatacaacaagaacaacacataaatattcattataaattaagttccatgtctgtcaccctagaattattataatacccaaaaattgaaattttttatttttttgaaaagggaaaagaaattgataaaggtgggtacctgagatggaggaagaggtgggttccaagccccattattccattccctgtgaaccctcagattgtagactggacacacaattttccgagctgaatcgtgaaaagtaacaatatacctcgctttctcttcaaagatactctcaaccacaccacgagaccacctattccgaaagaaaaaatcgacatcatcgccgaccttgaaaacaacctgctcgaacgaaaacaatggcggcaccggcctaacgttgaccgaactgaccacttccctagagggaggtgtggggtgaatttcctgggcgttgggtgtatgggttccgtactcaacgtagaggatgacattatcaatgttgatgttgaccggagaacggataacggtggccggaaagtagggaccgttggatgcatggcagggtttgtaaacctctataagatcgcccaatttgatcgaaaaggagggggccattgaagacccaaatgggaagaattttgaagttttaggaattaggaattagggatttgaaatgaaattaataaagagcgggattgtgtgtgagttgtgagtgtggagtagtacgagtagtagtagtgttagtagtgtagtaattagaaggagaagaaggaagcttctattgtattcgttgaaatcaaaatattctctatttgcttttttttatttttttaaatggtttctttattattattattattannnnnattattattattagtagtagtagagtaatttattgtataaatatttaagtttaacttttgatggtaaataaataagtttaattttttcggcaataatacttaacttatatttttggaatatagattagagggacaaggattctaccattagcatttttcttttgccccctcaccaaaaaaaattaccgtcccctcactttaaatcctaggcgcgtcattgtctgtaggtatttgattgttaagtactaagtaagttgtcatatgacaatctctaattggtccagttcatgaatttttttattaaaaaaaaattaaattaaatatatcaataaaaaaattacacgtggataatgacttgacatttaacggtcaggtacttacagaaaaaatttcaaaaatataacttaatattattactgtcaaaaattaaatttaagtatttatttacaaccaaccagaattatttatgccgcaaattactctcactattataatttttattcttttagtaaattcattaaataaaccagtcacaattagggctgtacaaaaaaatttgtaa

SEQ ID NO: 163441 - DNA, 994 bp, Cannabis sativa
ttttttttttttgtcaaatataacttaatttttagggatggtcttaaaactttaaataaagtagagagcaattatacatgtatattaactttataataataataaactttattttctaaaaaatactttatttaaataataatcaaatataatatataaattgaaataaactataacttaagctccatctttataaatacgaaatatttgttatatagttttgtaattataacttctagtgtataattaattttcattttttttacaaaggataaattatatatatatcttaattttttatataatagttttcattgtaattatttaacataatttacatgtctccgaaaaattaaaatacatatataattaagatatatatgcacaagtgctaccaaatatttaaattttgattttgatatattcaaagcaatttaaaattctataaaatcttctagataattataatatgagctgaatataatttttgttggattaaaagtttgttaggtaccaaattagtaaaagatgcattaatataatttttttagaagttgcatggaaatttttttaatttggtggtcataaatataattcaatagttttacacttttcttcaccaattaaaaaaagattctaagttcaaattcctcgtttcaaagtcaacaaaaaaaaattgtttattacttttttttcccaagtctttacatttatttctaaaataattttcatactaattaaatttaaagggtagatacatttgaataatactattaataaataataataataattttttaatagtgaaataatagtaatctaacaacattgaaataataatatttcatagcacttatttttcttgaggttttttcctattgactcaacagaatttgatgagtttttttttttaaaagggaattttgattttatatacttaaaaaattaaaaaaatttattattaaaccaaaaacctaaaccctaaaaaaactat

SEQ ID NO: 163442 - DNA, 1278 bp, Cannabis sativa
  modified_base (1236)..(1252): a, c, t, g, unknown or other
cgtgtgcaaaatatcgcaacaatactttaacttatgacattcataaacagttatatctttaaattctgcatgtaagatgcatcttgaaattgatttggccaaatcatctctacggaatcaagtctccttaatcctactctctccaaaacaggaaataataccacctgcaaaatataaaggaaaaagataaaaataaatgatttttcaaattcaaccaactatatgtttgaaaattaaaatctcatttatgaattactttaactaggaatctaaaaagcaaagagagaaaaaaacaacacttttaaactttatttccttccaaaaaagaaattgaagtttgtttttaaaatatagcatgtaaaatgagaatgttctagtaatgaacaacattacatagaaataaaacaatcaacaaataatgcagtattaaatagaaaatagccaagtatcctttatttatttatttaacacaccactacatacagtataaaagattatatacaataacaaatatattttgaaatcacatgaaaacttaaaatcctaatttagttactaacatagaatatataaaatcaaccatctaaaatataattttattatagtgtgatcatttatttttttctaaaattatcagaaaatataagctgagaaaataaagatgtagtttaggttagcatagtttgaaaatgagaaaagagaaaataaacacagaccaaaatagagaaaatgctcatcagctcaacaattggaggttggctctgattgtatttatattcacaagtagggttacaaagaatattctagactattatagctcacacaatcattaccaaataattgtacaataattacaaggaaatattctaacagtaatgtcagagtttgttactgtgggaccacacacagtatcgtgagtgatcaggtgtaggcagagcatatatggtagtgaaaataagcacctgtgtatttcattttctaacagtccctctcaagctggaagggctctcaagcactccaagctttgtcaacaaggaaatgaaaacgatggtgtgtgagacttttagttaaacaatctgctgtatgggcatgggaaggtatgtatttgacgtcaaggcttttgttgaggactttatctcggacaaagtgtacatctagctcgatatgttttgtgcgtgatacactggattggttgcaagagcactgacactcatattattgttggaaatattttannnnnnnnnnnnnnnnntaccatgtatgtttcattaacatcct

SEQ ID NO: 163443 - DNA, 1656 bp, Cannabis sativa
gaatctccctcttggatctcatcaaccttttttcgtaattctgaaccgagattactttaaaaaaaaatatgcaaaagcttagccaagtaatataaattataatgtgtattatattaattcatgcacatataataataataataataataataataataatagttatttttgtattgacccagtatagagttgtgtgtcaatatataattatttaattagttacatgggaatagggttaataatcaaatctgaaatatgtccctttgataaattattctgagaagcatgtccatcaccataaaggtatataaatttggctgttctaccaagatttttgcaaacatgaacaacttctttcgagaaataattattgaagtccatttctttattcatctctttccatgtttccattatcaaaaatttgatgtgctcgcgagcttcatcttcagaaacacctgtatcattcatgtaacattgaattgatttcggaacatctcctcttttcatctcatcctgttcaatttgttattaaggcaacatattattattagaaatattattatttaatcgtatgtatgttttattatacatatttggtgtttttactttggttttacatgacccctataaaaaccgacattaaaagtctatgttatcgtccttaggttttatgtccttataaaaccatattttcttatttatccataggatatttaatttgcgtttgctatgtatatattaaattaataataataaaattaagcttaccgacgatgttcctaggtcatcttcaagtcgtaaaagtatggatccaagatgaaatatggtagggtaaccatcatttgatatttccagggatccttcatgaatatttatggaaggatcatcataaccttcttccaagaattttatggaagctttttctaagggatttgtgaaagcaaaataagcatgcaaaagaataattggtcccccaactgaaatccatgtattcttcatatattcttctaatgttggtttgtatccactatagaaccattttgcctcttctaattgatatttagaccaaaccacccactgcgtatatatatatatatacatattaattatctaattattacttcaccaaaccaacatatataaaattaatgatcactgatccaaaattgaagagattatcattcattataattaattacttaatcttatatatagggagcatatatataattaggtaggattaagcctaacttggattctttaataagaataattttaatttttttgtatacctagaaaaattatatactttaatattcttatataacagttgaaattatagttctatagtattaattaattttgaataatttacagtgtgatcattataacattcaaaataattgattgtacatatataaaatgaaacaagtacatgttctatatactcactataaaggactaagctagaattgaaatttaaaatatatatttagcaacattaattcccatatttgcgtcaaaggtgactcagaaaaagcataatataatatacatgcaccatcatatatataaatataaatataatatatataggtgactattcaatggttacattttttttaacctgtaatagcaggttactaataggtagac

SEQ ID NO: 163444 - DNA, 1893 bp, Cannabis sativa
ctctctctctctctctctccaggaagaataggaggatttccaagggtaagaaggggcgaagaagagaaggggcgtatttcgattatttttaataatttgatatgtggacttataaattaagacaatttatttaaactaattttttaaattagactaaataaatgatctatttaaatgatcacaataaattttttattttctatggttttgcaatgcataatactcaatagtaaacctaattagatttatagagctctaattagtttgtcatataaaaaacattaggattcggttcccaagattaatctcaatcacttttctcttccattcccatcaattgagtaaaaattcataaaaagaagattagttagtggaagaccatctactcatagtctattctcatatataacatcatcattatcatggagttaagtatatttttcattttattgattcagcatatagagtaactttgataatttgacatgaatttaaacttcatgtgtacttttagatctaattcttagaagggtatcatgagcattgattaggattattagggttgatcatattgattgtaattattaatttttatttttatacacattattttttttttttttaaaaaagcaatattatttcatggttttgatttatattttgtatcttttcattcatcatagttatatatgactgttgtatggtatgattaagattaagaaataagacatatatatacatttgtgaaatatgtttcaattttcttaatcgttcattttcggtatgagaagatatgtttatgtgcttcaagtcttatggttgatttctttatagaatcctattattaacattgtgttgaaagagcttgtttgaattggtttttatgttcttttatttttggaacgtgtgaaataaccgaaggcaaaaatggtttggattaatgtgttttcggattatatcatatgcatatgagatatgtaaagcaattataacaaagccaaaacatgattttttaaataaaattatactaaaattgattttatttaggacagtaactatcctctctatctcttctactctctatcctctctaacctctttatccttcttaccaaacataaccttaataatgatcttatgttatttatgcatgttgatattcagctatagttgttgtttttgtttagcaaatgtatgtattaagcagactcatttaagaatttaatattgggaatcatgaattgacttaatataatattttgataaacaatgagtttttgttaatttttcttgtgacatttaacacaaaaaataaaagttatttgagaaatttttattatttaatgtttgatttattagtctatctatactatattttgatcagtgtacaaaaaaggtgtacataagttggtttagttgggctgtagcataatttcgccaactcaatataaatataaggttgtaaattttatttttagctcacctaattaaaaataaaaaatatgttttaacacattcaataattttgtcagtttgaccgagttaacttgtccaaaccaattttcacttttttttttttataattattattgtaagatcttttcggtaatttaattcaaaaatatattctaatttaatgtttagttgtaaatattcattgtaaatattttatgccttgatttgtttttatatggttgatcttaattgtattaattctcagaaaataggaaacattcttttttatggaataaaagatgtaaagtccttttttagcaagttagatgcgaaaatattttttcttttatggtaagatatttctacatttatacccgattgtcttaccttgtatattcggtttttattgctcttttctatgttaggaaagatgcatttt

SEQ ID NO: 163445 - DNA, 1786 bp, Cannabis sativa
ttttttttttttttttaaattgttggtacaattgattcttacatatgcaatgagttgttttgggtttccaaaatactagtgcaaccaactagaggcgatgatgataaattgttggtggggatcaaaccaaaatggttctaaaatacattagaagaactgaaaacttttatgaaaatcaaaatttaaagagggcatgggcttccgttcttttatgcattttcaccaagctttattaaccaaacaagcttggagaatctttgaagcccgtgattcattactaagctgattattaaagaatatgtacttctctaataatacttttttagaagcatgtgttggccactctccttcacttacatggcagtgcatttgttggggacgagaacttctactcaaaggtctctaattcaaagttgggaacaactaccgaattaacattggtaaagatccatggatcccgggccatagtgaatttcaacctctataagacctccatcacttacagtgaggcaccttattactgataataaggaatagaatatcacacttttaaataattattttaaaccaattgatgtggattgtatctttcctatccctttgagtttcttcccaacccttgaccaacttatatggaatgtcaccactattggcatctacacagtgaagttggtgttccattcagccactaccttagaagaattatatcaagaagtgacctcaaatttgtatagcaattggtggaaatttttctagaatctaaaattaccttctaaaaaaaatatttgtgtggaaagccatccaaggagcccttctagtggctacaaacttacataagaagaaaattcttgattcgactgcttgctccaaatgtgcccatgcttgggtatcgattgggcacgctttgttcagatgtggatatgccaagttagtgtagaaacattttcattttcatcatgattttgggaaagctcgacaaatggtaaacaatgattatttattttatctctccactgttcacactcaaaaagagatggaacaaataatttgcatcatttgggtaatttggactgagcgaaacaaagtactccatggaaattcaggtcgaggatgggtcatatttggctattttgtgatcaactatttggataataatcacaaagccaaaaatctctctcaacctcaagctacacaaatctcaaattcaatctccagttcttgggcgaaagatggtctcccgtggaaaccacttgatctccatggctttaagcttaatgttgatgctgtcgttaacatggtcacgaaagtttttgggagttggtgcaattgttcataatcacgaaggtcgggtgattgctgttttttctaaaccagtccaatgatgttttagattagacgaaatagaagctaagaccctctttcatggcctcaactagactacccaactaaatttaccaatcacttaagttaaaactgatggacaaagagtctcatcaaccttgaacactacatctcacgaattatcttgtttcttagatttgattatagatgttcattgttatcctcttctctagtattattatatgtcatgagaaatgctaaccaaactgcttatgagttggctaaacatatgctagagttagatagagatacttcttgaataggagaaattcttcttattttctcggttgttgtaagcgatttgtgatttataatagttgttgatttttttttttaaaaaagaataaatagtttttctctttcaattttaagagttaacaattat

SEQ ID NO: 163446 - DNA, 1488 bp, Cannabis sativa
aaaatggtcactctcctgtcgtggtcctatctatcatttctcgtcagtccttttatttcaactaaagcaccttttatttcaattaaagcacatggtaattaacatacttatagatatatatatagatgtatatataattttattttcttcttattattttttctctctttatcaattaattttattattttaaaaatctgtctagatcacaccactaattattttaatttaaaaattatatcattgtcacttattttcatcatatttttaatatgtagaagacatagattttttactatctcaaaaaaaaaaaaaaaacttaaataaaaaacaatattatagtttcttttatattttattaaaagataagtaactaaattttaaattaaacaaaagtttatatatgactaatgtttggttagttattccgattagttaatttttaaaattattattttattctaagttatattatattatttcacagtttaagatacatttatattactatcttttaagcaatttttgttaagaatataatgtgttatagtagatataaaaaattacgaaatagtttattaataaaattagtataattatttttaatgtaagataccatattgtttcttaagttctctttttttttaaaaaaaaagaaaaatatatatcaaaatggctctataaaaataacttatttagaatactatgtgataacatttaaaaatgaaattaaaaaaaaaaaacattttagtaacttatcaaattgattaatatatctaattctatttaaatttaaaatttaatcaacccaatagaaaaataaactaaaatattacatatgaattcgtcactttctttgatagtcatgtaaaaatacacatttcttgtatatagaaataactaaaatggtgatggtactattttttaattcaaataatttactgtacagttacaattagtttttaaaaaatatagacagagatataataaaacaaaattaagtatacttttaaggaaaaaaaaatgtgtgagaagaaaaagaataaagttactgaggaaaaaaagagaaataataataaaaaaaagaaacaaaagaaatgatataagaaagataactataaataatttgtaaaaatcggtacagggtagtgtatattagcttatgagataagcggtgtacagataattaaaaaaaaggggcagtatttccgtaaataaaataacaataatgatccccggtgtaattttctcttttttctttttggaatttatttaataaaagccacaaatcttgtaatttcctctgtacgtagttcctaacaagcctaagcccaagcccaaagtccaacttcagcccactttcaacaagtttcgacccaacaaaatatgtagaaggattaatgctaatatctaagggaaacttacaaaaaatactggaatttaggttaatttttataaaaatactgtcacactgaaattttttcaaaa

SEQ ID NO: 163447 - DNA, 3374 bp, Cannabis sativa
aaaaacccactggtgttgatttgggagttggggttttgagagcttgagcaagcttggtgagattgaggtcctccattctttttttgttctcttccagtctttgtttccgactttcctcgtagcccaatttagattccaccattttcgaaacacagaagaagaagaagattgaagcttgagtagtcaacgaaaatggtgaccggtgtctgtgaggaatggaaaagagtagagtgaagagaagttaaagcgccaaacttgaaaagtttaaaattaaaaagtttaaagtccttcacttttacaataatatcacttcaagtccccaaccaaccaatgaaatggaatgaccataataaatatttgtaaatacaaaaagcttgtaatataatatgagttatatcgtgttgtgcaaatattttaaagggtaagctctccacggtctgtaaattcacattttcatgtcgtgctttacttaagttggcttgtttttcataaatggatcagcccattttattatatgggttgaactcgaattttatattttcgttatttttcttataattaatgagttaattactaaattacatgtatttttatagtttcaattgtttttatttaattttttaacaatactttacacataagcatataaaagattaattcgaataattaaaatttaaatatttaatagtaaatacatatgtattattaatattgttattattagattataagaacttctaacgtgatgtgtttttagattagtctatccacttatatgtcgtgctttcgagtttgttgtgtggtattgtatttaaatatatctttttgtgtcatgtcatgtcaatttacaatatcgtgttgtgttgtgtcatgtccaaacttatatttttttcatacaaattatgtttgtatcttctaaatttgggtcaattttgtatcgtgttaaaaaacacgacacctatttataactgtagacgatatcacatatgttgtgcgtgtgtataagtgtaattaactagataaaaatgtctacacttaataagttggacaccatagtgagaaaagacattaaattaaattgtgtttattaatattctttgattttatttcttttactaatattttatttttaacttggggtccctagaaatattagatagtggatgtgttgagtgttagggatttagaaaatgctgcccactttacgcagaaaagatgggtggatatgatgggttgggtaagaatagaattataataagataaacagaaattctaaaaagacatctcgtgtctaacatcaaagtatcatattgcattattgctattaatataagagcatgacaacttttagagttcttatattataggtgatacttaattgcgctaatagtaataaaatgttaagtaaattacatttttttttggaaagagaagttacataatttaaaataatgatatgtacctatttaaattgcacatacttattaaacacaataacatgtaataaatattaatcatttatatttttaagtgtgataatattattttaattatatgattgtgataaattacacatcattatgtataaaaagtatgtgtcctaatcattttcctttaatttaaggatttaagggaaaaatctcaaaaggtcaggcaaaaacatagtcacataaatctcacaaggaaataacaaaataaaggttaaaccaaaccgactacaaaactatggccaaaagccaacgtcacaaactaacaaaaatggtaatcaccattattacaatgaaaaagaaaactcaaaagaaacaacaccaaaacgtgcacaaagaaaaaactataaataatcaatacaaaacacaccagcaaacgagaaccacctagtacaagggacagaagaacatgaaggtgcaccatcctcaggaaaaaactcgaaacctcctctttctgattgcaatctccaaacaatgcctagaataagcaaacgccaacatggacccaagttgtacgccaaagtccaagattgaggatgaaagacatttctaaaagcaaaccaccaccgaacaccaaacatcaactaatcgatgcatcagtagtcacagccacggagccaccatcaacacctccaaatggctaaggcgtggacccaccgacaattaccaaactcaacctcaagaaatccccacagacaccaaaccccacgacgaggaccagaattctcaacgacgaaaggatcatccaaccaagataccaccaccgtcagggaggaaaactcaaaaattgctgacaacatgaaggagttcctgccaagagcccatcggagctggaaaacccttgcccaccagagaacacacctcccaagacctcaatcaccagcaaatagaactccctgggtgccgacgataacgttctcgcttcaagcctctattgggcccttacacccatgaaatgatggcttttatatacgagtatgtcactctgtctgcttcctggaatgacgactgaccttacaaaccaacacgagtgtttctagtgtgctttgtcctcactcgcacgcttcttgggaaaacttctcaggagatcacctatcctgaaattaccctaggtcaaacacgcttaactatagagttctttcgtgatgagctatctgaaaacatgatgcactttgttgatataaatagtaccaataatccatttaagcctttttcaactgtgttgtcccatacctacacagtcttataatcatcccacttgaccttcctcaagcggtgtggggttacacaacttacccagtatttttccttacgggtcacaagactattaactgtcacaaacagcacccgaagaaaataaagaaaccctaatgagggtctcgatagagaaaaccgaagtcttcttatgagagagaaaaaagtgacgaatattattaataataattatcatcagacaagatagtgttgggtatcactgatacttaacaataatatttaaatgtgatcaaaattcccaaaaaataatgataaaaaatttataaattaatggatgattatcgtattaaagacgacattatcgtattaaagacgacagtacactctcaagtctcaactcaatacacttacatggtctttccaaacataatacttcttataatttatctctagcttttactctaaaatattcccttattagaacttctcaatatttacctttattcatagtttcttttcccattttcagattgttcattttcatctctgcacacttaaaagcaaaataaggtgatatcatatgggaattttacaaaaatactgctttttgaccaaaactttatatttatactgggacacggcaaaaacaacttttgtactgcccaagcccaa

SEQ ID NO: 163448 - DNA, 6717 bp, Cannabis sativa
  modified_base (285)..(292): a, c, t, g, unknown or other
  modified_base (6130)..(6134): a, c, t, g, unknown or other
aaatcctaattagccaaaaagaaattagcaatttttcgtcgaaactttcgataacaatgtttttgttccctaaaatataggacttgtaaaaattttccctgaacttttacattaaaagaaatttagtccttctgtgactgtatttgtaaattagcaactttgctccctaaactttgacaactttcaaatcgtactctctcaaaataaaaacgattaagattcaacatcttttgtagtaaatcttagaaaattaatttagatttaaaaaaaattattttgaatgannnnnnnnattaaaaaaaaataaatttaaaaactaattaagtgattttaaaaaatatttattttttattaaaaaaatcatttcgatattaaagaaaatatattaaaaattcaattttgtaaaaattaaattttacgggaaaaacttgagtctattttatttttcacaaaaaatgtagatgtattgaagtaaacataatattttttcagttcaatttctaactttttttcaaaacaatttatatttttattgaatttttaattattttctttttttttttttttgttaagatatgagtttataaatataaataattgattttttcttctaaaagtcttagtttgtttaaattatttattggatttttaataattttagtttgatttattaagatccgtgtttataaataaaataaaatttgaaatattttttttaggaataatttaggttttttaagtaaaattaataatttttaattaatttaatatttttattaggttgttttaataatttttattacatttttcagatttaatagaatattataattttttatattaaaggaggcaaattttgtatttgtcaaagtccagggagtaaaaatactaatttttaacggtaaaagaaacggaacctaacagaaatggatataattatgtaactgctatattttaaggagaatttttaacaagtcgtatattttagggagcaaaatcaagtaatatcgaaagttcatgaggcaaaaatgctaaatattcaaaaaaaaaaaaagacaatatacatcatgctaaataattttcaatatattttgttgcatgtgtttgtttgttttttttttctttctatataaatatatatatatttgtaaattatatgttgacatagaaatttgaccagtaacttctcacactagtgagatgggatgtgagttagtaacaaagagagagacaaaatttataatagttacacatcctgtgttgtgacggtaatgaagttatgtctactttaaatttttattcctcatgagaattataagaaaattaactaaggaaaaagttcatatttatagagagatgctttgactttgtaaggacttttttaaatgtgaaaaataaactagtggagctcttcttttgtagtaaaggaggtccattataataataatataataatacaaaaaatatgaaaaatatttttaggctagtcttgaccactgatgatgatctaatggtgaaaatgacttcggatgatgattgtcaatttttggagtttgaattccgtcaatcaaatcaatatttagtgagttatggtcgtcttattgaaggatgttcaacaactagcgcccaacttgacattctgacgttaaccttaacactgaatgagtaggaaaacgtgcccaacttgtattttttgatgcctaagtaatattttgacatcatttagtcaatttcttagttctagtgaagtcgttcaccacttcttgaagaggatgcttttttgtgaaatcgagactcaaaacttcccaatttacaagtaatatgttgatattccactttgcccaaaaaggtgaaatatcaaagtgtgaatttgaattgccacaagtcgtagctctcatttactatggaaaaaaatagttagatgctcgagatagaattggaatcggttaacgcactaggctatacgtcaacctgggcactaggtgcttattgatgagcttctcaagactttttttgttacttgtatggccttcaagattgtgaacgaagtttcctaccctgtttttgaccaatataagaagaatgtctgaagtagaatttgcgtttgaggagcggaaacatgcaaaccaggttgaacgttaacatgggtgttgggtacctatttcggtccttaaatggtctcttttgcttctgaagaacacttatatcttattatttttaaaaacaaaaaaaaaattcctgagaaacttcctgggaaaaatacttagaattggtctaggttgacaaaatgtcaacttgagcgctgggacctggcaccaggtcaacatgggtgttgggtccccctcatgatcacagatggctctgtttgactccaagaagcagttgtatcttaattgttgatgaaaacaaagaatatgtccgaaagacttcctagagaaaatgtttggaactggcccaggttgacaacatgtcaacctgggtgctcggtccctattttagctcccagatggctctctttgtttcccgcaagcaatcgtatcttaattgttgatgaaaatggagaatattcccagaagacttcctagagaaatatttggaattagcccaggttgacaacaagtcaacctgtgcgctgagacctaacaataggtcaacttaggtgttaggtccataatctagctcccaaatggctccatttatttcccaaaagcactcgtatcttaattgttggtggaattggagaatattcccaaaagacttcattataatcgtcattagaaatttcccaggttcacaatatgtcagcatgggcattgggtcactaatttggccttcaagttgatttgttttcgtcccgaaagcacttgtttccccattttggatgaagggaagaaaatacctagaaaaaatcttcaaaaaaatggttggaagtgctacaggttgacatattgtcaatctgggcgctgggtgcatcactaggtgcctcaaacgggaagtgtttcaattctgattctggtgcctctatcatgtttgtgacatgtcttattcatgtctaagtataaagtttgatccatttttactaagacagacccataaattgaaaccctagcccaagatgtccacttgggcacgtactaggtgaaatcctaagcgcccgggttgacttctaaaagtttgattcaacttttttcagttcttaggcttcctacttgggttatgcttgactttttggttcatagtactaaaggatggtgagttgaaaacaacttggcaggattcaaacacccattctagagctctcgaagtcaacttgggtgcagggctagggacctttcctagagttgactgctataactcgaggcacttaactctgtaaatgttttccttcttgctacatatcaaacattgatgtccatgtcaccatggttagcttttaggtaaacattttctttccaagtcaactttacacttgtgtgaggttgacttgatgacgtgaatgaactaagcccatttcatgcaaaactaccaggtgagcatcaattttgacttctaataattgttttttttttttgtttgtcttcaatgattcctagttggaataggaattttgaaattcactatttccatttggactgggaattttgaaaatttaaaagaagaaaaaaagaaaaggaaaggaaaagcaaagcaaagaaaagataataaatcttttactctcttatttttctttttaaattttaaattttaaatttaaagagagtccttattggctttggagtataggagactagctattataaatagaggactcctctcactctatcctcacttattccacacgattatagagagattgagagtctgagtcctttattttcaactgctttcaagtgttcttcaacttttcaggtgggaaaattttttaatgtttttattttttatttttttctttccatccactagagcttaattcaaggattctagatcgaatggaaatccttgaactccattgtaataccttcaaaaatcaaacatataatttttaagtgagtcattgagctaagatctatctttcctacaagatacaatctagctagtcttatcctaacaaatcttcaagtgagctgaagggagaaattttgagctgaattgaggttaactgagttgatattcaaatgatccaagttatgcagactcaagttgaaaccaaaaaggccttgtatgaagagaactagaagaaagcctgatgggtatgacccttatatagtctaatatatcgacacaaaacttacaatgcctaagtccatttgagcatcaagttaagttcatcagggatgaatactccttacctgaaactatggtgagaaaactgagaattgagtgtcccagtgcaacctagaatccttgttgtagtgcttagtcaggattccacataaatgcaagtgcattcttgcctattcacatgtggtttgtatcaattgtttactactttgaagttttcccttatcaattgaaccccaacagttattggattctatagatgttcttcatcttttatcgtctacggggctggtctatccccactcctcactgactcaatttcttatgcgatctaaaaaggagtgctacttggaagatgaaggattttatcaccttcactagtacaatgtgtagatagacaatgttactaaaagcaactgcagcctttatcattaagaatatgtctatactcccctccaaaccttaaggcacattactatccaaaaggttgaccctttcaaaagaccagctctgctaattgacattaaatggagagtagatgccatgttgaatgagatcaagatatgggagagatatggaaagatgttgttcattgatgataacatacaccatgttgggctctaataacagcttgttagtgagtttatgtcgatgctcgctttgctaatgattcttggacaattcccctagatgatgaagaaagagggcaaagtggcaatgtaatggatctaaagtgatgtcagaagataaaggctcttctcacaatgacttagaatatttcgaaagaatatccgtatctcttaaccaaagtagtggtggtgccgactctgaggatgaggctgatattgaacttctagatcacactaaggcttgtgtgcttgaagaagtttgtgaattagttgctgattcaccacttattgaagtaattgtttactagatttcttaattactttgtcttgttttccatatttttcttatgtaccaaccccttgttttttgttctgctgacaaaatgattttccttgctgtgatggttacttgttctagaaggaagaaacctgcaaccaaggttgatgaaccacttgttcaagaagttgtgcaagttatcccgcttcttcttctattcccttgaagaagtcaaaagagaagcaaagccactgcaactgaaacttcctcaccagtcatggatttacggatagggaaagagaaggttgttgaaattgaagatgagcctcctacttctcacattgttgcttcttcaaaagagatagacattgatgagttgagtacccaaacttctcgtgaatcaaaactcatggaaaacttgtgtgcgcagggccccacgctagcatggtgcttggggaagccctgatttcttccaaggaggaaagcaaatctttggggaagttggtgttgttatttttatggtccatattagagttataaaaggagaagcgaagtttgataaaaatagtttttatctaatatgaatcggattcgggatcaggtctgggtcttgggtcagagtttgggtctcgggtccggtttcgagtcccgggtttgggtcttgagtccaagcccgggtcctgggtagtctgggcccaggtctagatctgggtacaagtttgggtctcaggtcaaggtccaggtcctaggtccgagtccggatcccgagtttgggttcgggttggagattagtgttgaccccaactcctttgtaaatattataatacaagctaatacggactattttttacgtattaaataatacaacatacattgtattaaaaattttggtcgtaataattaatacaatacattggtttatccaaacatagtgttatttatnnnnnaatacaatacgacccttatacaacgtaccaaacaagccctaaggtaactaatgtttggtctgtttggaaatgttggattctactattgtatgacatgttcccagccactcatgttatcaagctcccaaaacagaatttgtaagaatcatcttctctaaaaaatgttaatgagtgattcaaagaactcaataaacacaaataagttcatgtatactcaggattgaagttgatcaactaattatcatcattgtgatatgaataactcttttcatggtaaacaacaagctaatgaaatatgtttattactgtttaccgagtttttttttgaaactaaatcattttagagcttaagaaagtaatgaaggtatgaataataaaataacaaacaagagatttttacgcggttcaggcgttaactatccttagtccacgagtccattttattaggctcatcggtcggtggttgtttatacaaatacaaaaaggatggacgtttactccaatccaccatattcctcttaaagaagaggaagcttagtaggaatatgctgctgttaggttataattaacctatatttcgggt

SEQ ID NO: 163449 - DNA, 2699 bp, Cannabis sativa
gctttctcgtcttttctttgtcgacgatctaatccttgtgggtacggccaccatgggggaagccaagggcgtttggcatctggagaaattttatgattggtctgatcagagaataaataagctaaaaatatctattttcttcagtaataatactccgaacaatgtgaaaaaggagattagagaagctttgggaattagtgggccagaaggtaacattaaatatttggggctccctcttttccggtctaagtagaaagatgctaattttaattttgttcaggataacctaagttacaagcttcaagggtggaaagaaaaactactctcgaaagttgggcaagcgacccttattaagtctgtgggtctatccatgcctatgtatgcaatgaaaaccaccaagctctctaacagtctggcaaatagaattgatggttgggtccgtgatttcttgtggggttttgagaaggggaaccacgggattcatttaaatattttgggataagctctgccttcccaaatcaagaggggtccatagttttagggaaatgaaagagatgaatctaaccttcctagctaagtaaggattgaacttacttaatggtagttaatctttttgttggaaaatttttgaaaccaagaatctgaaagggaagaaggttcttgattgcagatataaagactcaaactcttggttctggacgaatgtggggataacaaatgacattttacgtaaaggagcctgtaaagtggtctctaatggcagtgacacgagaatttaggagattcgtgggtgcctcatagaaattctttctttcccaaatctaatgggcgtcctgcgtgtggtttatataaggttgttgacatgttgactgataatggaaagtggaacatttagaagtggactagcatatttgataaataaataattactgctgtttttaaagggggtgatccatctggtcaaggaactgataagtgggtttgggccaaagagcgtaatggcatgtttcgtgaaaatcaacctatcttattcaagccttacagagagctcctcactgtgaggtggccccttcactttggaaaaagttttggagtagtaaaatcatggagagacacaaagtcctttggtggagcattcttcagatgcatttcctcttatggtccttcttaagaagagatttcgtgtggatgatgtgaaatgccctatgtatggaatggatgaatctatggagcatatgttcctttcgtgaaacttaacattccacctttggagattctccccgtggcatatctatcctgtttctagatcaggaatccatgtttggaattgggttaagttaatttggggtctcaacacaaagagcaaaaatgtggatgaagtttttatctatgcttcacttgtggtaaatattatttggtgggtcaagaatgagaaggtccacaataattgctttcataatgtgaaaaattatattgacactatacattattcctttgtagatttgaaagtcgatattttacccgctgcgatcctggtccagagggacggctagagccctcctccctaggattggctcaaacaaaattgtgatgtcataattggtttggacagttcgtgtattgcggtggttgctagagaccattttggtcaggtggtctgggtttctacgactaggttagactttgcagatgctttctgtggcgaggtggatgcgtcttgcttagccttggataccgcaaagctcaatggtcacaagttcatcatcgtgacgagtgactctagggtggtgatcaattctctcaaccacgtgcgtgttatgagattgagaattattcttcttcttgcttggatctctgtatatgttttatttgttgtatttttacttgtattcccataactagtaattttgcagcctataatgtggctaagtgagcttttacccacaatcaggttggctatttgcctgttttttatttgccaacatacttattttgtaatgatcaggaagtataatttctatgttattgaacgtttcctttcaaaatatatatatatggacctaacaataatatgcttgtattagttttttattttttttcaaacaagcctgtattaaatggccatattagtaacttatactcaaggtggcatgaacaacatggccatggcttcaaggaacaagaagggcttctaagatcaataagtacaataaaagggaaacttacaaaaatattagactttaaacaatgtttacaattatactatcacacaacaaaaatttcttttactttgtcctgggcttttttttttcttttatactgtagacaccgtatatcaagaacaatgcctccatcttctatacccacgcacaaactatcaaagcaacacgaacacacccagaaaataaccattaacttcggcaagattgaacaaaacagtgaagtcaacgtcaaataaatcatcatggtaaaataactataaaacaaaaaaaaaaattaaaaacaaactaactattttctgcacagccttaacaccatatgcaatagcgactatatttacatgctcaatcctgaaaaatcagaataaaaaaatactaatacaaacctaaacaaacacaaaagaaatgtaaaaaaaaaattgtaaagtccttttttggcaagttaggtgacaaaataatttttcctttttatggtaagat

SEQ ID NO: 163450 - DNA, 2220 bp, Cannabis sativa
gggcataaaacccaacaccttcatcttgggccaaacgttcaggggataacagttgaattccccctgggcaacagacctaatatgatattctttctcgttcctgatcccgcatgaccttaaaacatccccgacataaggaccgacggacctaaccttggactctatcaattcagcctcaaaggtgatagtagggttctgtggggtcttggatttgcgaactttttgagccattatttcaaattctaagtcacttggtgaaaaaataatagtgactagaggtaaaaacattgacctcactgaggggatatcaactaaactaggcgactcaagccaagcaacttctcacaaacaacgatacttcccctcgacgacttcttacgaaaatcatctataatgattacaagcttcttcctgatcagacctaatgagatggtccctaatttttgcatcatttatttccagtatagtttgaggtatttggatttggggtttaaaagctatggctagaaattgaggatactctgattctaagggatctggattataaattatggattaaattgggacatgattacagagaataatgccccaattcttagaaaaacaaaacctaaaacagatgggttcctgggcatgcaaagatagtaacgaaggcatgcaaagaagaaattggttgagagatttttgaaactggaaaggttcttgggcagaaaatagcaaaaataagggatggtttaaaatttatacctaaatgatagtaactattcaattaaaagaaagttgatcaaacagatggtaactgtacgagaaaagacagttggagcattaaatggataaataatttacctcgaagttttgaaccgctaaaataaaaatatacaaattttaaatgaaaataatacaatagtacccttgaagatatttaaaaagtcttttttaattaaaaagtactttttaggggtaattgttataccataatttcggctaataacagaagctaacacgtgtaccagagaaggaatatgaatcagcttaagaattgtattactaaaaatgcacattaaataactcgcctcggaaattacggttgatagaaatattcaaactcgctaccacataggtagaagcgagatatgaataataactattaacgagtaagattgacaagacaacaagtccatcttggggtgaacaaaatacatagttaaagttattcaaaatgaacaaacaaagagcttgcaactcattgacccacattctcatgaataagagcttgcaactcattgatccacatactcgtgagtatatacaaagaataacaactttcgtccatctcgctctttatacgtggaagtaactgcctcgctaatacattccaaaatggaaaaagtgatctaagagaagcattatatatctgtacttagcattttctacaaaagacggtaaaggaggataatgcatacttggcgaggatcatccagtatagtcagcataaccgtttatggataaaaaaaaaagagtagttgaacgtttatttaacattatcccatgcgcacaataataaaacgtggagaatgtccacgtttcatgggcggttatgaatgaatagatcctaagagaataactgtcaccctacacatctaaaaataagaacagaactcaaggtaaaagggacgaaaaaatccaaggagaaaaaagcaagatataattgtcactcatattattatattctctattccaaataaattttcataataagatggactcatggactatgaagaattaactttaaaaccacgttaaaaatattatgttgcttatttattactataattaattttgtagttgatttattactaaaagattaatattttaagttaacgaaaatctacgttaacaatatcatgctaagaaaattatatatactactatttaaaatatgtatacatgttttgtcaaaaaaaaatgtatacatgtaacaatatttttacataatcattatatataataaaatagaatcaaaatatcatcttaaatatataatatactatacacaacaaaaattatataccacacaacaaaacatgatacctacaaaaaataaaataaaataatataatattattaaaaagttgtacataccatattaacaagattatatacaaccataaaaaattatatcatacttacaaaattatatatcacatttatatataataa

SEQ ID NO: 163451 - DNA, 1498 bp, Cannabis sativa
gattttgatttcgatttcgattttgtgttggagtactatgttggaccattgttcttaccatgggactgcaccctattggatttattgacattaatacaaattttctacctcccaacctgtatagtttctgcactaacaacacagcttaattttaattatattaattaattataaaatatcagtatttttcttttaaatgaacaatatatatggtaaaaaaaaattaaaaatggtaaaatgtattaattattattgataataaagatagattttgatatttaaaattttgacacatcttgaagatacctaatccaattttttttagaaaagatattgatactttattaatgctattttctactttgagctaatatagtttaatgcatggacatgtgttataaaaagagaaaaatggtactagaaacaagtttcatttgcaccaaaaatgatttacacatagctcattttattatttgtatatataaaaatatttttaatttatactttcttttcttcattctcaaaatataaaaagaaaattataagtaccaaattaaatatattttaaatgatattattcacacaaaaaataaaaataataaaaaaaaataattaaaattaacacaaaagaataaaaaggaaaatggttatgagtgaattttaaaatttaatagattttttgaaaaaataaaataaaaaaaattaaaatgacactttaaatttgcttacagtttaatactgttaaaatttaaatttaaagaattaaattcaagtaaaacaataattaaaaaattttaatctccaaaaatttaaaataaaataaaatgaaaatattgagatggcatctataatttataaatatggtaaaaaaaaagtaaattgtatatctattaagtcaacatttttgtccttatcttacataatgatgtattgaaaatgaaatgacaaagcaaacaaggacacatcaccccctctcttctcttcatgaaaattatcaattcccccttctttaggtaattattaaagacaaaaaaaaaaaaaaatcataccatcccctaataaataaataccaaatttagatttgaaaatttaccctttttttaaaaaaaaaaataataagaataaataataatgaaaatgaaatatcaaataataataatggtacatacatacatacataccttgaggtggtgtgatagtgaaatagtaaggtttgtagtgaaatcttggagagtgattttgtggttaaggccagttagaaagtagttgaatgagtaatcgttggagccacttcccaccacaaataggtaatccttcaaatttttcttgcctttgcacccgatctcgccctcgagatcgggcaaagttactttctcgaagtttcggatttgtttccttaggcttattacgttgccctgcataaaaactagttaattacacggtttaatcattttattaaggtggcgtttggtaatacttttttaatcagttttttgtt

SEQ ID NO: 163452 - DNA, 859 bp, Cannabis sativa
ttaaatatcaacatcacatattaaaaaatatatcttttgaaatttagttgacttaatcttactaattaattaaaactataaaagaatttaagctatataagaatggcttaaaattccattcaagcttttcaatgccattttaaccatgaaataacgataatggaaattgtttgtgaaaacaacataaagaaacaaaaaattgtaatagcataaccaatgaagaagaccaagacaaagagattaacaattcaattgatattaattgtatttgtgtttgtgccagaaaaatttctttttttttaatattgattaaacatttgataaacttgaggaagaaaagaaatgtatatacactcaaaatccaattaaaatgtacttgaatcagatcatttttttaaatggataatcagtttagtgaagtgataaaattaaatatcgattacaataaaattagactcaataagtttcgtgtattggtcattgactgatttgggttcaccaattcattccctttttgttttgctatgtgaaagaattttttagtttaattttttttcatggtcgtctacgttatagttatctaagacatcttgtaacagtttgagactcaaaaaaaattaacacaccgaaaagaaaattctaacaatctattacattcgagactcttttattttaaaggactttataattatataccactatataaaaataactacaagtttaccatttaaaaaataatacccaatttaattattaaagtattgaatataatattattattgtatattagaataatttaaaattatattttattgtataattatttataattaaactttctttttttttttatttattt

SEQ ID NO: 163453 - DNA, 979 bp, Cannabis sativa
aaaaaaaaaaaaaacactacataaaactcttaataaatgacttacaaagttaaattaaaagccttgaactctaccaaaacaaaacaaaggccatgaactgtttatctgaatatgtcaatgaattaaaagcttacaaaggctcaaaacactaatactaaatcacataagaccatacatctaaaaattcagaagaacaaatttgaattttgaagtgagtaaaacttataggaacagcacaatccctaaactctttagctgtgaattcaacatttggattcactgtcccaacaagatgatgaggcacccctacaccatttttaacaacaaaacaaacaatatttacacacataaacgtgtagcctaaagtctctgaaccaaatcgatctgaaatataagcttaactaaatctaaaagaccgcaagaaatggttcatcaaactcagtcaaatcaatttttctaaactaaaatcatagttcgttctccaatatcacacgtagaaagaaggatttgcagacgtaatcgatcaaaatctaagattcaaagcacgataaattgaagaaaaaaaaatcagatttacctttctataggtggttccgtcttcttcgacggtctagccagcttcattgcagagagctttaaggacttcattgatgtcacagtgcttgagtagcttcgttgttccctccgctagttgttatctctctccttccatgacgacattctcgtgtcggacgccatgattgttgtttatcttttgtttttctaacttgaattttcatgataaccaaacagaaaatcggatccaaaaagtcacgtggttgggcgaccggatgtttatcgtttaaaatcttggaattttataaaaaaacttagggaaaaaaacaggaatattctaaaaagggaaaaatattacaacaatactgtgggccggcccaatgaacatttgtacagcccaaaatgaaaatattacaaaaatacc

SEQ ID NO: 163454 - DNA, 1102 bp, Cannabis sativa
acagtgcacaaaactgacccaaagtttataaaatttatggttaattaattaggacaaaaggttaaaacagacaaacttgaccaaacaaaaaattgagttcaaacgagaccaataaaaaacttattcaatctaaaaacggaaaaccatgaatggtattgaagttgaactagagatgcatatactagtgaaataagaattattagtgtgagtgtagctgagtggatgtgattgattattgtgatgaagtagtactatgaatattaagatagggttaatattcacaaagatagaggtatatagatggttggggttggaagagtttgactccatctccatataatgtatccttataaattataaaaatttggttgcacgcttgggaagcaaaccctaggtcaaggaacagacaaggagggtcccaaccgagggctacattttgggagtttcactgaatttggagtcccaagtttgccatttgactcagtgtcactctccatttaattcactctacttactttgctatacttcccataaacatgtttaattaccaaactcaaagtacaacaattttgactatttataaataaaattttaatgtcaagttattaattgctaaaattttgaaggagttcaaactatttacctctagtttcgttgtttgtaaccctttttgttttactaaaagcaagaaattgaggaaatctataccggtgaattccaaagcccacaaattcagagaaatcttgacttgcgcttctgcaaattacctaaatcacccatatctataataaatcaacccactttaattaatacatttttcaagccaaaagaacaacaattaatataccaacatggaaataaattggtctaaggaatcaactgattgttttgttttgcttacaatgttagaatttttatttgagtttacgttacattttagagataattatataagacactattttttttgtaaaaaaatacatttttacgcttatttatttatttatttatttatttttacatttttacgatttttcataaaaacaacaagaaaattacataaacgtaacatgaaaataacataaaaaaaaacaacaaaaaa

SEQ ID NO: 163455 - DNA, 3804 bp, Cannabis sativa
tttggtattatggaaaggcattatttcttgttatgacccctcaaaattttagaagactattggtatatctgatcgtgcttttggccaaaaatttgagtataattttaatactttacattgtatgctaacattatagtactaagtatctcactatttttcatataatatgatattttcaataatttatggaaagattagagtttatcaatcattctgcatcacgtatttataaataaattatttgtatcttattttcaatattataataactctttgaattaatttttttttaagaaaaattaactatatcataaaatttaataaaataataaaattataactattttaagtgttgaaaattcaaaaagaattaagagttaaaaatctcattttaagaaaaactaccacaaaaacactccctatatgaaaaacatatgtaccttgtgtagagataaaaatttatattgcggggatgtgtaattacggagatcaactcctaatggagagattttttgccttagtggttaatgtggcggtgataggaggcaatatcactactcgaagcgggaataggacaagagcggagataatactatccaccatatccgatcccgatacagatatatataattttttttttattcttaacatatatatatatagtatttatatatatcattgataattaaaattaattttgattatcatccataattaaaattatatattatatgcttaaattatgaagatttaatgacgatagtgaactgatgatcattattgattacaaatgtaaacatattttcttttcaattcttagtttcatctttgtttactttttaatttgtttggagatttgagaggtatgagactataatactatacttaggttataatcgatattgtttttgtttttttttctcaaactttgagatagatttattttttatcttctattgagttgtggtgtttttttttttaactttgagggagatatatcttttatcttttatgaattatgaagatataatatatatttgtgagaatattgtaataaattaaatttaaaaaatcaattattttaaattatttaatttttttttttttctattttaccttaatagatacctattgagtttctcataaccgatagataagataagaagatgggagagcataaatagttagctgagatgggaccaaaaactgcattctccatactgtccaattttctgagatattaaatcatgaatatgatgatattgatgactactcagcattacaaaaccaatgacaactgggttgatagagctgtattaactagaacgcaactactactgcatatgtacaacaaaatctttaaatgccattaatcatatacatcgtttttgtagtaaattattattaaaaaaaaaacttcgatttaataacatttattatgaggtaggtagtgacttgtgtgttggaaatgtcaagatgtatgtgttagtaataagggatgagagttgctaaaagatattaatagtgtctaatattttctttgatgtcatactactattagtataattaagaatcaggttctatataacttataacttttaggtaatatcgctaaccaattataagacactacctatagaaagtgctagataacactagtgtccaataacaatgctcataaaaaaaaatactacgatttaataacatttattaattttctaataattatttagtttatttgcataatgatatatatttttgtaagagtaaatagtgtaaaattttcaatacttttatttcgccagtaataaatcctcaaaatttatattttggcagcaaaattttcgaaatccgtatactcgacatgatattgagtcatttataagaacatgagctactccacttatcagcaaaattatcttgagggaaaatattgtgaatattatcccacgcggaataaatagagtattggatcatatataagaacatgagctactcacttatcaacatttggttttaagatggaactcctatacaaataatgaccatgtctactctcatatggtttaagtttagtgagcaaaaaatagttaacatcttaaggaagaatattgtggacattgtcccacatagaatcaatagtaaattattacaaatcatatataaaaacatagactatatcacttattaccaattaattttaagatataactctataattctcaacattaacaccgagatatgctaccacaatgcttagacaaccggaaatacaataaattaatgaatcaattaggagtgaagagtgatcagtaagtcactaaatacaatacaaacacaaatatagtgctataaaaatatattataatttatacacacacaatacaatatattgtaaacatgtacactgatatagacagtacaaaatagttgctacaataaaacattacaacgtagcccattacattaattacattaacatgatggttaaattaataacgtaaattttatcactttttaatattcttaactttgagatgttgataatgttggattataaggcctccaaccatttgacaaagttattaaaattctttgaagattgaccatcctctgctatatttttcattgccaattctttgaattgcattgacctttttctaatttccacatcatttaaaagtttatcaactttatctttcacctcttcctttgttatgatgcctttttcatccgctacaaactccattccaaccttccaaaaatcacatatatagtccttattcataaattggtcagaaaagtaaggccaacacagaaaaggcactccattactcaaaccttccatggttgaattccaaccacaatgagttacaaaacaagcaatagcaggatgactcaaaacctcttgttgaggtgcccaactaacaatctttccaaccatattctcaattcccaaaaatgtatgtaatgggtcaaacatagtactttttgccttttcacttgagatgaatcctggacgaacaacccaaaggaatggcctacgagtgagcttaagtccatgagccaactcataaaattggtgttgctcgtgtatagtgaagctaccaaatgcgatgtatatgactgagcaatccttttgttgattaagccaacttatgcaagaagagtcattagcccaaaattgtgattgggaaatatctaaaagcctattagctctgtttgctattaatggccctattgggagaaattttggaaacaaagaaagcgcaaccgattcgatgtcacaagttgtattaaagagacaccaatgtgcagtttttgcacattcataggctttaaaatgaacttggaacccatacttttgcccaactaagtcctgatccttccatggtaactttgatgtgtttgcactaggcatgcctgaagacaattgaattatttgattttggttgggattatttcctggaaaataatgtgaatcaattaataaacaattcacgtattttaagtgttgcagaacaaaatatacaggggtagcagtagtcttttggtgtgtatgaggtgtcccagtttgttggaaaagtgtcctttgtataaggctaatgattagtgtactgccctttaccgttagcactgattctctaagattccctttgtatgatttgcttaatacgtgtaaggccatgattgtatcttgtgaactctgtaacctggcatttctgcctataaatacaatgctatgaatcagccgtaatttgagctgatcgaatcaatttctcatcccttatagaaattttactt

SEQ ID NO: 163456 - DNA, 1662 bp, Cannabis sativa
accagcattttggctttatgctctttcttgcctcagggggtttctaccattgttgtgattatcccagcatcattatgctttttgttttggtcgacacgatgattttcatgctgtcactgtcgatcgccatctcgggctcaacttttagccttgtcatcatcatatccatcataatattgtcgatgactggaaactttggggttatccttccttctctgaccctactgctgttgctggccattgttccaatgtttgtaaacttggatccctcggttcccctagtgtgggatgacttgatctcgtgacaccttaacaggttgggcaggcacctcgtttattcttccttctgatctgggtcagaaattgttttgattgttattcccaaactaatgtccgagcaagaattgttcatcagtaggcgatctttgtccctaacgaccattttcttagttaggccttggtcagttattcggacattctttcggcccataagtggggccctttcccttattattgttttctttaggcagctagacattagtctgttgcttgaactatttgatgagttttgtggcttgtctttcccaacaattgatttcatcttgctgtgctcacatatcttgggtggtgcagtccatccactcttgaaattcacgctggtgctagtcgaaggcttgatttatggtggtacgtgtttcttcttggttgtggtgaaggctattagtgtggttttggacctgccccagaacctcttagagattgtctatttgtgcattatctctcaggtcgacacatgactctcctactttaggttggctagtctcatcccatgtttctccaacaaacaacatggtggtgttttcgaactcttgcacaccaggattaaacctgtgggtcttagtagtaaccccaaccgataatctgacctctatccttgtggatactgggtcaccgacccttgttcccactaaggcattgttgtgaggtggcaggcgtacattgggattatccgtgttggtgttggtgggcacctgaacatttggattgatggccatcgggtcacgcggtttagtggacaaagctcttctagtttgaacaattgtttaggaaggaaatatgaatattttgagttgagcaaagtgtttttaactctgaataaaaataccaaaatattgaccctatttttgattaacgacgcgaagtcaaataaacaaaaataaagggtttgattatggatttaaagtaaagagataaacgacaccaaattttatagagatccggctccaattatatgataataaactactccttttttttagtatttcttgagaggatattaagatcacaagaactagagttacgcgagtttctcaatattcttccaaggattacaagtgaatatttctatagcgtaatagctctctcgaaagtctagaattcggttcctcaaatagcaaaataagctaccatttataggattacaagtgaattagttgatattaagtacaaaatcatacattaaaaactgatttattctcttaattctactattccctcaatcccaccattctaggtatccataatgacctagtcttcaaggattgtggagttgaagtcacaaatttggaataagtcagtgctacttttttgtttggactttcc

SEQ ID NO: 163457 - DNA, 3401 bp, Cannabis sativa
atcttcttgttcagcaaggcttacagcaaagtggtaacccaattttactgtgtagcttcctttgaatgaattgtaccaaatcattgtatcatttaattaaattaaggaaaaaaaaaaaactcaagagaacgctaagtattcgatcaatattagctttgcagaaattagagtgtaaagccactaaatcccactgtctatattggtttattaaatcaataactaccaaacttgaattagaacctttaaataaaaaaaggtgtaaaacaagtgtgtcctgggatccaagtatctgatttgcagttgattttattacctattcctactctccatcttagcccctttagcaataactccttaccccaaacaatacttctccatgtcaaagatggacatgtatctaaatcaggagcaagaaaatgaccattcaaaaagtatctatgctgaagaattctgctaaggagggagtgaggagatttcaaaagacgccaagcttgctttcccaagtgtgtttgattaaaatgtataaaattccaaaagcctaagccactgtgtattttagttttgcaaatgaaattatgctttttccaatgaattaaattccctgatgccaaagaaacccaccagaatctagccatcatgctttccatttggcgacataaggtgacaggcaatctgaaatagctcatggcgtaggtaggaatgacttgtactaccacctttaatagaacctttttaccaccaaccaaaaatagttgttctttccaagaactaagtagcttccaaattttatccgtgagctttattttatcacgcccagcaaaggaggagagccccagatattgctcatgacatgattggattggcataccaaaaagatattggaagaaaacttggtcttgttgtcttgtattatttgagaaagatagaacacatttgttgggattgatagattgtcctgaagctctgctataaaggttgagagatcttttaatagacatgacagacatgccatctaaaccagggcttttgtcactactcatggtttttagggcattaaaaaaacctccttggcagtggaaggtgttgagattatctgttgagaatcaacatctatcgtgattgaaattgttgccaaaataacatcaatggagtgttgctcaacaccttggctactgaaaattccttgaaaataagttgtaataatatccaaaagggcaggaattctagtttgagtgttgctactagaatctttaagcttcttgatgcgattattgctatgtctagcattcacacgttggtggaaaagttttgtatttgaatctcctgattgcagccacaatattcttgatcattgatgtcaatagtcttcttcttatgcaaataactcatttataatagatttagagtttttgagagcatcaaaatggtcttggtaagttcttggaaaaattttaagagttgcaacatgttcatgagtttctttaatttccttctttagattttcaaatttggactggtgccatgattgaagtttggtagcataattagagatgttactagtcacttggccaattgaattagtagtatcttgacaccagttcttgaggataatatctgtacatgtttcatcctttaactaaattttttcaaagtgaaatcgtgacttttaggcacgctcatcaggctaatctccaagggcagtgacagtgactttaatggctctatgatcaaacttgtaaaagtctatgtgttaaacaaatggtgtgaggatggtggaatcctagaaatcattgaccaatccataatttagtttttctttaacattcttcattccttggcttttattactccatgtaatttgttcaccttcaaaagacaattgtgagagataacaaccatccacaactgatctgaaagctttaatttgtgctacacttcgtgttggaccaccaattttgtcttcattagaaattacttcattgaaatcatctaggacaaggcaaggagacattgttagctttattagacttggtaagttactaaaatatgtagttaatacacttagtagttagtaaagtttaggtattatcagtaatatatatttgtgtataattagtttatacatattgatatataagttgataatagttataaagatttaaattttatctactattactttaatttgatgaatttataaatggaagctttaattcaatactttaaatattttatatggtatcgagttcttcgtgttgattgaagagtgtataattgtaactatttttattagaaaaaggtataattactaaaacttcaaaattctttatttaggggagtttgatatgttatatattcatttgtagtgaagtaatttttgcgattaattgtattgcggtcggatgggtagaatatgcatgttagatgagaatgaatatcttaaatattcatccgtagtgaagtaggttctacaaatacatgtactacggtcagataggtggtaaattttgtattgttaatgttatttttgtattgttttatgtgtttttttttattatttttttcatgttaaaattttaagaaacgtctaattacagtcgttatgctgtcaaaattttgctagaattaggataaattttattaaaatatatatgtgtgataattaatttaactaattatttactacacatattcaaacaaataattgaataaagttttattttttcaaaagtttcgaaatggatagaaattggatgagtgagaatagattatcaacagagtatagtcaaagtgttgaccatttcttggacatttctcagaagtataagccaaaaaacatgacatttaacatatatatggtttcagctattaataccaattgttagtttttggataataatcaggtatgttaggaaagtattttgttatgattattatcgtaacaatcctaaaagattcccatatatataaacatatatattaaatcagaaacgaaagatgatgaatagaaaagttacctgttgatgaactatcaagtatatttgcaatctattcgtaaattgaatcctaaaacagtaataaacccacaatgtgatcctctagatcaaccaccacacacaaggactagtgtgggccggtaggattcacaaaataatgatgagttcttgttttaactttaacacatgagcaagaactctttcgggagaaaaaaataagattataacgattaatatttttaggtttctaaatctattgtatacataaatgtaggtttatattatattaattgtaaccaataaaataatattgaaagtttaattaaataaattatttatttatttaggataaatactattttagatcatgtgttttgcaaaagttactaattggaccctctattt

SEQ ID NO: 163458 - DNA, 791 bp, Cannabis sativa
aagcttgaccagctctgaattctgaccagccgaaacaatactcgacacacactgaaccacctccaaccagttagcattagaagtcgaaaataaactagaaaaataatttatcactaatttttgcaggccatattgtcccattccacccaatcaccttaataattttttaacttatgaatatgattgctacgacgttgagaaataattgcatgcatgcatgcatttaattggcatgtatttgtatattattaatacaaataatatttttatatataaaatatgattatttaactttgtttattgatttaacaaaatatatattaaacggaatatataattatactaatcgttaaacggaatatatattttgcaatttagagctcaaaatgagcatttaaattatactaatccataaacaaccttttgttaaattgcaacatttaaattatactaatccataaacggaatatataatattaattgaaacatttaaattgcatgcatattttttaattggcatgtataatactctaagagctcaaaatgagcattggtgcattggagcaaggacacctgaaaaccacatgagcgaccactccaagactcaaacatatactaaaaatttgtaatattgtaatgttctaacataaactaataataaaaaaaaaattatatcttgtgtaaaccccaagttcttgtctaacctatctttttcatatttagattgatttaccttgatttatgcttgaatattaaaaacaaaatcgaagattcaataccagaattttaca

SEQ ID NO: 163459 - DNA, 1546 bp, Cannabis sativa
  modified_base (739)..(742): a, c, t, g, unknown or other
ttgtgagattaatgaagcaactaaattgttgtttggaccaataactaggatataatctatatagaccaaccaaacaatttgagaactacttgaaccatatataaacaaagaaaatctatttgatactttaaatcctttttatgtgcttgtttcaaaccaactttatacaatttacaaatatattaaagatatcatcaaatccaaaacgttgtttcttcataatactcacttttttttaaatggttgagtgatacttaagaaatatataaataaataaaaacaaaataatgatttgccaaaattctagagatttaatggtaatatgtgatgtaatactcatcaaatccacatacaagtgatgtgggattctatttctaaggcaaaggatccccagtccattgatggagtgtgataagttaaaaataataataataataataaaaatatttcattctgtgtaatcccgccaagattcgttatctctccctccccattttgaaaatttggctccattttctatgttgacgtactctacaacacatcggagaaccagacggagaaaatcaaacaacagagatggccaatggcaacaacgcctttgggaaaaccatttgctcaatctgctacgaagatctgaagcctattgttgaagatcttcaagctatctccatttgcggtcatgtcttccacgagctatggttagttccctccctgcttccctctctctctctctctctcnnnntatatatatatatagattttattttcaattactggatattcgattttcatgctcgtgaaaccctagcctgcagcagtggttcgaatactgttcaaacacgaagaaatgcacttgtcctgtgtgcaagcagagctgcaagggcaaagatgcagctcggctatactttcagtcaattggggattctgttgtcacacaaagtcagagaccaatcctcgattctggagaagatcccgagacactgcgcagagaggtgcgaagattggaagccaaggttctagggcttgattcggtcttggaacgactggggaaggacaacaaagagctaactcaggaggtaataatgcatttcttttattggagaccaagaaattaggataaagattttgagctttagacattcttgtttagtctttctagctcatccaaatcgcgagtattttttattcttaactgttttagtatataaggaggcacagacaatacaataagagtaataagatcctatcgtctgcttaatcattcagtcatgtctctgtaacttctgagattacaaacttttggacataatcttttttgattgcttttggttgtgaggttcatatgaggtgtatttcttgttccagctttgtatttgtaaggaacaagaaaaaaaagaaacaacatcaaagaatgaggccttgaaacaaaatgcattactgcagcaactgctaaatcggaaaactgaggtgaaccaataattgcatttcattaatgttttaatttgatcataccctcattagcgtgagctaaaaatttgatggagtt

SEQ ID NO: 163460 - DNA, 1496 bp, Cannabis sativa
gacaaatacaacggaaagagaaataaagataaaacaaactaataactaagcactgtaaaagacattaaaagtgacgaaatatgaagtttcaagatcagattagaagtccaagatatttgctggttcctaagcatgaaaagcacctactctgatcaagcatataatcaaacccttggtgtttaagcaccaccactattatgtcagtatacgtaattttctttaaaaaaaaatgagtactttaactgaaccattccaattcacaaactacagctaaacaaaagttgcacttacaaaataaactttacttgacaaggattgccaattctcaaactgttcccgcaaatcatcaaccaagcaattcaggtcttcaaatgactttttaagtatttcattagaagttacttcagtgtcgataattgcatcaagaattgtcttcaacaactttaatatctcttctgccttttggtggtacttcagaattggttctgagtttatgttatcacgagatgataaatgaaaaaatgaagagatgttattaagaagcgcctttaacaatgatatctccatcacacctgcgtcaatatatcaaagaaataaataacacataagagaaaaagtaataacaataagatttcatgataatagcaaaaaaaatgcatctaataattagattacataatgacgatatcacaatataaaaaaaaggtctaacagaatatatctataaaacataacaagtgttagaagagggaaggaaggttggaaaattagcacaaatgacaacttatcagcagtgtcaatcattaaaattgagtaaagcattgtcgtgaaatactgactactaaatcttgtcatatcaccatctgacaagttcaataaaagaaaatagtacattcaaaggaatttacaacaagtttttcaggtaaaaaagggaatgaattgtacctttcttcagcccaaacctatatatttagaaaccagagaaatcttctctcatccttatccttgagaaatacaaacagcatacacaagaagaaaaactctattcagcatcccccaggaaaaaataatgaatcgtcactatcaagatatcccccacagtaaaaggcctggagtttaaaatctacaagtgaaaatctgcaccgatcaaaacattaacatatgaattaccaaacatactcggaactgtatatgataaatatttcatgttaaaaataaaaacttgaaaaagaaaaaaggaaaacatgtttgagactttcaattagtatatgagaatatttgggttctccatttgaagacagcccgtagaaaatccactattctataacaagcttgatcttaagttcaaaccaggacagtccctgcttatgaatgttgcttagtgatagagatgcagcaattagaattttaccagattaactacacagacaaattttctagcctcttttaacaataaagttacataactgaaattgaaggtgaaaatattgttgata

SEQ ID NO: 163461 - DNA, 1135 bp, Cannabis sativa
  modified_base (1077)..(1110): a, c, t, g, unknown or other
atgttcgagttcctcccaccacgggaggtctcactgatttgatacactgtcaattcaccgaatcctacagatccatccaataccactaatctcgttgatcctactaacttggtgaatcctaatgccgcccataatagacattctagtagcccctcgagcagaaggtcttgtcaacacagaacaacctctacggagcgcaactaggactgttcctcggtattatgcaagggagatagggtaaggaattggtaaactggctattggtgagcctcatgtggacctgggagaggatattgagctagctaggctcaaagaagctgtaggccaggtcacctacacaaaagaaccacgtgttgttggttgtgatgcttttgcctcacagagatgcgaattcctaagatagatggacaactaggaggctatcctctaggcccattaagcggagctagactgccgtaacatggaggctggtgacctgataaggcagttcaatgagagactgttggaagaggctaatatctaataagagatcatttgcaaggaagactaatcaacagttcaggtagggcctatgggaaaacatccttaagcacgaggacagacctttccctgcccaaagacggtcaaatcttgccaagcagaccatatgggaagagtagtcagccccaggcaccatgaggtgtttggggacggccagacattcttggaatagaagcatcaccaataggacaacatagtgatgctgctccttggaatatttaggaaaaagtcattttaaggcctatttttaataagcttggtcctgggatgagtagaaacacacacgacaacttcaactcgaggagcgagaactaaagtgactttgttgtgccactgaacaataatttaggcaggtggatctgccaaatccaacttattggtacgatcaacctctcgttaataaacaagctgatttggccagccaagggagagcaaccagccagaagatacccaacctagagctagccagcaatagccaactgccaagcctagggatgaccgaccaaggcaagtcctattgggttttgtgccctaaannnnnnnnnnnnnnnnnnnnnnnnnnnnnnnnnntaataaagatcagaaatcacatttt

SEQ ID NO: 163462 - DNA, 3297 bp, Cannabis sativa
gagagagagagagagagaatatatttcagatatataaagtcaaaacatagccaagacaaaatatagcaactacatacattaatagaattgacaattgtgaaatggatcttggcagaaagtaaacagtcaacattgtaaagcataattaaaaaaaaaacattatcaagcataaatttgacatataaatgaaacacatgcaccacttttaagttacctagatggacaaaaagtcacatcttcaacagtatcctcatgtccatagtaaactcctcgaggtgcaacaatgggcccatcaacagctttttcgttaccatccccaggcttggtgtttttaataattgatccaccagatccagtggctgcagttgatatatggtcttgaatactccacagcacaacagacttgtctttacctgcagccataattatttttaggagaagaaaacttgaaagtaaatccgaatattttaggtgtgcccagatgacctaaaatctaatttttgacataaaatgttaaacagaactcgtaaactgcacatgtaaacttgatgggaatttcagtacattatatcatgtattaaagggaaaaattaattttacaaacaaaaaatgtaagaaaggaaaggatagacagccaacctccagagagaacatatggctcagttggacacattgcaagggcaaattcagcattatcttgatgtccagttaaaatctgaaattagggaaatcacaaatgaatcaataaactatataaccaccagcaaggcacgtgaagaactttcatatcttataatatacgcgaagagattacctatcttaaaatataatgtgggaaattaatcaaatacttcttattattttcaacattgatacatttaaaagagagatcagtgtaattcaataaaccaccaactgttgccaaaaccttaagcactcgtgactttaaataattgaatttcctaaagctggcttgagactgttttcaacaggccctaactccaaccaatatcattaattttttcccttttcactatttaactagaatccactatccaccacataataccactcaacattgggcagaacatatgcaaattcagttgcttcatttcatgccaaaaagataagttgctaaaagctagtaaagataataaatttctaggagcagtttgtatagcgctaaatccaattgtaccacttaaaagaattgtacaaaatatagttagtaaataatatgatttacaacaataactatattaactatatttacaaatttaaaaaggtgtacagttataagaaaaagtttatagggtaacaaaccaaatctggacgagagtttgtagcaccaaacacagcatgtcgattaggttgcgcttcaacatcccaaataaaaacctgtttggatatattctaaagtcaaaatccaaacaaaggaaaaaaaacaaagaagaatagggtagcgcagatcaatttatttaggaaagaaaagttgggagtcttacatcaggactgtcagtgtgtgtagctattatcttagtgttttgcggaagttccctaattctgttcacctgaaagagaaagtgttattagaccttagaagaatgatcaaataacagtgtgcaactaaaacacattaattatcagtttttcaattggtaaaagcaaatcagagacagagaatcatcaggcctatatgatacaaattacaaataatagtggaactctgaaaattttaattaccctcaactctgcatcaaccatcagtaagtacaatcagtggtgtccactgaccttggaaagctaaaacattgagcttgagcatgcaattcacacaagaatgtaaacagtcccaggaccccatcaaacctaaactatgttatcaagtataatttacgctttgtttaaccttttaatgcatacctctcctgggtgaatgatggttttgtacttctttacaaatggtgaacgtgcttcttcattaaactgaaaaaacaaaccaagcaattatgatattgatcaatagtaacaagcttgatgcgcacattcaaaagatcacacaataatatgtttgcctgtgatatgtgctcagccgctgcaaccctgggtttgacaacttcacagtttgctatgaccagagtatttggaacgctcccatcagtctaaatgaaaggaaagaaaaaacagaaagaagagaaattataaaagacagattttcaagacaaatatcaactaacagtaacatcagtgtagcaaatgcataattgagctcctacaaagctgtaaaaatgaggaattttaagcaattaactcaaagaaaaaggagaaaaaaaaataaaaacctcacctgttcagaaagatacaaacgttgacgattcttgtaagtcgcttgctcaagctgaggaccccatctacaaggagcaagaatgccttcttaccactagaacccacaaatacaataaccgtctatacgctaaatatacatatgtagtttggagaaatacaaataaaaaaataaataaataaataaataaataaatctaaaaccctaaaagctatacacacattactgaaaaccctagaagaaacaacaagaagaagcaaagtagagaaaatagaagtcgaatacgaacttcaaaaccctagaatagaatcgaagaagaagaagaagaaaaaaagcatagataaagggatggtaccggcaagaaagagaaggccagacgaggttgtgattggagagccagtcgtagaggacagggacgacggacttccactgagtgtacttatcgtcgacggagggttgttggtgagactttttggcctttgcggaggaggagtggtgttgttcgtctttcttgtcgtccttaggtttgggtttccggccacgagtttccttcttcttgaccactccgccttgctgctgtgcatccatggcgattgtacggattgagcttagctttcttccactgtcagaaacagtcctaaacactctctataaataaataaataaataaaacaacaacaacaaaagtaaataggtttctctctcttccgacgaggttgagttagacgagtcactacaccagcttttaggaaataaatagtaataaaagttgtcaaaattttacaaaatattctctcccttatttttttaagacatattgaaaagttgtctttgagagataagcaactcccaatttgggccggttacaaataagaataatctctaaattgtaattagttatacattttctaagtcccgtattaccaaagtacacctctatataagaataatta

SEQ ID NO: 163463 - DNA, 743 bp, Cannabis sativa
tttttttttcaaaaaaaaaaaaggtactactgagtaagtcacatgtggctatatttactagtagtacttatcgagtggagtggaatgtacagtgtattgtaaactcaatgtgttgaccggacgaaaacgacaagaaatctgaaatgagaggtggcttatctaactaggccatactagactttttttaattgtcgtttacttcacatattcacagactaacaatttagatttagaactgtacggctccatctgttattataattattattttaaaaaataataataaagattttgtgtggcggttgttgaactgcttaatttgttcatgctccggatgctaatattattgtgttctgattgaatcatgttacatataactagctatgaagtgtaaagtactacattcagacttgcatcttttaacttcttttgtttgtttgggatatttctgttaatgttattttcatagatgatacttctacacagcagagttttatatctgtttttttgttccttccacttgcctcagaagaagaaaaaacgtgagtgattgtctgattgaatgtgtgtcttggcttctcattagaaaaaggctatattttcatgtatgttatattctacactctctaactctaacaaccttgtattttaaaatctatatcttgtttgcttaccaaatatcatttaacttctataatattttatatgcttgtactgtatacatatgagagagagagagagag

SEQ ID NO: 163464 - DNA, 1286 bp, Cannabis sativa
aagccaccactgcggctgctgctgcaacatcgaaatcttcatcgacctacagtcagagttcgagctcgagccaatgttgttccagcaggtcacagcaacatccacaaacgtggaacaacatggttacatccagcgaagatgcaaatggcggggaaaactctggggacgacgtggttctgaagagagtcaggagtgaagcagagcttttcgcaagtcatgaagtagataacaataatctactgccaagatctcaaagccacatctctcttatggagcaccgcaagagcttgaagagtggctttcctcctagctcggttaaaaacgagcggcagttaactcaacaagaaggtgagcttcagagagtgaaagtgacttatggagaggaaaaaactcgtttccggatacacaacaactggggtttcacagatttacagcaagaagttgggagaagatttggtattcaagacatgacaacattcactatcaagtacttggatgatgactccgagtgggttttgttaacttgtgatgcggacttggaggagtgcttcgaggtctggccagcttctcaaaactctaccattaaactctctctacaactatctcgggtttcataggtggcaatgactcccccctttatgacacgtggcacaactgtatttggtaagttgtttctatggtccacgtggcacaaacagaagtggtgaaggaatgaaatgaacgaactttgggggagattcagaatcacagtatgctggaatcaatttgtgatcacctcacctcacttcacctttctttttgttttttcctttttaaaatatgtcatttgctactttagattttgtttttgggaactaccctttagattgtttatacagtagcctctgtattttactagaataatgttcaagttaaaagaaaattgaacatttagagagaaaagcaaaaatttgttgtttgtaagttttttcttagagttgttgataagcttttaagttttaatggatatagcttttatttttaataatcattttgttacgtaatgtgataaatgtagatagactaatgttactaatccaaactgtactgtactgaaagttggcaccggaaggctctcttgatttaacgttatggctttgttgttaaatcgattatatttgataaatgagcagaatgataagattttaaccaaatcacgacatcgttttcatgcacacatacatttagggctcgtttggaatgccgtatttattaggatttataaaacacttaagaaatatataaat

SEQ ID NO: 163465 - DNA, 2980 bp, Cannabis sativa
  modified_base (2955)..(2955): a, c, t, g, unknown or other
atgcttcatattatttagttccacgattcattagtgcactaaatttatgattatagtgttgtctgcacagtgaaaaataataatgattatatgcttcatattatttagttccacaattcaccagtgcactgaatttatatatatattaacgtaataatcagcgatgtggtttacttacttttgtataagtggaatgtccagtgttgtctgtacagtggaacataatcgtgattatatgcttgaaactatttagtcccacgattcattagtgtactggatttaaagtaacgtgataatcagcgatgtggtttacttacttttgtataagtgaaatgtcctttccaaggcgttagcaaagtaataatatcggatgtatcatcttacaatggactggactgatattgacagtggaaaggatatcataaacttaatgttatgtttttttaagtcaatgtcacttggttgatcttagatcaattgatctcaatcctaagatggttaaattctagcttaattgtactatatggattctttgacttgttcgtttctagcttgtccgtaggactagcccatacttacatcttggaaattcaacaatgcaattgaggggaagcgagaatcatagatatggaatttataacttctatagctattagaagtgaaacgatagttttcttagagtttggcttaatgtgataaatgatagagcgctcgtttcagtacttatattagtttactgaaatatcattttacaattagctaagtgttttaagaataaaataattgaagggtaaaataataaatttatccctactcaatgtaaatcgtctatagaggatcattgcctatttagattgtaacaatagataattcataatgtatctatatttggtaaatagggtattttgtgtaatcaggagtgtaattccaaatctgtagtgaattcaggaggaattaataaggtagaaaatttatttattaggagcttggttacataggcttatagtccccacactaactgaaacaatattattttgtaatctcaattaattgatttatttaatcaattaagattctaaataataactttatttatgaactttactaaggaatgatataattgagaagaaaagagaattcatagtttgtttattaattaagaaaccttagagggtctaattaataaatatatttaaatgagaattttgtttaataattaattataactattaaatagataaagttagcatttaagtaattagaatagataaatgatatttttaaaatataaaatattatctcacttttggaagtaaaagtgtcaaaattcaaacccatgggccttgatgttgagttcggccaagggttgaatttttaagcaatttattattttattcagcccatttaaactaaagcctaaccttagtatctccctataaatagaacatactcgcctttgatgcaaagactattaactctctctttgtctaacaaaatctgaataaaaaagaaagctattattattctattcattatttttgaaattctcttggtttcttactcaaaattttgtgttccttggtgttgagagattacccacaaatatcaaagtaatactcagcatagtgaggaagactatgtagttcaatcatcgcagaaggagaatccaagttcagatcttgatcatactttgtaacaaaaaggatcgatggttagagatctaaacagaatgaatcatattattctgctgctatcacggtaaagatttcttaatccctaatgtgtttatttatcgtttttaagaatttcatatttaggatgttaaattatataattataatcaacatacatgttagtaaatctaaatcctagtaaaattaatttctaacaaaatttacatactccacgagtcactcttatttacgaattttctaattgcaagataaaacttagcaaaatttctctctatcagagaagaatgcgctgtcatcattacaatgatttttgtcactatttataagaatttactatggcagttattctttctgttcttatctaaatgatggttcatgagacatgaacattcaccacgtttcatgttattttaacatgtaggaataatattaataactatctaaatttgaataatgccaaataactgccacttttaatcttatcattgaatggtcatttatcgaaatgtcattctgttcaatactttttctcctcgcaaataacgtagatgaattggtatataccattgggatgcttcttgcaattagagtggctcgtcaaacattcttctagtaaggaattatcccaaatgaggttttggagaatttttgtataatacttataggcaaactttttcaaattgtatctcttgtgcttcttgtgatcacaacattcgatcttacaaccaacttagttttcctcttctttattgatacaagtctgtagaagccatgtgtttatatgcacagtgttttctcctgaggagaccatattgtaggtctttggcctcactcacatactacttaatgattaataattttgacttatccgtatggtacaaggcaagatttcaaaatctgaacatctgagactgtaacgccctaacaaatatgcatgctatccaacatgagggcaggccgcggcactcccacatggggccgcgacacctgagttcgaatcccaggccacaaaacaggggcgggccgcggcccctgagttccaaacccagaaaaattcccatttcagcttcgaaaattcatgctcaaacacaccaattcatgctcaaaacttaatcaaaccctcaaaccataaattaaaatcatcaatatacatacggagagttgaaacacatacataaagctcaaaatcatagtatacaagctaggggtgttcacaaagtatccgatccaatccaatctgcacgatccaatccaatccaanccaatccgcaaaatgcggatatccg

SEQ ID NO: 163466 - DNA, 3583 bp, Cannabis sativa
  modified_base (218)..(218): a, c, t, g, unknown or other
  modified_base (395)..(404): a, c, t, g, unknown or other
taatattatgttcctaaaatgtgttcactcgtacagagtttcaacgaacaaatcaaagaacataaataacactcttgagatcaaacccaaccatatcaggattaagatcttttgatctaaaatcaaccagtgatattgacttagaaagatgcaacagtaagattataatatctttaccaagatcaatatcggccccagtctaatgtatactccatacntccgatactagcatactttaccaatgttctagaaagaacataccacgtatccaaggtgtaagtaagctttatcgctaactctcacatcaatgtaaatcctctgcactgatgaatcatggggcattatcttttgaagcatataatcacaattacactgtgttgacatcactataattnnnnnnnnnnatatgttctggatttaacagaaattgtatattaaaccataatcatgaataatacatacaaatataaataatttataattttctattgacaacaaatcagattatattaaaatgagttttatttagggcataaaattttaacaatatgttagaaaaaataaaaagctatcatattagcatatcaggatattggtaaggtgtgcacataattgtactaagataccgacagatatatactaagcttttaaaaagtacgaactaatgctaccaacactagtacgcctagagtactgagtgcatgtggtattatggttagttgtacttagttaagaacgttcgagcctcagttatatgcgttggatgcaggttttagaccttgcggttaggtgtataggcgcttgatcacaggtcggttgtatgtttatgttttatattttttctactaagtctttcgactcatatatatgttttctatgtgtacgtaaaggtaagacaaaggctgagtagcagtgagtctagaactcggtgaagattgtacatatcaagatggttagacctagagtgtccaaatcttcaagatgacatagactcatattatttggttagtcgtggggcgacatattttggtatatgttgtattttgttgtatttgaaaaatagagttggggtcccaaaatttgtaaacttttagtaatgtttatgttatttagtaaagtaaatattatttttaaaaaaacttaattaaacacgattttacactaaatactttggttagcaaaggttagcgtaataattaagaacaacactatagcacgtctaagctagtagggcgttacataatcaatgtaagtagctcgtcctccaatttattagttcataattagagctagtaaaaattagtttttcatccttctaattatctcttgaattctttaaatactattaattcataattaacgcttgatttataatctaattatagatttgagctcaataactgaattcactcctagaattaacactttaagggaattatatttgatctattcagtaagcttggattctacttattgtataatatgtttccagtcatccatgttattaagtttccaaaatataagttgtaagaaccatctcataaaaaaaaattaacaagtgaatcaaggaatcgaataaatacttagaattcagacaaatctattaatgatcatcattatgatataaataactcttttatgataaatagcatgttaatagaagatgtttatttacatcggtccaatcataaataatcaaattatacacagtacatttactaaatgtctatcatatgtgatctgaatcaaaatcatttacttagtaaattgtacttggtaattctatattaaacattacatactttaatacactacatactaattttattcatacggtatgttcttaaatttcttgtactcctacaagatcatacattcctatataaataagaaattttctgttttattaattatttgactaataattaatgtattcatttataatatatttatatttcatatattcaataatatattatccattaatcacttgcctttaaggcataaaccttaacaaatatcacctagaccacaacatttgcgtgggttatgaaatgacgcccaaaatcttatctttctttttatgatcgatacaatacattagtgtttgtgtctcccgcatatacgttggttatgccaaccgacgctaataccataaatgtcggtccaaaagtgacaaaaatgattgttttgtagttgttgaattaataagtttgttatgttaattgatagctcgggaatccttacttgttgcctatataaggcttatttgttcactcttgtaggtgacaatctagatagagtttgtagatgaaaaacacaatttgagcgttcttcgagagttgtaaagaggttgtgtgtgtttgatcacaactctctcaagtgagttgaattttgtaaggtgcaaattgaagaaaccatttatgtatacagccttgtaaatctactattcttcttaataaataaagattttttaaaaggcaattcctctcgccacagaaagaatgatgcatcttgttgcaacttgtgtcaacttctttaattattgttttatacttttgaattttaatccacttcttgataatgtttcaaattggtttctagtactacagttgttgtttgtttatgattcttcatattaactcaccacatagttaataatgtaactaatctctttatgtcagatttcaaccactaactctattgacgactctaatatttaacttcgatgacattctggtcataattttgacaacaatgccaacttaggcaaatttctggtggtaatggcagctccagtgataattgtattagaaatcttgttaagtctagttatagtatttatagtatttagttaaaacaaaaaaatatatatatcatattttgttacattactttttcctactatattattgtaaactatgtaattttccccacattttcgtaacttccatccttttatttgaataataataataataataataatccgattttttatacataatatccaatgttatttatcacaagataacttcttgtcgaaagatccttacttagagcatataaataataaaaaaaaaataatgtcgaaatattagagagatatactatacaaaaaaaaatacgatattcttatcttctatagagatgggtcaatgactttagagacagaataaaataaatgaataaaaagataaatacatgggaaaaatgtccagtatggcaatgtatcccatcccagggtaaaaagttaaaggcaatagggattagggaccactctaagtgaggcacatgaacctttttttgttgatgctgaggcacatgaacttatttgtctgttccttcccccaaaacatgtggtgtctgttgatgacatgacagttctctccttctactgagaatatgtaaccaattacaatttatttaatataatatatatatattaccaaatactaaaattgtaggttcttcttagttacattctaattaagataactacagcacatcatatgtactaaaatgagctcaggaagacttccatattaataataatagtgtgtttttaattatagagaatgat

SEQ ID NO: 163467 - DNA, 1924 bp, Cannabis sativa
tccataagtcaaacagtccaataaagtcttcttattcaagctagtgatcatctcatagttaatattattcaaaatcaagcaatagctgcaaaaataaattatgaaaactgctaatactagaattgagaaacaatatgtgcgagaaatctcaatgaattgcgccagccagattgccatttaagtcatgttgttcaacaattaaaatagttaagaacaaacagctagcccaatttttgcaatatttatttagaatgtacaacataaaagaacctatccaaatcaaaatctaatctttttcttttttgtacaaaaaattaaaaaaaatactacaacaaaggtaacaaaatcataaaacaaaaaccaaactcacctccactgggcacaaaaccaaccctgcaaaatcaaaatgcatccaacttcaatattcaaatagaatctaccacagctattaattcctttgctttcacctcatggagtagttcccactaagaacctgaatcaaattagaagcatttcttctaatcttctcattatcatcatccaataatcctatacaaatctccaaaactccttgttttatggcttctagacacgttgcttcattataacaacataaggagttcaacgttaggagtgcatattgaatacccctggagctgccattctttaaaactctaaccaaaaccctcacacacccattaaagttcaccatctcttctctcccttctttgcacttacccagtagacccagaacttctacagacctatcaagtccagaatctgcaatcctcatcaaaatcggaacggccccgcattgcacagctcgcctccggttatcagggaataaacagatagcgtagagcgctgtcgcagcttccctcttctctcggcctttaccgtccttgagaagcgaaaccaaagcccaaatcgcatatgggtatgctccaatcgtagctttgttcacgtccactactgccaagctcgtcagcacggtggccgccaaggctcgacaattcgacgacccaccacctagcaaagccgtcacaatttgaccaattgcgccttcagccaccaagcccagcttgttatcgtcgtccagactaaggttaatcagtaaagatagagctttctcttggaggatcagatcattcgagccaacacaccttagcacggcggtcacgacacccgaatcagtcagcttagaccgaaacgccgcgtcccgctttgagagccggatgagttgatcaagcgagtcaagcttggaatcgagcgtggaagagggcgacgaaagcgtggttattaaggcttgaggctccccgaggggctgatgatgtaatttcggaggggagacaagggcatagttggaaatcaagctcctgagagcatggttggggatgagagaagggtattcagggagaggcagtttggtaattggacaagtccggtggccggcgtctaaccaccgttggattgaagcacgttcaaatgtgtgacccgaacatagtataaccgggtcagacataatctccagcgaaatcgggcatctgaaatcttccggaaactgagcctccattaggttgactcgttagttgttcacgaattcttaacctcggtcgagaaaagaaggggaaataaacaaaggtttatgaggtttaaccttagttcatggacgaagcttttttttaagctttgaactttgaggaacctctaaagctcgccaagtcaaggggcatctcattttgtaaacattagcaattgaaattacaataatgccctccgaatccactcaaatttatggcttaatatatacctccgagtaggggtgttcacaaagtatccgatccaatccaatccgcacgatccaatccaattcaattcgcaaaatgcggatatccgcacttgtgcggattggattggattgaaa

SEQ ID NO: 163468 - DNA, 932 bp, Cannabis sativa
ttttcttcttcttatacgcatgtatatactaactaattgtgtccaaaattctttaaagacttcattaaaatatatatatgaatgtacaacgaagactacattattttactacagtaaaggcgtataaatacaaaagcataaataaacttgacgtccaagcaaccttttctattagtagacattttattcttctctcccttttctaatttagatttattatcttctctctctctctttacctaaggtctagcttgggagaactgatctctcacgtactattatgaactaggaaaatcagtgaaaattaaagtgtggaagaattaaattccttccttctcttataacatcaataagagaattaggactagggccaagactcgtcgagataaacgtgcccaaaaagtgacttagctagctagattccgttgttagatctcttaaaaatttgggtatttttttcgtctaacagtattagtagtgtggataaatcttaatattatttgagagagagagagaaagagagagagagagagagattgcttgtggattttggggaagtggaggacctagaagaaaaattcaagctaattggggatgaaactcaaagcaaattaagaagaagtgagatcatgacatggtgcagcgatcaatcagaagacgtgagacccaatattcatataatcacggcgccaacttctaataacgatgcttctacaactaataatattaataatactacttcgcttgtgactaataccaaatccattgttgctcctgaccaatcaaggagtactactataacatgcccatcttgtggacaccatatagaattccaagaccaggtaattattattttagttttaacttaattatataaatataaatatggggaggtgtatttcaacaagttaggagcgttgtttgaagatgtt

SEQ ID NO: 163469 - DNA, 1458 bp, Cannabis sativa
atttctatggttgcatacaatggttacttccaagagtacagcttaacaatcagtagccgggacgagtattcatggagtttggaacgtgaatttaatcttcaaacggtaatctcagaaaaccccattagctcatgaaagtttagacatatcttctctctataaatattgtgacatatttaatctgtaaaactttccactgcttagctgtgtacataggtagaatgaaaagtgggttcaagtagggcttaattaccattatacataactttatgttatattatatagataatctcgttaacttctatagatgaaactgatactgagatttatatgtactgtcatcttgaatgtacactaaattatttataccatagttgtttttaaattgatttataccattacaactatcaatatatttcaaaccgatagttataataaataaaccatggttgtctcaccaattttatgcttgcatgtgaagattgaaacatattcaaatgagtgacgtttctgtgaaattatatttgaaaggaatgttattgcaaatagaaaaaaggatgtgattgcttgtttgaacggttgaatctttggtagtaattagcattatagttgtaagaaaatattcagtgcatatgtatttttcgtcagtctttaagctgcaatttttgtcaattgagaaggataaactttcattctaacttaaagcattatatgcttccatatatatttataaatatttatatattttgagtgtagaataatggtaacacttgtttaaatttacgggtcttactaggttcaaacttacaccctcttcctttttctcacatctccctcactattgagttagccttagtggttcttatgacaacttatttagttccatgaatttttactttgaaaataaaacattttttttggtgtaaaatgaatcttatcaaagtaaaactagtattgtgaaagggaagaatgtatacatttatatatatatatatatatatatttaacagaggatatattgaatagagttgtatatatgagttgaaatttttgacacggcataaaatcgttacgagtttgggaggtacgagtacgactagatagggaaaagcttataatataagtttgggcataacacagtacaatgctataaattgacacgatatgaggcgaaaaatgtgagcttaagcaagacaagcctgaaatatacaacatgtaagcacgaatagtctaacccaaaagcacgacttgaaacttaaaaatttgataatagtaataatgataatttgagtattttttagtaaatatttcaattttaataattgtaataggattattaaattataggctaaataggatgtttgctctctgaactttgacatgtaccaaattatgtcttctgaacttttaaggtcgttaaaaatgcccctaaactattgagattgttagatttaggga

SEQ ID NO: 163470 - DNA, 1250 bp, Cannabis sativa
tccggtcattttggtagactctttattttatttgttttgacgttcagaaactttttcgttcaattatttttctgtaattgcgtatgatgccttccttaaaacgggtgcattatagaagtacacctttaaataatttataattgaggtaaaatgaaattttacaaaaatcactcaaaatagaatattcccattatattctatattttttattattttattggacctccattcaatgttcctataaataggaggctcctctaagctcattttctaaattcaaaaatctctctattatatgagagagcttctcagctttttttatgtagaatttacttgtttctctctcaagacatgtaagtgagagctctttcttagcttattttcttgtatgcaacttgcaatctcatgagaaataaaatctcaaagtaaatgtagttctagcgaactatctgatgtctctcttatttatttctttcatttattattgttattgcttatcggatgatatagagttggctaattcttagtgtcaacattgtgatgagaaaagaaggatgcattggtgtacttgaaagtggctttgttggcataaaggcatttaccatccctctagctcgtttgacactctagtggaaggcttttatttggaagagtattatgttgggaaaggaactaattgatcaagtactagatggctcattggcaatggagcatacatgcctatttactttgataaatcgattatgtaaggtggtggtcaccgttcgatgtctccctgcatgcacactactgcccgatgctagagtttcttctcttaaaggccttgatgatgagtggaatgttcatttgatttgcaatcacttcatacgcgaagaaactaaagaaatcttgtctatttcttctttttttttggggggtggggattaatgataaatgcatttgatagcattagaagtctggttactacagtgttaaaggttgtcattggtttgcggctcgccacctcgatgttgggtaggctaattcttcaaaagacccttctccttggaaaaaaaaattatggagtagaaaagtttctcaaaaagtgaaggattttctttaaaaatctttgttggataggatcttggcttttaaaaacttgaaaagtcatgacatgagcacagggctggccctgaaaatttatgggcccaaaacgaattaaattttggggccctcaaaaatatatcaaaaaaagagtgtcatgggatttg

SEQ ID NO: 163471 - DNA, 1904 bp, Cannabis sativa
aaaaaaaataataataaagaaactttccatttatattgatccaacaaaaaaaccaatatgtagaagaaatatatacacaaaaccaactaattcaagcctatattgtaatttaaaatatataaattttcaagcatagcctattgtagaataatataacactttttttctttttatctttttcctttccattttttctttttttactagaaaaaataaaagaaaaagaaagaacaaaaatccaaaatttaagtgaaaatcccgtctaagataattacaatgtcatataatattgattcctttgctttacttgtccagcattattgagtagccaataattgctcgccacgtatacacgatgcaacttgcatacccacttgttgcccaacaccaaccccattcacattacctgtctctaaccggacctccggtgccggcgatgttgtaccgaccttcttcctcctcttcggcgacacactctccgacgaagaacacgaagaagtctcagccgaagatctcttcgaagtcaccctaaccgggtcgggttcgcccgaattaatacggagcgggaaattaagcaaagccctcgacccacgcatccggtaagcggcgcggtcgtaagccaaggcggcgtcctcggctgtctcgaaagtcccgagccaaactctggcaccgttcttagccggatccctaatctcagccgcgaacttcccccacggccgttgcctaacgccgcggtaatgtttccccttcgacggcacaaccgtaggcttcttccgctgtttctcaaccggaatttccaaactcgaagccgtacactcaagaggttcgttaacggccggtaaggtctccggctccgatttaaccgcgtaattcgcgtcggaggagcaagtggtgagctggctgcaaacactcccactaacctcactggaatccgatccgagagaagggacccagccgacgcttacggcgtcgcggaggacgccgtagagaaccatatcctcggaatcgtcttccttgagaggcaattccccccaattctcagtcaaacacgggtagagactactgaaactggtgctacgacagaaaaccggacccgaaatacccgagttgatgctgttattcataatcggagccccgaatcttagatccgattcgcctaataaatgtcttcgaatcgagtcaagtaatgcaaaatccgattccgtactattctgtccgtacatttttttggtttggcaaagcaaataaagagagagagagattgtgggtttgggaagaggagtgtgaaatgtgaatttttgagaataaagaaggagaaggggttatatagtggttgaggttcatgaaccagaatggtcctatatttttttttaataattatgttttgttttaaaaaaataaaaaattattagttggaggaaaatgaataaaaaatgtatgaaacatatttaaaattaataaatgaatatttatgagtgcttggccaagcttctgtgaaagttcatgagttgagggcgtgcaaattgtgggaagtgggcgtgggggccacgtggaggagaggattctatttatcacgtgatgaaattgcaatttgatgaagtgagagaggaatgacgtcattcttctgaccgcagcaaaataataataataatacaaaaaaataaaaaataaatgggattaggttgttttctctcttgtctttctttctgttttcgtcatcttcccccgacacaattaatcgcttattttacttcattaaaaaaattaataagtaatttaagatattcagattttaaataaatacctaataaaagataaggtgattcaacaatgcaccccttaaaagggatgtactgatgcacccttaacttgtttcgtcatctagaagaattttttagtctaat

SEQ ID NO: 163472 - DNA, 942 bp, Cannabis sativa
atatatatatatatatgtagaagtcacttctcaaaataacccattgcagatgatgagaatggtggtatttatagatcagggatatgaatccaaagtcgatggctgcatcaacttaagttgttaagtcagttacaactcaacaaactcctcgtaatagaatctccatgtcagcttaggaaagatcttctccagatgagaggcacacttcatggatgaatgttcaaggcagacaaagtgtgtcccttaaagtacgtcaactggagcagactatctagaacatcctttcaggagggaacgattagatttctggaactctttttcggaggaagagtagctttcgagaagattccagctagaatggacaagctagacttccagaactattttccaaacaacatctagctttcaatgagacaactttcggagtggacaagctatactttcgaaactccttttcaaacatctagctttttacgagactcttttggagaccttttcatttagaaaactattccacaataaattttcgataaggtagtgtgactatatttgttcttccatgtgatcatatattcaatattttttttttgttatcaaatgtacattcgatataattaacagtttttttaggagggaaggaaggaatataagtgaattactaaaacatatctaaaacatttaaggcacatagctattgtaagttaattactctttgttaaaaaaagagttaattactcttatttttaatcggaaccaaatttggtttgacttgaccatcttcaataattctactattttggtttacatttttttcaaatttagtggaacaacttaaatgactaacaccaattgaccacactaaataaaaatatgttgcataaaaaatcttacattttatattattcagggatattggcatctaaaccacctgaactttacggt

SEQ ID NO: 163473 - DNA, 825 bp, Cannabis sativa
aaaaaaaaaaaaaaaaacattactgttcctcgtagaagaaaaaattaatagtaaaaagatttatgggttactaatgtaattggattgtgaaatcagagatgagcgttgaccagaccaataatagctaaaaagatataaatgatatatagtagagacaaaagaaaaaagtcaaagagagcaattataaagaaattttcatttaaattgaatgatttaaatattaagtcttatacattgcaatacaatatgtgattgttttatatacaaatgaatttttaatttataaatagatcataatttaatttcgcaacatgtgtcaaatccattgagaaattaaaaaattgtaaagatggtttttgatttttaattttattgtttaataaaaaaaatggctgctattcacacaaatgcaaactatagggaataaatgctttcttctttgacaatcaagggaagattcttctcccaaagatctacaacactctgattttaataagttatttacagttccatataataattttcctttttttttttttttgttactataaatattatttgttaaatataaacactctgatttgttttgttgatttttctattggtaaggtgttttcacacagaatgagtaacatgaaataaaattgaattgaattttcttttaaaatactatgtatatgtttttttaaaacagattgtgtatttttcatttttttgttaagaaataattttttttaagagtaatttgtggcataaatgaaatttaatttttagttacaaataaatacttaaatttaattttttgcggtaataatacctaagtta

SEQ ID NO: 163474 - DNA, 1098 bp, Cannabis sativa
tattagttatgttttctttaagaattattttgttgtatttttattaataaaataaccggtatattgcacttaaactttacacattaacatcttttacaattgagagagtaaatttgtgtagacaaaatattttctatcaatattataattaacaataaattagtataagtatataaaccaaattaaaagtaggaaaataaatcaaatataaacctaaaaatattatacttttactatcaaaatcctcttcttttttttttttaagaaaaaatagtaatagactaagccaatatatattatatataaatataaaaatagaatactttctattttttttataagtgagaaataattaaaacataaaatatttaattaattttataaaataaataatacataaattttttgaagtagcatatttatataaattgcaaaatttaagaaaaatatattaataattaatgtttatcttaaaagtaataatttaatagtgaaatgatatttttataaattaatgtagaagaatcaaaattattaatatttttatcatagttattgttattataaattattgattatagatagatattatttttcatttgttatattttaggttattagtagatataaaagttatataattattgagaaattttattaattttaaattatgtttattattgtgaggctttgatagaataattaagatatttagtattgcccttaataactagtatattgtaatgtggtacttgttttattaattagctagtttaacctttttataaattaatatgtattgaaaactaattatataaatcaattagtgaaaattcaaaaatattcacacaatctcactttttgtttatacagtttatagattattattattattagcttattttaagcattcttttgctcttcttaatgtttgacgatatttagtagtggaatagtgatagttctagtatatattttgtcaagattgcgtatcaacttcttgagtttaaaggtgagttagttagaattaataactctgtcttttggaaagagttatgagatttgagagtgcctcctaaagtcaaggatttggtttgg

SEQ ID NO: 163475 - DNA, 4203 bp, Cannabis sativa
tatatatatatatataaatgcaaaaatgcacggaaaattgcttttaaaaaataaaataaatggaaagagcgagccagatgtaacaaatgtatagtatatgttggaatagaatttaaagtgaggggacatactcttaaccagatttaaactctttatttttattctatttcaaaaaaaaaaaaaaaaagctctttatttttattatatatggagtcttacttaactattacactaaggattcattttgtagaccgtataatgatcgtattatattaaataataaacaacactatatttaagtaaaataatgtattgtattaattatatattaccactaaattttttaatacaatataagatgtattatttagtacataacaaatggttcgtattagcttaatatctacaaaaagtcaacctggatctagagacccagacctgactcggacttggacccgaaccttggatccagattccggatccgaacttgactcggagtcggtgttaagatcgagtttattgaaaatatattattttacacaacctattaatacaagtcattaccaaatataatattgtattaaataatagtaatacaatacaatacaatacaacgtactaaataaacccttaagctaatatgatatctataaatattatcttttattacaaatatatattataactaattaaaatgtatatattctttttgggagcaactggtgcctcggttctatgtgggtgaccctgagtatatgcctcaatatggagagccattttcatttatttattttaaaataattattttagtgaagagtagggattattagagtaatcatggatcccacttttagtggtggtgtctatgcctggtgttaatatataataagatagatagtacattatgaaagctcattccttctaaccagtgaaagaataatattaattaggtggtggtgcaacaatgaaccaaataactagctagtagtgaagtgagtgagtcagtcgatcaagtgaccaccgactattgcattgtcaacattcaattcaaccaaaatacagaaataataaataaagtccattttttttcaaggaactatgatcattgccaatagtttttctcatgaactttttcttctgaagaaaattacttgaacttataagttatttcaaaatttgctccttcaattcattatgttattctttaaagagataataatggcagctaaaactttaaaacattaatggatagatataaaagtaattcatttaagtgttatttattttgtaacacttaaatccttatgcaaaatataagtaataaaattttctacaattaagaattataaaccgataatattaaattttatctcttaattacagattaacacttaagtaaattttttacggtaaaaatactttttattacacttttattacatctgtaggtacataatcgttaagtatcagctaatcactattctcatgtcaatctcttattggttcaaataatttaattatagttttaatttaaaaattgatttaaacattcaaaaattgttttaaaattaaaaaaaaaaattcaaaaatcattcaaatattgtataaaaattaagcgtaatttattaaaaactaagcaacataattaaaacaaaataaacctgatttattaaacatattttaatgtccatcttcattgaacagaaaaaaaaaatcaccaatggattgttttataaaaatagcctctatgaaattttttcttcgcaaataactttacaataaaatttattagcaaattatcttgtatggtccccaaaacgactatgaattacactgtgcgaccataaatgaccattatagtcgtaaaatgaccatagatttacattgtacaacaatcacagtcgcatagagtaaattaagtgaagttattttacaaattataatatttcacattatcactttgacaaatttcactcaccaatggcctccaaaaaatcctaaaccaaaatgtgttaaatctatctccaatcctcttccctaaccctttccaataagaaagtaaacaaagaaatcaaatatgaagaaaacaaacccatctcttcctctcttactggattccaacccaaaatcctgaaaaataaagttcgttatatggacttgtatggtgggatattcacaactgatttgagttttaacaattttggggtatacaatggtatgaggatagacgaagttcaaaccataaagccaaaacaaagtatctctcatacaaattaggagtcagtagtgagataagggaatttaaagagataattgtatggtgggatattcactactgatttgagttttaacaattttggggtatacaatggtatgaggatagacgaagttcaacccataaagccaaaacaaagtatctcttatacaaattaggagtcagtagtgagataagggaatttaaagagataaaaggagaagatgactacccaaaaaaatgagggccagacgtagaagagagacatctcattgtgcttatggtggtaatgtggtctatcaggtactaatttttcccttcgccattaacgtcaacgaagtgaagggagactgacagaggaagaaacgcgagagagaaggagagatgcacaagaagaaggagcgaaggaagaaagtgttttcaggacttcccaagctcgtggtgacctccattttcttcaacggtagccgaatgggcttgattagatgtgcaagtggttgctgtaatagagagagagagagaggaagaagaaaaagaaggagagagagggtgtgattgaataagtttagggttttgttttaattttatatttttatttcaaaattatctctttattttataagtgtttaatcatgtttttagtttgtaatattattttatctatttttaaattttttaataaaaaaataaatgacttgggccaattagaatctgccacttaggtattgacctgtcacttaatggttaggtacctacggatgcaatagaagtgtaacaaaatgtatttttaccttaaaaaaaattatttaggtattaatcagcaactagaagataaacttaggtgttatacccgaaattcgactggtacttcaaaggatgacaagtgtcacccttggggaatacgaattaacgaatataaaggcaatcatgctaaaaaaaaagatattaatggattaactcattaaatgcggacttaatagagtatatctataactcgtcgactgaatagtcttaagtgagacaaagatgtacaaactattgattcacatattaacgagaaactatttttcgtcagagaacataattgtaaggataacatcgataatacatagcaaggcatcaacctcacaatgtgtagaaaagtattgacgagacatgtaggctgctagaacactaagcgtataatatacattatactaactaagtgtaagagctcgaagtacatgggtaacgaataacgagacatccatctcactaaggcatactcccggtaccttcactaatcagctccatacatcttttaatgaattccactgctacgttgcgtcatctctcttagaaagaagctgacattcaaatgatgttggctattgaggttcgccttgtcaccaaaaactgcgattgtgagatggagcgttatgtctttaatcaaagaagcgacaaaatttacattatcaacctcggaaagacatgagaaaagttccaactcgctgctagggttattgttgctactgagtgttcaagcacctagccagatgtcccggtgagatacactttgcagcatatctaaatccacatcaacgttgacccattaaaagcggtttaaatcacagatgtatgattttcaaataataaccgtatttatttacgcgggccgtaattaaagcccaaaattttgggaaaatattattatgggattcatatttgaatgtaattaactgccaccttatgtcattataaacaggggcaaaatatacagaaaaagggatgaaaaaattcttgagggaaaagaaccctagtttgtattagaaaaatgtgaataagattgatttgtggaccatgcagagttaactgccaaaccacgtaaaaacttggtgttgtttttactttattattctttcttagatttctactaaattctgtgatgatcctatcatgaaaataggctt

SEQ ID NO: 163476 - DNA, 1262 bp, Cannabis sativa
  modified_base (1155)..(1167): a, c, t, g, unknown or other
aattggctatccactatgttgaaatagattctttatttgtggcaaaagcaatcaacaaggcttattctttgagttgtgtatctcattttcaagatttaatagatgatatttctcttttttatccttctttcttaaagtaagagtctcccatattaaaaaagatgttaataaaaccgctcatggcttaacacgatttgcttttcgattggataatgattgtacattactttgttgttatttttgatttcattcaataatagtaggagtgttttttttttaatgaaaaaaaacaaacaaacaaattaagaccttcagccgactgattatatttacaaactcctttgcataattacaaaatttgccagcgtcattgttaaatttttattcactatttcacagaaaatacacctcattttacaaaatttgattttttttttggttttatattctatctacgagatttaatatgcatgttcatcttcttacttacaaacataacattttttatcagttatgctttatcacatatttgtgaactgaagaaaaaagaacaattttttttgtatgataaaaaaaagaataagcgtacaaaatgtcaacatcttacgtggtgtaacttgcaagttttatgaaaatctatataacatcatgtcttgtatcatttttaattatctagaaactcttccaaattaacttcataaatatctgcgtcagttctgaaattagtgaggctcaatacttttttttttctttacctttttttgtatattaaattataattatgcaaaaattagaagccttatgtgaaaattatacattttatgggtctaaataagatttatgaaaaaatataagcggcgtttgataacatttttgttattagtttttttattttaaaattaaaaaaataaaaatagttttcaaaatcatgttttataaaattgtttttactttttttattttttaattgagaattaaaattttgaaaatttaaaacaaaaaaaagttactatcaatttttttaaacaatttttttattaatattttagactcctaccccaacttaaatcttggaactcagacccgacctagacccaaatccaatccccggacctaaactctagtcccaactctagacccgacttaaataaaatnnnnnnnnnnnnntaaaaataaaatttacagaacaaatttttgttctttgtttttaaaattgaaaaacaaaagtagttatagagcacatttttgtttttcaaaaataa

SEQ ID NO: 163477 - DNA, 2868 bp, Cannabis sativa
gctcttacactccaatgtacggatcgaacgtattgcgaagttaaggtcttaaaaatgggtcccaaaatatttggaaatgtttaggcctgctaaacattatccaaggccaacaacaaccacaacaactacttcatcagaagaagaagcagcagcctccacctagaacaaaggctttgttcagtgctatttcgatgttgtcctttagttttggagtgtaggaagttattacctttttcatctttcgttagttttcgttagttattaccttttttcttcttcatctttccaagtggttttagttccattttgctttgatattcatgtacttaatgattctcgtgtatttattttttttaattttaaaaagctttcaataggagaagtattaactagatttttagctaatcaacgcgaagtcataacaaatgagaaattaactaaagttgtaataaatgctaataatgaacaccagtgattaaagaggttcggctctagatgttagtaatagtctactgcccttgtattttattaatcggagttccaaaatcaagaagaagcttttgaatgcaatgaataaaaatggcagagtttttgctctttaagtgttgatttttggatctccttcccaggtcatgggtgacgccttatattggggaagagccggtgcttcttgcttgaggagacgcgattattacagaaatatttcaaccatctccttgatttttggaggtggttgaaatttgattcttgtggtaatataccactatttttgtgggttgcaactactattgagctttttacaggatttgaatcttgaatgaggtggttacggtgaggatacctcctgggatatgacccaaacatttagctttattagggggtaagagtcatttacttcggggtggtactccaaaaccacttactctcactcttcatgttgtgtgtagtcttgatactaggatgacatacttgcttcaacgatgccatgtgtagctagagtgtgatacttggcccataagggtgtagggggtaagggatgtacccctagactaacccctcacccttggggtgtggtgatcctttaactcattgtcagagtatttatccaccctcccttgagggtagccaccttgcttacgctagggggaggggtgaccgttaaatttaacaattgtgaacaatagtaatagtcgtgactttacatattccatgttaacttagtcttgatatttttgtgccacatgtcatcatacttaccatgtcatcttcgttaaaatttgggttaatatttaccttccaaatttgtagcagttgactatacggtagaaactttcttgtgtagtccgcgcttcaattttgtttttaatgacttggtggtatggtgccaagaatgccatgtctatactagtaattatatttcaaacccaaaatattttttccactctttacacaccactccaataataattgggattttttctcaaatatacagaaaagacctaatatttacatttatacggatacatatgcatatttaaacttttatacaaaagaagtttctttttttttttttttttcaaaaaatacgaacatattgttaatgaagaggtgtgttaatcacaagaaataaagaagaaaaaatagaatagcaatatataaccaacaattttttatttatatgaccaacacttttattattctaaatctttaataaaaaattaataaagcaaggtgactaaatgaaatctacaaaagaatatataaaataaaatatattttaaattataaaatatgtatatgcataaaaaattaaatatatattatttttttaagctaaacaattaaataacaatgacaactagacaataactcaattgtaaaataaaaataagggataatttcacaaatacaaaaacaacaaaaaaaaaaaattacaaaaatacaatttcacggaattttaaatatttttaagatttttatgattttatttaccgaaaatacagtctttttattattaatttgttgttgattttttgttatctgcatgtcattttttgttgttatttgatgttatttaaatattattttcatgttacttttatgtagttttcttgttgtttgtatgaaaaaccgtaaaaatataaaaaaaaaattctttaaacggaaaaatgtaatttttttacaaaaaatagtatcttatgtaattatccctaaaaataaattgggtaccaacaaattatgtcaactcaaaacaaacttataaacaacacataaataatcttaaaaattaaaagtaataccataaacaaataattatatactcatttatgtattgataaaataacttaattattcaaaaaaaaatcttaataagaactaaaaaataattgcataacaacactatgtacatatgaaaatcaattagacatcaacaaatagtgtaggcaactcgaaagaaacaaaacaaaaaaaaaaattaaaaaaacaagtaaaagtcaccatttaaaaaactacaatgttaatataataagttgatatacgagtaatttgtagttattttcaagttttattttatttttttggaaggttgttttggggttatttttaagttttgatgaaataatatgttgatatctgatttatttgcatattatagtagagttgttgtttcattcctatacttagttgcctaaacaaaattaaaataaacatttgtatatttttttagttgatttctaagttaagtatcattattttttttggttaatacattaagttggattcctttgatattgtatcgataatctaaagtacccaaaaataaataaataaataaataacatgacacaacaacaatcttaatatatg

SEQ ID NO: 163478 - DNA, 2978 bp, Cannabis sativa
  modified_base (2947)..(2947): a, c, t, g, unknown or other
tcattcgacccctaaggagaggcttgtcaactgagagcttcatttgaatcctcaaaaagggcccccatccttcatcaagagaacctttatgcacatccataaattctcctatgatgtttcccaatgatgtaacatgaaattttgatttattaaggaacgacaagcgatatatttgaacccaaaaaagggtagtcatcaaattcttcattgtgactttctgcagagcacctggggaacaaaacaccacaaggtggttctgacaatgccaaggctccttaattaatactctgaatttatcccttgcacaaccaaaagaaaccttaaacatatcatccctgtagtcagagattgagacagggaatctacccttccaatggccagacatttggttatagaaggaaggtttatggacgtaattttcagtgagaactcgtgcaagaagtgtgtggctagagagcggtgctgagggtggagcaacatcatccggtaaaataagaacctaactctcttcttcggtaagagagagagtagtgttaagtgaatgcaagaaaggatccatggtagcaaaaatttaatgcagaagagaaaaccagatcatgaaggaaggacaattacaatgacaatacacccagaacaagaagaaaaccaaaaaagaataaaaaggaggaaaataaagggtttgaaaaagtagttaaaatctaaaaaaactagttaaaaatctataactgcaatagatccctcagggtactagaaggtgactaattgatttttgcagacgcattgaaagcacctgtaaaagtatttttaagaaaataagaaactatttacataatatgatgtatttttcaaaatcagttcaaatacttttttatattcacattaatatttgtaaatttaattattttcacaaaaatatttgtaattctaatattacattcatttcttttaaaatattcaatacatgatattattttctaaatttgtaaatcttacaaaattttaagaacatttcattatgcttgttgaattctcaaatacaagtagacaaaattagaggataacccaacatatcaaaagttcaaacacaatattcatatgatgtgataatattcatacaatattattataaaatttcaaaaattacatcttagataatagatgaagaggcattactagcatttgaaggctgctagtttaaacctggaaaatatttctccattgctccaaaagtccttcaaaattatcttgagtctcaattagctattgtgtaagagaagcggtggtagcagcttgatctttacatagattataaatagagttgttagcagctcttattctattaatttcctttagcctaggcattggacctcttccattcttatagcgtgaatgggttcccaataccatatcaaaaatctgctcttcaaataaaatacctggttgatcaataggaacatccaaattagcaagttgactaacatttattctttgagtagaacgcaagttgtccatctttgtctgcaacattagaagaaaactttaatatttaaaagaaacagattaaacaaattaacattaccatagtgtgattcaatttagcaattgtatatagcctttaacatcatacaattttcttttcttagaaatggattatcaaatgaaactatagctgttatcaacaaaagattagtctaaattaatgttgtggactagtatcaacacattaagcaatatcaaataattaattttttatgcatggtgataatattattagaaatcataatgggttggtaccattttttttaattagtacataaatttatttgactgataaattagttatagaaggcaaatagtggttgtgtgaaagttgttgagttgttaaattattttgttggtaattgtcaaaaaagaagatgtcatctactcaaggtcaaaatagtcataacaaaagtgtatacctatttaatcaagattttaattaaggttttgatatggctatagatgttgaaacaatggtagataacatgcattaagtgctgtaagataatgtactcaaaatattatcaattgtaggatgatacaattttaaacctacaaatttatcacttgaaatatcatttatcaactcttttgttagatgccaatgcatatttttgaaattgcccacaaaactaggtatttattttgtggttggatcctcctataattaaatatccaaataattagtatgaaaaatatagaataaattaaaaagataaaaataaaattagataaatatttatcatattactttgctttcatattcgagaaataagactttcatccaagacaactttcaaatggcatcattgaacgattagcagaattttcctcacatagttgttgtataaaagaaaaagtaagtcattagactaaattagattaaacaaaataaaattttaattatcttcaaaattacacataccttctatttttctgagcagaagtaatcacaaagaactagccaatctgaaagttctatattctctaatggtttttctttaggtgtatttgcgtctttctcttcacctaacaatttccaatacctttttaaatatgtctccatcctctaaataaattcatggctaatcttttaatctcatctaagatgattatgtgggatcgattataaacaaacctcaactgcataatccaatacaaataggttagtaattattctctaaccaaagaattattaaaataagattatttccaaagttaaacttaaaaagaaaaggtgaaaagagtaatgtgcttgcaatccaaatattactgctaacaaatgatattaaagtttattatttatactaattagttaattatttacatgtagtcgttctagaattaaaagttttagtctttttctggcatatcatcctaataaaattgtaaagcccgcttagtnaatttggaaattagcagttgtttacgtttaa

SEQ ID NO: 163479 - DNA, 1342 bp, Cannabis sativa
  modified_base (448)..(463): a, c, t, g, unknown or other
  modified_base (1273)..(1286): a, c, t, g, unknown or other
aaaaaaaaaaaaaaatacatactgaaacacatatgcattcattttatacaattttttcggagtttattaaagttagttccacattaatcatgtgtggaaatatattgtaacataaaagatgaataggctactcctctcattgtcaatttgttttaaaatggaaccccattcaccttatattccaaattctaacagagtttgcaatctttttcgcaagccaaccaagtaatgaatttgttatagtggaatctatcggcaagactttagaacaaataagcctaatactgaatttcaattcaataaaggataaatattatttggatcctatattttgtaaaagttattaattggactctttattttgttaaatgacaaaatagattctatatttttcaagatggtaaaaataggactctaaacttatttttcaacaattttatttttttannnnnnnnnnnnnnnngacaatttctaacacgaacagttacagaaaatctaatcagttttgtcataacatctttagatcagatgattactaagttttattttgaagaaaaatcagttcaggatcctatttgtacaattttagaaaatgcaagatttattttgtcatttaacaaaacaaaaggtctaattaataatttttgcaaaacaaaagatgtaaaatagtatttacccttaaataaaagtagtattaccaattctttctttgatgttgtccttctttaaagcaatatctcaaacatatcaactcaaggcccaacattccaattctcaatattacgaaagcctaagcatcattatggtattgacaaacataattccaagcaatatgacttgaacaagaagttttagctgagcttttccacaaaaaggctcgacagatactatttattttcttcaagatgtactttggcaagattataatttgtgcttagtatatataaattgttgttggaggtgcaaccaacattttacattgactaaaaatgagaagaatcgtgagtatataatgatagatgatagacatattttattggtataagatctttcaggaatgtatcaaataacaaaaccatgaaagcttaggcccaaagcgaatattatcatatctagagatggataaggatatattgaatttttgaggcgtttgttcaagaacaatactgcagttttgttgggattagcttgcaatatataggagcatgatgggccactcaaccgtgttgcttttggtttaggaataattacataaggcaccattttttgtaannnnnnnnnnnnnntacgttcaaagaatgtttttttatattttttgcgattttctaaaaaataacacgaa

SEQ ID NO: 163480 - DNA, 2319 bp, Cannabis sativa
aaactaagtggtcattactagaggtgtacaaacgccctagccacaattacaaaagcccatttttataaataaagtttggcacgaccgatataaaaatatatgttgtcccaagtcgggcccatattttaaaggttaggcccagcacaacccaaaaatataaattattaaataggtttttaggactagcttgtttttctaaatggctcaactagttctttatatggccataatgggcaatgttaaaaaaaaaaaaatttcctattttcaaactttttttttattatttttgaaacataaatgattatattattataatttaattatttttaaataattttaaaagaatatatataaattacaaattaaaaaaattatgaatttttattttgtagttaggtgtcttaatttcttgttaatatatttgtactttcatgttgtgttttcaggctttccatgtcgtttagtactttaagcttatatctttcatattgtgtccaagttcatattttcctcatgcaaagttgggctaaaacccataatttttagtgtcatgtcgtactcgtgccacctaagctcgtgccaatttcatgatatgttaaaaagcccgatccaaatatacaactctagtcgtcactaaagcaacgccaccaccattacgcaccaccagccccattcccaccttgtcgtcaacactattgaaggcaacatgatcaacattagctttagcgattccaacagtcggtttaatctagcggataggcatagcaacacttggcaccacccaagaagcagaagttctccagccctttatttacttcttgattcaaatccaaataatcaagataccataaggcagtggtattggtggccagcatcactttgccatggaagaatatattccaacaaaaccaaacctgccaacgaaccacaatagctcgctcaatgttttttaaaggaaaattagcgggaaatatctccaccaaaaaaataatgaaaaatagcccaatgcaataagggtgataataagtcacgagatacaggtttgacacgaacatgactcgaaattttatgggttcgacacgatacaaaaattatactagttgtgttcgtgtttgtattttataaatttttcatgtcatggatcgtgctcgtgttaactatctaaactaaatttaagaactccatactacacaaacacgacacaataacactaaaaataataattcaactcacaacccgccaacatgacataagattttttgggttcaacatgatacgaaatttattcgagttgtattcgtatcagtattttataaatttctcgtgtcataggtgttcatgatagtaatttttcaataaatttaagacctcaacaaaatttgaacacgatatgtcaacacgaattaccatccttacaatgcacactattaacaatatttactttgaaaaatccaaattttatgagagttaattataataaaaatcttaatagttttttatggaacaaaatttattcatttaatgatatatgatcacattatgtcaaaatttgactattaaattaatataactaaatccatttcaaaaaaaaaaaacaataattatataaaaagaagagaataaaattattgtgtttattgttttttattatatgtaaattaggttgaataattaaaaaaaaaatcaaaaaatgttaatagttttatttaattcaacaaaaatgttatttttagcacaattttaaaatttatataataatatatatatttatgatcttacaatctatttttacattttacattttttttacaatattataattttttgtttcttttaattacaatcttacgaaattctaaaaaaataaaatgaaacaaaataaataacaacatacaaataacattatactaatataaaaataacaaaagaaaaatgttaaaaatactcattacaagagataatatgaggattataataaaaaaaaaaaaaatacaataaaaatattacaataagattacaagaaaattaaagaaaagaagaacaacaacactaaggaacacacaatagacttgacaatgctaagatctttgtcttaaaagtcatttcctcactcacatgaacattaggaaaactttagaaatgctcttaaggattttcaatccttacctagtgtccaaggatgagcatatccttacaagattctaaccataacaaagtatattttcttatattattttagattaaataattaagttataaataattaagagtgacaaagtattaattttgtcaaattgtaacatacattatggagttaca

SEQ ID NO: 163481 - DNA, 1154 bp, Cannabis sativa
  modified_base (380)..(397): a, c, t, g, unknown or other
attattattattattataacaatagatcagtcaaaataatggataattatacgatgcagtgaaacaatgaataagatactgtataacaatgcgtgagatacagtaaaacaccatgtgagatacagtaatgataacaggtaaatacaatgatgacatcattgacatggacttcaaatgttcaatatatcaaaataatatgttatggagatgagtgtttacttaaataataataataataataataataacacttcaatttttctcaacaccaccctatttattttattttataataatttttttaataaagcaaattaaaattctatatatacgacacaccaaatttttttttatcatcctaataataataataatataannnnnnnnnnnnnnnnnntaataataataataattagtattattattattttaaaatatggtgaatagactttaaaaaaaatcttattttattttatggagttttaatatttaataaataatatcattaatactaacctttcattaatattatatattagaattattttgtttaagttactaatttttttattataattcaaaaaaggggttaaaacagtcgcgcgaatagcggctatattgcctaatttaggagaaagtataatttttttaaatataatttaaaattgtcagtacttcaaaattctacaatattgaataaatgaaactctagagtgatatttttttccaattctatttgtaagaaataaaaaaaaaattggaaaaataattactcatattattatggtaaaattataaataaaaaatgttagattaaaatttcatataattttattactctattatcatttaacaaaaaatatatataatttttgcaaatatatttaaaattttcataaataaatagaacttcgttacatgtatataaaacgagatttattttctaatttataagatcacattaatcaaataaaaaaaattaaattaaaaaaaataaataatatcaagaaataaaattactattttttaaaagataaaaatactatttcttagcttactattataaaagtggcttatttgtgtgatatttatagactattttacccttacaagtttaattttattacaattctattttcttttttgtctttacc

SEQ ID NO: 163482 - DNA, 1658 bp, Cannabis sativa
ggaattgacccacttaatttgtttaagtaaatagaaagggattctaaatttgagagagaagcagggaaatctgggagaggtccactgaaattgtttgaagaaagatctaatgactttaaggatattaaatttccaaatattgacaatggaatgggaccagaaaatttattatttccaaggtcaagaacatgtaaatttttaaaatgtctcatgccatccaagatttggccagtgaatgaatcaaacgaatttgctcccaaattcaatgacttcaactttttagcaaggcaacctgacaagctttcaaaaaccattgagacactgccttcgtaattatttcctgtcaaatcaaattcctccaaattgcaaagttttcccatggatgttgggatttttccttccaaagcattaccactcaagtctaagctgactatggaggtcaaatttgccacatcacttgagataattccatgcaatttagtttgaaaaaggttgaggtgttcaaggttaggaaaactataaaagcaattgggaatgacagagtctatattattgccagacaaatcaagatatttgagaagggtcatgttttttgggaaggtacaagggattggctctctaagctcaatagaattgtaactcaagtcaagtgtctcaagggatgtaaggttaatgtgagatggaaaatgaatatgactaagttcacaagaggataagcgtatttctcgcaaggaagggattgtgttcattgcaaaaagccagtgattagatgctttactaagattaacttgatccatgactagagattgaagtgaagaaagacctgagagccaatgaaggttatccacagataatatttcattttcatctggattgaaaaaagaagaaatagtacttcgaagagagaggtgagtcaaacttgacagatttccaagttgatgggggatctttccgtcaaatcctgccattgtgaggtttaaatatttcaaactcatcaaagaaccaatgaaagggggaattcgagtccccttaaaatcattctggctcagatctaagtgagttagatgtgtcagattaagtaaggagggatttaccttgccacttaatgaagcatcgactagtcgaagctgtttgacatggccagtactgatgtcacaaacaattccagtccatttgcaacaatcatcatcattgcttccattgttgatggaaacccaagaaattagcttgttgaagggatcgaccaagtctttcttcaagctcaaaagtgcttgcttctcactttcgatgcagagtacatgatcattagggtttcttttgaaagaagtatgagtagttgtagttggttgcactacaagaaagatgaagttgatgagaattataagaaggagaagagtatttgcaatgagtttagttgaagataataaagccattttgatggatgggaattaatgtggttgcattgcatgaatatatataacctctatttaagaatactctattcaagaatatcctttaatttgttattaaaaaaattaagtcccaatttgggtcagttataaataagaataaccttagtaattagttatacattttctaagtcacgtattacttaaggatacctctatataagaataattacatcttaataaaatata

SEQ ID NO: 163483 - DNA, 1517 bp, Cannabis sativa
tctttgattttgggtgcagttgaagtgttgaagcaaacatggccggaaggagatttggggattctcttctcttctcttatatatatatgttattgatgttgtatatgtatgtgagtatgcaaaccagaaactttgggcaggaccagtactctagtactagaatttcttaattattatgtatgcatatatctatagctggactttttgttaagctaagtttgtactagttgctaatagctagccacctagcttattacaagcacccaacttttgttgtgcatttgcatcatcaacttattattgattggttctagattatagttttccatatctatatattatatataatcctaactttgtgcctttcattatatgtttatttatgtatacattaatacaaggatatgcctatacatgtatgcacataaactttttatcatgtatttttgttgaggccatatcattttagttaagtgtggctgtaaagttttgggttcttggtttcttagttttttagttgttctgtaatgttattgttagttgagtcttaacacgtaaaactagttagcctatatataaaagcaagccaaggaagaaaaaagagaagagttctaggactctagattgtagtaagagaaagagcagtagagagagaaacagagggagtgtctactgcagatttgggagttgtatagttatgtctgtacagaaaacagaaaatttctcaagggactggtttagttgcctgattttgtaacttcagtcttgaatgtgatagtgcaagaatttgaatccattgtttcagaagagaggaatagactctccaaccattgttggaggaaacatttataattgggttcgaattgtgttgaatgtattgttcttgtgtttgtgctgcacttctagtttattgtgtgcagggatttgagattggtgttggattgaatctccaactttctatatgatatcacatgtaattttataaaaagaattatacacagttgttgtgaaaataaaacacgtaaatatacatatcgtttttaagtgataaaactcacatgagtaaagttgatcccacaagtactttagctaaataccaattaattgaatttttagttctatttgacaaacaaaatttgattgtttgaatataataaaataacataaaaatagcaaataacaataatttagaaaattagaaaaattaatttggataatctcttctactttttacttcacttaatgcaaataatttttttcttctacctaaagtgatagctgattataaattattctctattctgattaagagataaagaatctaaactatatgacattatcctatttgagatataacacatataattagtaataagcaataattcaaacgctacacaagccacacaaatcttatcgttttgtattgaaacgaatgactaatcaattatagcataaccaatattcagttttcaaattttatattgattctcatacaaaagatggctaatcaattatat

SEQ ID NO: 163484 - DNA, 1854 bp, Cannabis sativa
agaaggtgtgttttatttgatgttctccaaaacaatatcttgctttaattaatagtctgaccacggatagcaaagaccaactcaaaattcgagaaaattaatgacccaaacattaaccaatagagagtccaaaagttcgtataatatggtgatatgctatgatgacgatgatttaatttgacgttaacatttgtagtttccaggaagctcgcaagagaacacacaattctttggccccaagtctttatattatcttctccacaaagttaatcaacggtcaagcctatagacttgtcttaacattgaccaacaagaatatatttaagtcactacaaatactgtgaagagatccgtcctttcttttctctttccatcaaaaatagatctctcaaaaagaaaactattaaattaaaaccaaaacacactaaatcactgatcttgcccactcaatttttttcatacaagcatacaaaatgagtcaagaaaccttgccagctacttctaatgatgaatggattcaatattattaccaccaaacccttttggatggtgaagagcctataagccacaataataatcatgatgtccttagtggtgttatgtcgtccgagagcttagggagccccggaagctcatcaccaacggctagtcaagatccccaagttagtactccatcgaaacctgtccggcgacgatcgagggcttcgaagaaaactccgactacccttctcaacgccaatgccaacaacttccgagccttggttcaacaattcacaggctgtcctactccaatttcctttgccaaccaaaaaggccctcttaacttgaacttcggcctcaagaatgccactcccatcattgaaaggccttttcaaaactacaattatcaaaaccaatctcatcatcatcagccaagtgtgccacaaaatttgattcaccttcagccacatgtacaacaatcttgctttgaagacaattattacaaccaattgaatcaagtagaccaactatcttactcttcttttaacagcactagtagtactgtcacgagtaatggtttctatccttcatcctcatccttgaacgctactactaatatggagatatccaatggctttgtcttggaggatgagctatcttatgatgactttaatcagattttcaattgatgatcggtaaagtagagtaattatcatttaatcattcatatgatttactatcctgtgccaaaaaaaaaaaaagaaaaaaaaatatataggaagatcaattaggattcaactgctcaaattctatatatttatggtcacagttgtcatgcgttaatcaaatttcttgagttccgtgtgtatcatgtgatgtgcccattgcaagtttatttatttgttaatatttcattacaatattattattaattactcattattgccactttttgttttcatgtaacatgttaattagcttgtaggtaattaatttctcattaacaaataatagatgattgtctatcattaattaatcatttgtcacttttagcattttttaaaataataatgtgagatacaaaaacaatgtatactttgactggttctatagatcatttgtacatatacataacttgttatgagttagtccgagtaaaagttaactaacaatgtagtgaaaaaagtaattagataaatattattttggtattattaaaatctatccccaaaaaaaaaaaaaattgtatactcttaaatggcgtatatagtatgtatataacagctcgaatgagcttgaaccagagaaaacagagagaaattgaacaattgtattgaatcaatcaagttgtgtacaaacaccaatgctttgcta

SEQ ID NO: 163485 - DNA, 2045 bp, Cannabis sativa
cccagagccagagcctgagccagagcctgagcctgagcctgatccagagcctgagcctgaacccgctccaggactttggtgcaaccctatgtgtttactttgtggatgtcttgaaccggatccagaaccagagccagagccgaattcagagccagacccagagcgagaaccagaaccaaatccagacccagaacctgaacctactccaggattttggtctaaccttatgtgtttacttggtggatgtcttgaaccagaaccagatccggacccggatccagatccagaaccagaaccagagccggagccagaaccagagccagaaccagaaccagaaccagaaccagaaccagaaccagaacctgaacctgccccaggactaaagtctaatccaatatcctttttagacattattcgacactctgacactattaaaaagcttaacaataacaaagtaaagaaccatagccatttcaagggagccattttgcccaaattcgtacaatatgaaagagaatgtttagaattaatgtaggtacattgacaaaataaagagcttaaaatatagataaagtaggtaaaacggataagagagttttatgatgagataagaggaagtatttgcataggtatttatagaagagaagtaataatgtagagtagctagagagagtagatagataggaaagatgatgagagtataggataaagcgcggaaaagtgtagagagactacctagcatgggaatatgttaatatttgtggtgcaaaatttgacgtatgtaataattataataaaaataataataataatactatacattttttttttttaaaaaaaaaaaaatctatgtcagatcaataattttttgagatttttttaagagatgaagagtgggactgagccaacccatatgtggggcaaagcataattaattttggttttattttgcatattttgtgtctaattgtatcaattaatacacttggtaattagtcattatgctatataatataagaataacgtatttgtataattattatatacacatatatatacaaaactcattcatgctgcttattaataattatcagtccttgaagattatttagataataattaatgtaataaataattcattacaattaatttgttaattgtagtaatcaagaatgttatcgagctagctatagctagtttagtcgtaatcgtgcatgaaaaattaatactgagcttttaatcaataatcaatgcatgcatataatagaagatatataagagaattaattaaaggagaataaaaatattgtgaaggaatttctttagatagatgaagcttctagctcccaataatggattctactctatgtatatatatcgaaatatctcactaaagtcataataatatccattgagactatctacacgttttggaataacatacactattgatcagtttcacattctccacgtaggtacgttttgtcaaaactaacttgatataataaattaaagataattaatatatatatgatgaggatatatatgggaagaattatgacgaagaagatagatcatacacatcatgattcttttcttttctttttctttctatcgatcttctatatttgtataatagctatgtagttatttcaagagtacttttcaatattttaagatgtctaaattacctattttacttcactataaatatcaaaactaataatataaatgtaataacctgtttgaaagtttattaaatacataattatatgttagtgttatatcatcattttattcatttaacacattatatatcaagtgcagtagaatgagtaaagcatatacaactgggatatttatcttcatttaatttattgaagacacaatttattttcaaaattattgagaatatttggacaatataattttgggctaaatgtatttgtagaattaccccatatactatttttttaaccttttttttttaaaaaaattacggtttgggtttctaaagtggttgcagcgctaattgcaataggagt

SEQ ID NO: 163486 - DNA, 4146 bp, Cannabis sativa
aggaagtagtaccatatagataatgaagtaataaataagtgttattactgcttggaagtttgaataaaattaagttgaatacattattaattgaagaatatatatgataaaaaaataattatactattaaaaaagaaaaaaaccatataccatatttaatttgaaccaaattacatttattttaaaatttatataagatgactaagcaaatataaatctacaattaggacacttattaagtctactggttactatatcatgcttacatcctgggtgaaacatatgactacatggaaattttcttacgttatctccctttttgtattctcctaggcatgttagacattcgtctccttcgaatattatattttctctacacaaagttgccttcaagatattcgtctatgtacattttttttgatcgggtgcattttatacatgtaaatgcacatatgcattatcttgattaggggcattttagactcacatataaatctaattaggtctaattaggccatggttgtaggcctaattaggcccgtaatgcaaccttgatttgtgttatacttgtaatgaatgaatctatgtacattttcttctggtgtgtgtaggtaattccacgagtgcattacttttaggtgcatttcaaactcacatctaagattaattaggtctaattaggtcgtagttgtaggcctaattaggcccgtaatgcatcacgagctttatcattaccattaaaaggtttcaaaacctaccaaatagtaatagtatatataaatacatataagttttcagaaaatgcatctaagtaagtacatatacattttcttcaggtgcattttacactggtaattgcacgaatagattttttcatcactgtaaaaattattgtgatataatatataaatatatttaattatagaaattttaaaaaattcctcgattaaaaattcattagcaaaattttagatttttaactcaagttatgttgggtactattacctttctgactttgggctaagatagtaggaagtagtaccatatagataatcaagtaataaatgagtgctattattgcttggaacaatctaaagctatacataattaaggtttgaataaaattaagctgaatacattattaattgaagaatatacatgatatcaaataattatactattaagaaaggaaaaaaaaatatgtactatatttatttaatttgaactaaattacatttattttaaaatttatataagatgacaaagcaaatataaatttacaattaggacacttgttaagtctactgattaatatatcattcttacattctgggtgaaacatatgaccacatggaaattttcttacgttatctctctttttgtattcttctaagcatattggacattcatctccttcgaatgttatattttctccccacggaattgtcttcgaatattcatctaagtatacatttacttagatcaggtgcattttgctcaggtaaacacgcatatgcattatcttcaggggcattttagactctcatctaaagctataattaggtctaattaggtcatggtcgtaggcctaattaggtccgtaatgcataacaatcaacttataaataaagcttcatcattaccattaaatggcttctacaaattacatatatgaatatgtaaatattattttggatcctatattttgcaaaagttacagattagaccctctgtttcgttaaatgacaaaatggaccctgtattttttaaaatgctacaaataagaccataacacaataccagagaggaatcctttaaagcatctacaactatcttaggctcaatatagactttggctagatgatactagctcttactcaagccatccttcattgctagtcttgcatcgcaccacctgactgagaatcggtggtgacagggaagacaaaagcgagctctcacgagtgtagagagagaactcagggttgtcaatcaacagacgtaaacatgtcctctatccaaagatgtagtcaccaagattgtatccgcgaataattggaactacttgtgatctccagagcacgtaattagatatgtcaagcttcactgagatcacaatactcatagtcaattggaatgcagtgagcatatgaaatgttggttctccaacattagaggaggaggtagcatagaatgttgaagatgatgcttgagttgccatggaataccaagtgaagactaatgaatgagagagaatgaaagagtaaaacaataaagatgaaagttctaatcaaaattgattcagagttagggacttgaattctatttatatagaattagaagagatagcaatacaataatggtgtgatctaacagattcctaaaaataagggaagctattagaatcagttaaaatcagttacaataactaactaacaacgaaattaactatatttcaactaactaattaaccacctacactttcttctagaacctctaagacttctttatcagctggcttagtaaaatgtacaacttaattaatcttctcttccacattaacaaaacttatatatatatatagaacatgaattttgtcactcgagggttttaatagtgatgatgaagctctatttataaggtgttatgtagcccaattaagcttataactatggcctaattaaacctaattggcttttagatgtgagtaaaaaagataatttccttgtggatttacctgtccaaaatgtacccaaagttaatgtacatgtacttactatagatgcatttcccgaaaacaaatatccgtgtggataaaatacaacgttcgaaggagacgaatgtatatatatactatgcatgactcttgtttacatgcaaaatcctcttatgttttaagttattctttaatttttacttttctttaaaaaaattgaggcgacagttaaattttactatcaaatgttaaatggaattgtcactgtatacacttctatacacgtgacagcaaaacttcgaagccaatgaaaatgtcatgtatacacaagtgttcagtataacaatctagttagtatttgtcggcgaaatttaactgggcactactaaaaaaattactattctcgttagtcctcaaatcgtttttttttttggtaataaaattaagtgagtgtttaaaatcgactcctatagtagagaatagtcgtcaattttaaacactcaataatgagaatagtcgacgatttaaacttgttgactatactttaacaataaaattgaaattttattttttaaattggaattgcttacgactatactttagcctacggttctaaatcgtcgacaattccaagcatataataaactcctcaaaaaatttcatttcgtcttcaaacatcatttcagatccaaaccgtgcctcactctctctctggtgattctcgcatgatgaaccaccttgacgaccaccaccaccattccctctctcatcgacgactaccaccggtccaccaccattctcgagaaattcacgccatccctaatctcctctaccccaaccaccttcgtctccttgaagagaagttgactgcaacgcctcccacaagatctggcacaaatttggcagtcgtgtctgaaggggatcaccgcctctctaattccattaaaaggtagtgctttttatttgttaactttgttctataaatctatgcatatttaacgtttttttttagctttgatatgtgaaatgtggtatatgtttgtgttttgttgttagttttagttttttaatgttactttgatgagttcttgttcagcttgagaagcttgaggttgatggtgactatagtatgattttatgaattgagctcgactataatattatagcctatggtttaaaatcgtcgactacagtatagctgacggttttaaaatatagatgatattatagctgacagttttcaactgtaggtgatactatagccgacgattttaaatcgtaggctatagtttctactattgtcaactataatattatagcctaatactataacagggccctcaaaaatatataaaaaaaaatatcaaaacaagaatgccatagatttgaacccatgaccttggacattatgccattcacctcaaccaact

SEQ ID NO: 163487 - DNA, 1997 bp, Cannabis sativa
ccccgggcgttccaactgatacaattcatggctgtccgcggcgttgcaaagcaacgtccgctgagtcatcagagaattgcaatgccgaatcaagttgaggactagaaacaggcatagcaggaagatcaacaggctctgaaattacaagctgaccattaagggagtttgaacgacaacgtttcaacacttgtcggagagaatccgaagttatttgcctcttaaacattttgttgggattgctattctctttgtcacttggagttccaacaatttctttgcctttagaaggagtcggataggaagtgggagtgttaaaagaagcagtggatgttattgtagcaggagaaaaaatgtgtgatcgtagaggtgttaaggcagaggatccagtggagtggctattatttactgtaactggtggtgggtaagtggcgaaaatggatgatgtggacaaaaaaggagggtatggaaacacaacagtatcatcagatggggtatgggttgtggtagtggtagcaggggatatgtttacagaggtggatggagaagttggtagtgttgcaggttgataagaattatgtgtagcaggtaatgtagaggattctccttcagccaataaggtaggaaaaggcagcgatctagtggaaagctgtggaattgcagcagtgaaagattgtttggccaatcgtgtcattaaaggccaaacacctcctttggcaaaatcagtcctgtatctgtcataacctgaatctggtaaaggagaacctatcatggaaggaccatatgccagtgaaggatcattcccattgtagacttgttcaagaaaagcatgacaaagttcaaacggatgacctatcgtgccgcattcaaagcaaaattcaggcaatctttcatagcggaattctaaccaaaattcatccctcgagtctttaagccgaaccattttccctcgaaggagaggctttgaaatatctagagtagcacggaatcgaaggaaaggaccccatccttcatttaaagagtcttcatgaacatcaatataagtaccaacaatgtttcctgcccattcagcgatggttcttgacttgctaagaaatggtaagcggtggagttgtacccagaaaggagaaaaacacattgattctggagaggcaatttgcagagcagttggcgagcataaaacaatgtggtgattttgaaaatgccaaggttccataagtaagacttttttgagatctccaacacagccaaaggagacaagaaaaataccagaatgatgatcagtaatggtaacagggtattggcctttccagtgtccactcattttgattcgaaaggttttcctattgatttcctttgttgtaacaacccgagcatatagaacagagttctgctgtgtggaattagaaggaggtgcatgatggggtaggacttgcacctctttttcataatctgtgaggacaagggtgtgattcatatcgctgagtaaactatccatcagtattagatgaaatcaagaagattcctcataagtaaaaaggttagggacgataggtaggtggtgaagcatagtggagggaacggtttagactgggaaattcaaaaaaaggtttgaagttataaaaattgaatacggctgtaggatggataagcaacaaagtaggaggaaaaaacttaagtaaaacagttaaaatcaaaaagaaatactaactgccacagagctttttaagggcacactgctcactttctactcatacatcaatacaatacttcagcttttactatatacaaaataaagttaataaataaaaataactacaatgcactatttttttttatatttttataatttttcataaaaataacattaaaattatataaaagtaacatgaaaataatatttaaataacgttaaaataataacaaaaaatggcatacatatagcaaaaaatcaacaacaaattaacaagataacaacataaaaatactgtattttctgt

SEQ ID NO: 163488 - DNA, 1367 bp, Cannabis sativa
gtaaaataaattccaacagctacactgtcaaatctggctacttatttgcttcggattcaccagaggattcaactccgagcagttccaactcttctcaggactggtggcagactttttggagtcttaaattgccatctaaaatccgaatttttgcctggcgtgccttccatgatgttctacctacggctactaaccttgtatatcgacatattgcatcggatcgtatttgtcccctatgcaaaaaatttcctgaaactcttatccatgcttttttctggtgtacctgtgctaagcatgtttggagacaatctggtttgccattagactttgctttgtcccaaagatcaaacttcattattttcctgcttcatgcttcttcagtactctccactgatttgttggaacttttcatcacgatccttttgagtatttggacgaaacagaatgcggaaacacacggaaaacaaccaaagtctgctataagattgcttcattttgttgaatcttactttgctaataatcaataggctcatgctactccaggaaaattgcctctgcgaactgtcaatccatctgtcttgaactctgaagcaacaacaaccattgctagttcttcatcacaatcaacatggcgggctcccccatttggtaatctgaaactcaatactgatgcaaccatgaatgtatcagtagggaaatatggattgggagctattttacgagactctgttggacgtgtaattgcagccatgtcgaaattgatgaaagggcatgtgaaaccagaagaaatggaggctttagctattgcctaggtacttaattggatgctctccttacaactaccaataaacttcattgaaacagactctctaatggtagttcgagctttaaaatcatctgcccatcacctctcgacatttcattgtattgtaaatgatatcaattatcttgtatccaattttccacgagcacagatctctcatgtttatagatctcctaataatgaggctcacttgttggccaaatttgctcttacggtggatacagattgtaactagttggaggaaattctacctccacaattgactgttatgtaatttgtattttcatattaatataatggttttttcttaaaaaaaaaaagtaattatgtccaacctaaatttaattttgaatgtataaatatttattattgtaggtatatcgtaatgaatagtaggctgactattgttagttaagtccatctatccaaccataatctataatagataactataaataacaaaatgtatgtaaattaaaatcaagaaattacactctatattttttttttttatattgtcctcttttatttttaccctattttt

SEQ ID NO: 163489 - DNA, 1360 bp, Cannabis sativa
  modified_base (921)..(933): a, c, t, g, unknown or other
  modified_base (1000)..(1006): a, c, t, g, unknown or other
  modified_base (1213)..(1226): a, c, t, g, unknown or other
agagagagagagagggaggacggatgctacaattttgatggaggacatagcaatggttaggtttttggttaaccggccgtgagttcgcgcgatagagggaggaccgaccgatcgatgtctggattaagttttgggttcgtgagttttgtaatgttggtttgagaaggaggtgcgatggtaattagggttaaacatttaaacctgcaaactcgaaaatccaccacctgccccaacccgctgcaaaaaaaactaaaaaattaaaaacccgtgtggtcgggtcgggtctaacccgaaaatgctccacgcatgtgtcgggttcggattttaaagaaagacaattattaagttcaggtgttaatcagaaatccaaaaattaggcacatattttagtaatttgtactacaaaagctgaagggacagttttataattattataaaataagaatgtgtgagagagcctgtcttcacctctgtcacctataagagtaggccatagtctcatgccaagtaagtatttttaattcaatatgtctattcatgtcattatacatggaaaacaagtttgttagtttgttttattttttattttttatttgtactttccatccacagtgaaataaactccaaactttttattttatttttgtttagagtgcttgagatatttaaactgtacactatggattttttttatgcaaatattgatttagatgttaatccaaacccgaccacagcaaacccgccatacctaacccaaaatctgtcggactcgatcttccaaaaattgggtttggttgcacattttaaacacccaaaatccaaaaacttgaacacgaccatccgaaaatccatacatttgactcgtgtgtagccctaatggtaattgttatcccaaatattgcactctgacgtggcatcacnnnnnnnnnnnnncgtggagtccacttggaacatctgctcaggaagataggccgagcaggatgcctcgctgggatgtccnnnnnnngatattcagcgatccgtgcagagcaatccacacttagcgaattcaactttcgcatcatgagtcattagctcaatccctataactcagggatcaatatacgtggatacggcttacacacgatcccactatcagtgtactcagagtcaatcctacgatccttgcattcagcattgatcccacgatttttctgtttatgcgcattgtaannnnnnnnnnnnnncttcctcctcaagtttcctagccttataaatagtgatacatgttcactgggcaaggggaccaagagatcaaaagtcgatacgcagctaagctaagactatattattatctaagaattatatattcagacatact

SEQ ID NO: 163490 - DNA, 1996 bp, Cannabis sativa
gatttggcatatgattttccctcgtatctatgaccagaccgcttatgctcagcaactgcacaaaattacaggacaaatcagcatccgtaaataaatgatatgaaaatagagcaggcatacagctttcgcaattggtctgattttatagctggtaacattggacagaaagtagaaactgatatttctcaacattgaccaagtgtcaaacaatgctaaactaagcaacaagcacaaactaagcgcatttagaaagttttgggtattatcacattttgatttacatcaatcaaaatgcctatgcttttgccattaagtaatattaagcttgaaagaagtccaaaatttattaacacttccacctaaacttccaagtctcaaaaagatattaacaataaactaataatcacatttaaggattatatacagtcacaacatcaagcaattaaatacaacaaaatctgtagtattaatacctataggtgcaccaaatgcatccggcggcaatgaatcaaactctatcccaagaatcgggccatcttccctcaatggctcacccacttgttcctccacaatagcaatagctctaagctccatcttagactgtctcggctcatagtacctccttcctattggaggcatgtcatcacccaagctcctcgaggccacattccttaactcagcagaaggaccaaatgggctggacccggagcccgaacccgacccataatcactacccagttcggctccgactctcaactcatcaataggaggagattccggcatagctgctaccaccatcttcttctgttttttagcgggtcctccatcctttttgtccttcaaccttctgtgacaaaaccacatctgtaattgccgatcagtaagggctaatttcttcgaaagctcggctctgatcgtctccgacgggtaagcctccactgatcaaaatcccaaatatcaaatttattcaaaaaaacttgaaataaataaaaacaaaattagaaaaatcccaaaaaagaaataaacttgcaaaaatttatacatacaagcataagccttttctagggtttcaagctgaaaaggagtcttcatctgacgcttaggtttgctctgtccttcattagagctattgatcttgttattaacattatgatcattcttaatctggttttcttcttctgaggcagcctccattggagaagacgatcaagatctgagagacgaaagaactagggtttggggaagaagaaaaagagaaaggaatctgatttgttgttttcttttcttttcttttaacccaaaaacaccgtaatagtcaaggaacaaaaagggtgaggcttagaattatcatcataaaattatcaacgaataaaagtaccaatttttaacaacattcaataaactaattaaactaaaacaataaatgccaacccaaccaaaaaagaaaagttcgagtttttctgatgagattggtacgaaaaagaataataataatattaataataatcttattttccttgaataaaagaatttcaagacataaaaaatccaacagtccctcctcgctcttctaattccaactttcataattataattattaatttttgtttttgtttttgcttttgaattttattaattttttttgttttgttttggagtatttaaatgaatgggtgtgattatgtcaaacatgtgcgaattgatgagatgtaagtttaataggattgagaaagaaccccaacacccaaaatttgatttatatatttttttaaataaataaaaaaaatctttcaattttgttttttggttttttagtttttactttttgtttccaggtcagaagttgaatatgttcgtgttgtgtttttaattttgaagaacttatttatatttatatttatttatttttgtttatcccaagtcagcgtagtctatgtttggggaggcttttcgtttgtggttgatgttgggttttgttcgtccggatctttgggt

SEQ ID NO: 163491 - DNA, 1397 bp, Cannabis sativa
ctgttattctctctattctcatacttttcaataaatggagcaattccaaatatatagagaggttgcaataaatgttctgaaatagaaagagaaatgctaaataatagcaccagtagtgccttacacagttacaccctttaatggtaaactgaaaaaaccatctttaagtactagaaaattgaaacacataccactaaaatactctattgattgtttgatatattaatgattagagatattaattgaaacaattaatattctaataacaacataaataatttttggtatgggataacttaatagttagtccctcgaaaaatttagaataattatcttattattattgacaaatgatcatttattttttctctttatcgttttaatctaatttaattatattcaatctcttccaaacattacgtaaaggtgataattgttattgaagcaaattaaaaattatcatgaaagtatcatttacgaagattactataatgtacatgttattatttctttctttgttatatggtgttattattattatttgaaaagtaaatgaaaatttttattaatgggtaaatcacacatagttcattacattatctctcatattaatatgtatcaacttatacttatatatcaatttttaataaaatttagatagagacaccattttccaaagtagaataaaagaaaatttatcaaatctatcgaaatctataaaacaaggggttaataacaatttaaaatttcttatcactcaaaataaaaactaggacattgattgattcaataaaagagtgagaaatcaccattattaaaagcataagacactactgaattatatcaattctcatatcatatcatcaattttttcttgataaatttatttttattatttatgatacgtcaaattaaagtagatgccttttctgaaaaataaaaataataagtagatccacatgtcattttgtacgaaaaacaaaatttttgaaagtgtattagtgttgtttaaaaataaaaggagctattattatggcaagatttttttttttgacaatgaacattcattgaaaataattttaattaaatacattaacatcggaaaaaaatgtgaaaatatctatccaaattgactcgtcatctactctgagtatatacacgaactgctaattcaagtatataatatgaataagaaatgcctcaaaaaaattaaataattaactaataaaatattttatttgataatttttatctttgtatcatatttttttgcatataattttctcaatcctagccggatatatataaaagtgaaaattacatgaaatatgggatttcataacaaagttagaaaaatatggcatttttaagtttgccactcttctatggcatttttt

SEQ ID NO: 163492 - DNA, 1102 bp, Cannabis sativa
agatcctatgcattgccttgatggtataggggccagcacagcaatgcctgggaatatttgtatgtttaaaactcagcatttaatatactagagcatacatattatttttataaccaaaaaaaaaaaaaagaaaaaaccatatcccttttcagtttagatacacgcatgttcacttgagcaatgataggattttctttttctttgggagcagccaaaaaaggcttgaaagttcttgctgacgtatagtcttcatgtctggagcaaatagcagatatcattttttgaatttactcttcttgttctaaatcaaatttagtatagtcatgaaaaatgaatttactgcgtatggcttgtaatatttgacattcttattcatgattcactttattttgacaggccttttgtatactgagaatctgaaaggggaatgatttggacatatattgtttagaatcctaattgtctgacctagaaacactattatatttgaattgtcaatggctcccggaggcagcactttcaaagaagttcttgagtcccacattacaatatcagattatgatgtagcagtaaaatcagaatctaccagcacagttacaaagacagccgctggattgggtagcaaaaatggagtttattcaactaatggtgtgcatgagttacttgaatgcccagtttgcacaagtttgatgtatcccccaattcatcaggtttggtttacaattttccatttggctctcactgtttcaatcttatgttgcacactatcaatacattagatgaattcacaccaatcctataattgccaaattacttcaaaagataaattagttttcatcaatatttcattactccttagaaatgaattgtttgtaccatatccttgcaaaaattggtactaagctaattgattttatgattgaaaaatatacttttatgatcaaatgggagtgctgtagaagaaattgtgtaatttcgtaatcatgtgagagtctatatcaaggtgtacggtcttgggaatttgttatggttttcaagttctgttgtgtatgaatatataggccatattgagatagagtgatagaatatatatatatatata

SEQ ID NO: 163493 - DNA, 1359 bp, Cannabis sativa
gcaaagaatagtcgaaaagggcggcgtggcggcagctgcggcagcagcatcgatgtagtggagtgctccgtttgcttgagctcaataactgacgactccaaggttaggctgttgccgaattgtaagcatatgtttcatgtggagtgcgttgatatgtggctcggctccaacacaacttgcccactttgtcgtgctgccgtagagcctaaagtcccagccgagcccgaagtaaataatagctcggtggagagggttgtggttcaaccgtcggctccgccggtggatgagctgagtttgcttcatggagaagaagatgtgaataaagcgagtggatcgggatcatcgtcaaggccattaagctctttcagaaagatgcttagggagaagtcttctagaagatcatcgcttggtagttgttcggaattagttggagtgattgatcatcatgattttgagaggcagtaatactcatatgtatgttatattatacagtttctttttctttttctttttttaatttttggcatgttggtaatgagtttggagttttacagtagcatagcacattgtttttccagatgtgagcaataaattttttatcgatgctttggtgatgtgtgtgggaaatattttctgtaaattataccgatgttatatatgtaaattgtgagacatatttgatttgtttgattataaatatagatttaagtgaaaattacatcaaatatggttttttttcaatcaatatttgataaatataggattatttttttgctaagtataaataatatagcattatttggttgatgagtatttggcaaaaccccactacaagaaataatatacgttttcttagggattttttcttaaatatccaaataccactaattaattatatttatacggagcaacctatttacaacttcctttttttctttaaaggtattgctcaacaaatatttacaaacacaaataacaattcaataaacacaaagctatacaactatacccctcatatcaattacaaccttctgtacaaatttcccaaaaccgattcttatctcccatagaaattttactacctaatacacctattaacttatttaaacaaattaaattttccaaattgtgtgcttcaccgcccacaatttttgattccataatacctaattctttacctgctaaggacatttgctactaatatggacagcaacgtgcttttttagattttgctcagttttttggctttgggtatcctacacacactacaaaaatttaattgcattacattaattgcatacaaaaatttacaattcaaaaataatatgcaaaataatctttcaatactttaaatagatg

SEQ ID NO: 163494 - DNA, 1904 bp, Cannabis sativa
agaattatcatacattagaattcatttattgatcaaacatttcctagatgtaaattaattttgcatctaatcatggtgatggaggtggctcttttattacatatcaaaactggggttgattgacccataattgtttgcaggtgttggtacatgaattccaaatgtacatacttcatttagtgttcattgttgtggtatctttgatttgtagggaaagtgaaggtacctttgagtatgggaactatcagagagaggctgatgatctacgttctgtaatcgaacatttctttggagccaaccgcaccatcagtgcaattctcggacatagtaaaggtgcaatgattagtcttcatcttaatttggtaatcttttaatgaaataaggaacaagatttcataattggatgaggtattagtatcttttcttagtagcaaagatatatagagttcaccttagtctattctatacattttcatgtgaaattttctctaagaaaagtatgttactgaaatccataattgcaggaggcgatgcggtgcttctgtatgcttcaagatatactgatgttagtgctgttgtcaatgtttgtgggcgttatgatctgaagagaggcattgcggaacgctttggagaagatttcatgcaaacactaaaggagaaaggatacattgaggtcaaagatagaagaggtaaccattttgtggaatttgatactagctaggtcttgtggtacttaattggaccattttcttgatgacactctttcatggtaggaaccagttaccaagtgactgaaaagagtatgttggatcgtctgaatactgatatccactcagcatgtcttaagatcagcgacgattgcaggtgatcaaaatctagactcagcattgttatttgacatccgaacacttgttagtgcaaataaataagaatttgtcacttcaaaactattgctcattataataatgatatcttgtttctaacaccccatgatgctctataatatatattagcattcaaacctcttttattgactattaataaacttactatttctttttttgataaaaaaaatggtttgattcagggtcctgacagtccacggatcagctgacaaaaccattcctgttgatgatgcaatagagttctccaagataataaaaaaccacaaattgcagattgtagaaggagctgatcatcgtttctccgatcatcaagctgagttagcttcaatcgttacagagttcattaaagattccctgtagaagaagaactgaacaaagctagatgcctctggttaggtttatttactactcttttctcttgagttcacaatcaagctcggagtttgcttgaaaagaacagtgagagcatcatgatttactgtgtaaaaaataagattcaaatattttattactttagcaattatttttttttatacgtggttaatatttgtttgaattttatttttgacacatacataatttagaattttctgaatttaattccagacaagtacaatatatgattataaaaatctttgaataccaaaacagatatctggtttaccagaacattcctttaaaaaattatgatacataaattttcctattatatttcactttaaaaaatgcagtttcaattgtagtcggaagtggaatactaatgctcttaggctacctaaggaggctctttatcttatgaaaatgcatcgattttgtcaaatcgtatgtaattcagactttgtttcttgctgaggcctttctcattttaatgaaagaatttagattttcccacaaaaaaaataaaaataaaatacagtgtccaaacaaacaaatcatttaacaaaagaaaataattccaaaataatattaattttcttttatatatatacatttaattaa

SEQ ID NO: 163495 - DNA, 921 bp, Cannabis sativa
acttttgttaggacactcctcagtgggaaaaccaaacccaaagatacttcatctaagttggatattccaaccctctcatttgagagaagaaaaaaaaagacatatagagttaaatttcgtcgattcttctatagctgcacacatccttacttcctactgagtactcattttcatttgtgattcctagtaagtaatcaaaatatttcaacattcaaattcaatttttcacagggttcaccactgtggtagtattggctatcaagtcaatataaaataccctcagaaaaacccaccacctttaagctgtcacaatttctccaatgtcggtattgcaaaagagtcagctggaagatccgaatattcacttcctaactttgaaagccagcatgaacagagtaagtatttgcattaagtctataatatatggatacacaacatatgttaaatattttaatatgtaggcttaaaaatgaaaagaaaggagcaaggtgattttggagaagttcatagtttgaaaaagcaggctgttggaggagtaaatgtaagagcactctcgttgacttctttaccctatcctttataatacattactaaatattcaatttttctatttgacattctgatttttaaaatataccctctatgcttatctgttttttcttcatgttctttaaatgttatatttttttaaacctttttattactttttataggagtattcattagaccacatctaatatttttaggtctatccattatatattggatgttggattttgtctcctaatccgatctaattaatttcaatcatccaatcaattctagtagattggataagttttattcattaaaagtatttcatgtttttttattagaatagttcggatttatccaatgttttagatccaatatttattggat

SEQ ID NO: 163496 - DNA, 1145 bp, Cannabis sativa
ttttttgaaaaatatacataaaattaagcttaaaattatttaatataattttattatataattaatattcatatataaaatttaaaaattttataaacaactgcacggaaagcacgacattactaattaacttataattacagagaaactgcctaatcttctacattcctcattattttgtgtttccattaacaatatatttccactttctataactaccagtaccactacaagtaaataaaactcttttcttcatgtgttttacttttgtttagattttattcttttttattcttactcttatgataataaatatgcaagcaaagaattctattaatagccaaaagaagaaaaataaaaactgaaggacgtacttttctctcaaaaaataaaagaaaaactgaagtatgttgtagtaatactttaaacttgaagaaatttatttagtagctacactctcttaaaggatcatttcggtagatcctttatatatttcggcatgtaaaaaagatttagttcattttttttttcataacggtgtatgttgtaaatatatattatgatcacttataaatatttagaaaattccaaataatttacagtactcaaaattaattttaaacagatacttacaacgcgtataagaaaatatagtcgagcatgcaacaaaatatttaaatctttttcgacattgtaaattacttgaaatttttcaaaaaattacaactgatcttaaataactatagcgtacatgatcataaaaaagatttgactaaaagaactcttttgtatgcaaaaagagataggggtatgttaaaacacccctttatggggtgcactgtagaattaccttcaacttttaatgtgaaacgttggtgatgcttgattattgaccatcacctttgttgctatgatgtttaaaatttctttgtaacggtctaaacttgactgctcttgcccccagtgttgatttctttgtgactggggtggaaaactttaaagttttaatattgaagctatttgctgtgagtaagatagactgttgttgatgtgtagtgggttattgcttgtgtgcttggtactcaagcatgagctcactttacgatcataagtgagatgactcactgtcaatgagtagtgcagaa

SEQ ID NO: 163497 - DNA, 2615 bp, Cannabis sativa
  modified_base (2581)..(2590): a, c, t, g, unknown or other
aaaaaaaaaaaaaaaacagatagagagagaaaagcttatcagtgtaaaaaggagaaacagatctaaataaaaaaaaaaacaaaaaaataaaacagaacaaaaaattaaatctagaaagttatttgttagatgatgactatcatcaatttttttacttttatttttaaaatacacattactaaaattttactttctatattttatttcaaactgtatactatatcaaattttttaatatacatcactaaaatttaattttctaaaattttaatatattttcttcatttcacatataatattaatacttatatatatttcgaaataaaaagcaaaaaaaaaaaaaaatcattaaacaattaataaaatatatttagagcaatgaataatattctataataatataaaacatgaatagtaaattttatagaaactttaaaatagagaaggagttaagagcatctgatttagcgtgttttaatttaattctttaaatatttttaaaatttttttattttaaagcatttgatgtgaatacttgaagtatattcccacaaaaaaaattattcagtgtcttagcaaaaaatgaaaaattgagcatatatatatatatttaaattttactacagagtatttattttttctcttatcccatatatactgtatttacgtatattaataatttcatgaacaaataatagtaatttatgtattgctactgctagactaactaaactaaaccattatgatagtacgtagtcaatttattctcctttacttcaaatttttatgtttccctacactctctccttttattctctctcatcaaatgtaataataagatttaagagattttatggggtcgaaatcaaactccacataattaataagggcaataaacaaaggagtacaatgttttcaattccggaatcaacgtgagcttgtgtttttgttttgaatttttctccctataagattacattgaagggtttagagggtctaatcaactttttaaaggtacaattttcctatttgttgggaccatcaataatatagaatttcgggttcatatcccatgtgatttttttttttcttttacaactgaaaccccgatttgataatagtgcttaatatgatcgaaatatcccatataatccctttcaaaaaaaaaaaaaaatatcccatataatccaattaaactaatagatgtaacaatgacaacgtactaaaattaaaatgttagtagtgggatttataagtgttaggttttttttttcataatttagttatcaaaatattatttaagttattgtgaattaaatgatgattttcttgtgttaaatttattgttttgattgctctatttatttttaaggaaagttttatttacagttgatattttttgtttagaaaacttgttttacaagagaaaaaaaaatatgggaatttacctatttttagaaaaattgtctttcacttttctaaatattaatttcatttttgctacgtatataacaaatcaaataatttctatttagcatgtattgaagaccaaatcgtaatattggttccttttgaaaaattttccaatttgcagtagcagaattcgaatttgatgctacaaataaattttttttttttagaaaagtcttgtatagctttgaaaacatatgcagtagcacaatccgaatttgatgctacaaatcaagaatttttttttagaaaagtcttgtacagctttgaaaatatttttgtggctccctttagggtttctatattctataaataggacctagagccaaacattcctcatctcttgtctttttaaatctatctttgtgagaagagtgttttatttgtaaaaatttagagtgttcaactaggttttaattttcttgttatgatctcaatcatatactattcatagaataggttgaaaagaagctttgagcaagcgtgggtcttcgggagaagatttttccaagtttcatatcgagagaaagtgagcatatatcttcaagagaagatttgtttaagccttacttcgagaggaagtaaacacacatcattagttgaagggagttcgctatttggtgtgtttcagagatcagattagcaaaattgattacaaaggattgcaacaaagctttagagaggcctaaacttgtttaagtcaattgcatttgaaattatttgagactttactagttgatttattttctggacatggccccgtggactaggaatattcaaaagaacactaataccacatataattctcttttgtcaaatttttaaattctacactatttatttatgtttctgttttgtttctacaaatttatattctgcaacaacaagtttctatttactacagatcgtaacagttagaaaaatacatttttcaataaggttttgttatattatgaacatattttcttgccattaaagtgatattaattaatcaatcttgataattttaactatctccataatatttttcattacaattcaaattaaattccaatattctgagatatattttttttatttaaaatatatttgttgcccctgatttcgcccnnnnnnnnnngaccaaccggacagggacacgtgga

SEQ ID NO: 163498 - DNA, 763 bp, Cannabis sativa
ttttttttttttttggtttaaaacctttcaccatggatgcaatttttgaatgtctctaccaacacgaacaccttttttattggaagtcagtctgatttaaccatgaagggttgtgagtatacatccttgagtttattgggattatcaaaattaaaccatctttgaatttcttcaagtactttattattgacggtgtgtgtttttgctattttttcaaattaaattacatatgtagtttttgtaaattttcaagctgtaatgtattgcaagatgttaaaatcgtaaaaattagacagcaaaattgtagtgtggggcggtacggttttatgtggtttatgttatcattattatcgaacattataataaaaaattaaaaattaatctactaaagtttcaacaataaaaaaaagaaaatgttattaaatttttagtatcataacataataatcaagttattggatttatatatagatgtttccttgaatttaattatatggcttgagcattgtaagtatatgagttgatcatatatggaaaaagaaattatattgtaaaaattggtggttttataatatataatgtggtacggtttgatctacgattattgataaatgataaatacactccatcattaaaaaatatgtaaacttaaataaattttaaaaatttcttttaatatttttttaatttttttttctcacattaatttatgttaatttcatacttattttaatttcagtttcataatttttttctaactcat

SEQ ID NO: 163499 - DNA, 1455 bp, Cannabis sativa
aaaaaaaaaaaaaaaaatagcactattaaataacagaaaccaaagctaaataaaaaaatctacataatttatgaagaaatctttattacacatatcttcattctaatacaaattaaatatataattatatatatgtacatattaataacctatcatattatttctacataaaatcaatttttagttatatatatatatgttaaaaataaaacaaatttacatcataaattcagcagcatgttccttgtatgtccttcccaattaatataaataaatatataaatttacatatctaccttatgatcatgtgatgactggtttgtggtatgactaaaaataaattaatgaaaccaccaaatgaaaagaaaggaaattaatatgaaggttggtggtgtaggaatctaattccccaatctaataatcaatcttcgcagaatatttctttaacttgttttcatgcaaaaaaagtctccctctctccaaaccttattgttttgaaaaaagcttctttttttttttcttttgcagctttttgttagttgtccttaatattattttgttcatttgctgtcacctaacactcccacatacttacacacacactatacagaaaattaagtgcagagagagcgaagagattagaacaaagtaaaatatacattaaaccaatcctacatatattaataaatataacaatttgttataaatatcgattttataaagattcacatacaataaaatattgtatagtattgtgattattgggttcttttctcttttcatgagcaggaatataggaatggcatgagggaaaattagctagttgaatattatagagttcgactgcttgatcttggtgacttgtttaaatctggggaagattcttaagtgagactccaatatttatataaatataatgtatatatattattagtatcagtattaagtaagggtgcttagtgtgcaaccaatgggctgtgtttcattctattataagctttttaggtaataaagatggtggtccattatattctgcgtcataatttatggagctttggcattatgaaatgaaagtggatcccacattattaggccccacatcagtaccacactttgtgatgtagtggtctcttttgtttcaaaactttatacaaatcaattaacctgcatttgcatataccatttttttctagtatactatactatatattgtaatcttttaggattttcaaataataatgttctgcatgtatatataagaaataagcattggtaattgcaaatatcactgcaattctgaatatttttaagaggttaattaggaatttcatcctccgaactttgacatgtactaaatcatgtctcttgaattttaaaggtcattaaaaatgctccataaactattgagattgttagatttaaggacttttgtctaattttgataaaaaaaaaaaa

SEQ ID NO: 163500 - DNA, 5371 bp, Cannabis sativa
  modified_base (2420)..(2422): a, c, t, g, unknown or other
  modified_base (3371)..(3377): a, c, t, g, unknown or other
gtgtgggcggccaggccctacccaacataggggtggctggtcatgtacaagtatagactcaaggcttgctggccttgggtataccctctcctatggtatggccagccatgctttggctcattcgggactgcaactcaatcaaagaaggccaatcaatcaggcccctgcagcaataaatccttttgtgcaagcacagttggatccaatgtgagacatgctcaaaggcctaactggtccaaaaccttcagaacttgagctagacaggtcaaaaagaacaccaatctcagcatacatcaatgccttgcccttgcctaaattcaagatgctgacttagaagatgtgcatagagaaagaagatcccctagtgcacttgaaatactttgagatccaaatagatctcctatagtatctggagatgtgcaatgtcaaatctttctagcatctctagctgaaatagcccaacaatggtatttcaagctggccctaggaagaattgactattgggaagaattcccctaggaattctatgttcaattctctgcttcaagacaaatacctgcccaattggaggatcttgtcgaagtaaagcaaagacaagatgaacccttgaaggactacattcaatggttcatggctgaggccaccaaggtcaaaggtttgacaaaagaaggtcgatatacggtcatactcggaggcatcctaccattgagtgacttctaaaaagatatcagaagaatctcaacaaacagcgcggaggagttcctaagcgagctgatggcttcataaagtaggaagaagttgtctgacaagcccagataagagggcatgtcaatggtaaacaaacacagggcctcatagcgccccaagcactgcccaacatgccgaccagtgcagacaatctttgttgattctcaaacaatgataatggtggaggcaagcacaacaacgatggcttagaccaacataatggcaaaagagggagattcaacgattcccttatgccatgaagcccaatggagaaggaggggaagtgtgcatgcttcactctcctaacaaaactcccaaagaaaatcatgctcagacatcccagcagggcaaggcaacagtctgagggctggcctccacctctttccagttgcacaagcaggtgctaacaactctgcccaaacctccggtggcaggacacataggggtcgtcattagcggactccatattgtaggcgagaccagcaaagctagaaagcactatgctcaaacactttgtcacgagcccaaaagtgacttctcaacaagcaaagaacaagactctaagcaaccaaagattggaaagcccgtgatctctttctcaaaaggagatcctgcctaagtcagtccccacgcaacgatttcctggttgatactgcataaatttggaatatggttgtggcaagatacatggtggacaatggagcctccttcaacattcttttcaaaatcaagacatggaaaggcgatgttccaactccgtgacttggcaccctacaatcaagtgatgtatggcccctttggccaaggcatcacacccatcaggtatatcagattacccttcactgttggagaaaatccaaccaccagaactctgatggcacagtttgtcgtaatcgacgttccctcgaatttcaatgccatgataggcttactagacctataaaatctaaaggcaataacatccatctaccacctttgcctgaaattctcaacaaggcatgaggtaggatgtcgagaggatatcggcaatctgcccctcactattacaacttgaccttgtccaaagccaagaaataaaagatgcatccaccaaatcaggagcatacaagtttcatgacagacttaggcctatactgctacaaagtcatgccttttagggctggagaatgcaaaggccacatatcagaggcctgtgaataaaatgttcaatgatcctatcgaccgcaacatggaattgtggacgacatgcttgtcaagtccaaaaaggttgggggcatatagaggacctagacgaattttaaaatcctcagcagctacaacatgaagctcaaacccagacaagatccaagcccttttagacaagaagtcgcccacaactgtcaaggaagtacaaagccaaacaaacgcattgttgcactcagcaaatttgtgtccaagtctacagacaaatgtgtacccttcttcaacattctcaaaagcaacaaaaaattcaagtggagaaaggaatgtgaaaccgtattccaggagctgaagaatactccttgacaacaaatcccctgcaacaagcatgtttggaccaaattggaaaggtcctcaccatgttacaagataacagtaaaggtgcatacaagtctggcgagtacaacaagaacttgaagtcaaaacttctaccnnnacactgaaatagggaacatctcggtaagtactctcactagccaacttgtcaattgtttcattgtacaggaacccataaaagagctagtacccattgcttttcagcatggcctcccatcactcttcagtgatggtcgttgcacggtaagccgcgtagggggtacccactacgtgatttcaaaagcagacactaagctaaaagcttttgtttaatgtaagattgtgtctaaatcacttgctcacaagattaacttcttaaagtcactctttcagtttcacatatatcctatggataacaccccaagaaagaacccaggaaaagtctatgaaacttgaggaataacaagtgaccaaaagactttcctggatggtcgcttggggcacctataacgtacaatgcatcgaactatcgcaaagaacttatgtagataaatttcaatgcttataataagctactaaacctgcctctaagtcgttcaggcatacttcggcttgacaaagtaaattcagacctttacatgtcaaggccataagaagatagccaggacgatcatatgttcgtcataaaaggctttaaggctaaaacaatagtagtgttcgaaaacagaggacatataggctaaagcaagaacatgaaagccttaaggccaaatataaaatcgattcacatgcatgaggcgaaggccctacaagaaccttatagctagaaaagagccggacaaagctcttataggggccacgtaccgggctacggctaaggcagagttccttacaggctttaagccatgttgaatcttatgttgaacattcaactataatagactcatcattaagtttcatacaaagtttccaaggaaaccacgtatgaaattaaggttgtatatgcctatagagccagattcttgccgaagtcaaaagataacagaaaattggctacccacttggaaccnnnnnnnatgccggccaaggttctcaagccttgaaagagtcagttagggtcccatgactcagccaagaactagccagggtcaccaaatccaggcatgaacaggctagctttataacttgagataaaaccttctttaaatgattggcaatgaccttatatatcaccctgtagagcacattacacaaagctatcgatcttaactcccccattgtctctagattcttctttttatgaataagaataatatttttatcatttaaactctcctctaaaacacctatgagaaagaataattttactattaaagtaatatcaagaccaatattattctaatattttttatattttaggagtcataccatcaggtcctggagatttatcagggcatgtctaaaaaagagtcatttcctcaattggcttaaacaactcaagatttttcattcaagaaatagaattcgtaacacatcttcatcctaatttgtatttgaggctgagaacaacagattaaataatctgtcatcaactcagagagacctgaattttagcccacccaaaacccagcattattcttcaattttagcacctagttatgacaactccaggttgaagcaacaacatggaagtatttactatattaatctccttcctttaatcataattatttaaaagttgctgccaaaatatttcacgttgtgtcaatatttcttgcatcttaagacttttctctttatatctcagaacaactttaagatcatgacgccatttttaagaaacttcaatctacctttacaatcctgaacccctctttaaaattcatgtgatatcgttactccaaagtctaaaaataccattacaatatctaatattagaacatataggaagactaacacaagtagcccaacactcatcaaccaaacaaaagcaaaggagttcttataaccaagcattctcaaactagaaacgaggcgcataaagactagaaacactaacctccggtcataagaaaatcaaacaatgagcaataattgaaacttctaaagtttcaagctttgcgacatcaaaacgatgaagccaatttgaagtgatcaaagccctgtccaaacgagcctccaaccaaccattagtttcccttcccatctcccaagtatacggatacccaaccaaatacaagtctaccaaactacactcttaactacctcatgaaagtcctccgctagccaattgggatacagaagatcccatttttcttcattctgaatcaatacattattaaaatcaccaattaaacactaaagaagagaagatgtgtctttaagagtatgaagaatagctcatgtattcctcctcaaagctctattaagttccccataaattccagttaaatgatacctcgcattatctgccagagaaatgaacacatcaatataattaatagaatagtaaatcaaggacacatcctccttatttttccaaaagaaagcaacacctccattcctaccaataacatcaatggcaacatcccctgcaaataactttgttctcaaatagttgagctcatgattttttttaaccccaatagattgggatcatttgagtaagtgtaggtacttaaggcacatattctcatttctgcaatattagaacatattcccatttctcattcttttgcaacattagagggcgatcatgttctttgaaaggataatttctatgaaacaacttcatatgaacagtccttagaaagaaaaaaaaacaaaacaaaaaaaaaaaacttcatatgaacagtgggtatgagtgttcacaatgttgatggtgcagttttcggctaatttttttcaaccaaacactacatgcaatttgagtaattttttaaactgcaactgcactgcatcacataaatctcaaaatgaccacactaaaattttttatggtgtggtcagtttacactaggggtgttcacaaagtatctgatccaatccaatctgcacgatccaatccaat

SEQ ID NO: 163501 - DNA, 969 bp, Cannabis sativa
acgaccatagctaataacgaagagactattctcaatagaaaatcgcaactttggagaatctcaaaaatcaaaatgaagaagtcacgtatgcctgcgttctctcagcaaaaaagctatacaagagagagaatagacaaaacacaatcatccgtcttgttgtctttctcgtcgccggaggcacaactgatcaaagaactccaaacgacatctctatgcctcaaatcagaaacggaagcactggaggtgccaacacagtaagaaaacaaattaaattttcgcattaaagggggtgcagcaatgtcgtatagcggataagagcctgaaatgtctctccctcctttcatgtcatttaaagagaaagcacaagaaaatttattgattaattacaccggcgcctctgctattattcaatatatacgtttgattgataaagggataaaagctgagtaaccctattgggccataaagtaaaaggagtttgcttattttaaaaggcccgaaggcccacatgatgatccacacaactaaatgaactcatatctccattttggatattttgtatgtatcttcaaacaaaatgccatagtctgacacgtgatcaggtgcaacgtttctttagtttaaccaaattcaatattttagttaaataattgtttttgtccttttcagattattatttattaagttctaaatatactgatatataatgaagttatggtgaatgaataattgatttgacatgcggtcaccttatttgcaaattggagagtcaaacttgacacttgttttctccataaatcatttgacaagcctattattgtgcttatttaattgtgaaattggcgagcctcgtgtgtgctcatttttgcattttgctattgtatttctatttgcaaattggcgagcccaatgtgtgctcattttttgcaaaattatttgacaaactatgcttatgtactctcaaagagg

SEQ ID NO: 163502 - DNA, 925 bp, Cannabis sativa
atattacggacgtagattttcctttctggggaaaatcaaggccgcaacattgtggctatccatcgctaaaactcaactgcgaccgaaatcaaaccacaatcgagatatcaaacatcaaatacaaagtttttgagctaaacaagacttctcgtattctaaaaatcgcacgatctgacttctctcgaggaatttgttcaccaggatcaacaggaaacactgacttaattccggggctccttgaatacgctccaggctctggaaatatgtctcttttctataattgtaccaagcctaatgcttctagcccttattctatggagataggagatttcggttgccctaatggctccttttttaaaaacggttactatggttatgaaacggaaagtagaatatgtagttggaatgtgagtgttgggatacaactacaaggaattggatatgcacaagtagacgaagctatcaaacaaggattccaagttaggtatacggaagctgctgaagtctattgtagggcttgcatcaataatggtaaatccaataatggagtttgtgattatgacttcaattcaacccaattgctttgtcattataaacctcaaggtatgaattctctatcaacaaattcaattaatttatttaataatatcttccatgaaaaatagtggatggtggattttttatttaattattgatatatttactttttattagttcattaatattctataaataaatttttatgggtctgtttaatatgattcaaaaatctaaaaataaaatagggatcaacgaatacatatatataaatatactagccaaaaactacgtgcgaggcacgtataataaatttatgctagtttttttctatgttatttgaaagtaatataattaaaaattaaaaaaaaggtattattaattatta

SEQ ID NO: 163503 - DNA, 2127 bp, Cannabis sativa
  modified_base (1080)..(1088): a, c, t, g, unknown or other
ttatttaccttgaaaatgtaaatggttatttcgtaagaaaggtcatgagggaaggatgttgggtagattgctgcgccaagagctatttcattgctcgtttgaacaaagcctgggcatgttagatcaaagcaaccacttgtttttgaaccatcactctgtataaaaaattattattaataactatatggctacacatgtttcgatctctccaaattaattataatgaattattattaataaattaccgtccaatatacaaagaatcgagtctgtctgtctccataaagacgcgggtttacctgattatcatcatgcatgatataattgacacaattaattattaattcataagaaaaaagagagttaataattaattaattaccgcccatcctgattcgacgctttcgtaatcatagtaatcaccattggagagtgtaacttgagaagtggagtaatcatcgtctttctccacttgaggataacaaactttgatgtctccttttgctcctaaatatctataccctactgtaagcagtattgccttctgatcgatcgatacaaaatgtattataataattaaacatctctcatatcatatgagtcagttaattaatattatatatgacttaattaataataataatagtatataatacgtacgtaccgagtggtttgtttgtagaagagacaaattattgttattatgtgaatggtgtggaggagttttccttataatattagcagcagttgtagtaagtctactgttgattattcctcgtcgaactggaatggttccctttggacaactcattccacttcttttccatacttgactaattcttatttccctattattaatatcatcatcatttctctctgcggccttattatagctgggtgccatctgaatattaacaatattttaacattaatataatggggactcccaaaacattaatattttaacattaaatataataaattttttatttttacactttttttttttttttcattttttagaattctacataaaaatttctattacaactagcgttgcaacttaaattgcaacaaaannnnnnnnngaaacccctattgcaactagtgctgcaaccatttaagaaactcaaactataaattttaaaaaaaaattaaaaaaataatatataaagtaatttcggttaaatatatatatttatatatacataataatatataatattcccatattatttattaactataaaatagctagattaattaataaataaggtacatacgtacctggatggtgtgattacgtagggcgggatgatcgaatgctggctgcttgtacaaatcaatgcagtcaatgatatctccatcttcactctccacgcacaaatatacaccaaattaaaagtatagttatagttaacaaatttgtctaccaagcgctagactaatcgaattaaaaatgaaaatatttatatttgggccaaaaatattacagaaacatgttaaatacatttatggataaaaaatattgtgattattatagtccatctgaaatatattttgtatgtctgttacatattttgatgtatgtatatatatgaatttgtaacatatatatatatatatatatattagtatttatatgtacctgtatggtcttgatcatgtgggaattgatcgttttggtatcaactttgggttgtagtgtggaggagtaactagcagtactggataacgttaagagactaataataaagctaagtattcccaacacttgtatctcaaaacaccacatttttcttatatagtatatacagtatattattttagatgtaaaacactaaaccaaattaatatgcttcgcattgcatcacttcaagtctacatattaatcttagattacacaaaatattctattctctcgagaaaactaaggctactttacatttggagggagactacactttaagatgtatatatattaattcctttaaatattagacgttcaaaaaattatttatgtagtcatatgtctatattatgaactccgtaaacgttgcatgattcaccttcaccttataatcatcaaattttcatgttcaacattttttatatatatatatatat

SEQ ID NO: 163504 - DNA, 3154 bp, Cannabis sativa
aaggaaaaaaccaaaaacaaaaaacaaacaaactgacattcaagtgaaatcttatgcatcaccataatttttatcaaatttataatatatgatcgcaaactatcttaaatatcatttttgcgtcaaaactcgagattttatggtaccattacaaatgcatcgttaagtatcactattgtatcaaaattagatttccattgcacggtatttttttcaaaaaatacaataataagtaaaattttaatcactgaacagtaatttagttataatccaaaaatgtataaactaatgggtatttttgtttcagtgagaaaaaaacaaacttgagagagagaagagaaaattatatataaatggaataaatggcaaaactttgttgaaaggtacatgttagaaatcacagtactattttggctgcaaaataaaaattatagtatcaaattttcctatgtttatcttattgttattgacatacatttttgaaaaaagaaattaataataataatttcatatgtgtaaaaaatggataggttgagcgttgagggaaaaaaaatcgtacaatttgaacttttgagacactggtgagtgggtaggtattggtattcggaatcgttgagcactgatttcattttacccgttttcgaattcagcatttttaggcaaaggaaaattaaaaagaatctattcaacaaaaaaaaaataataaaaaatttgatcatggttcacttgacatctattcggctatttagcatttctgaaaaaatatatatatttttttctatgaatcatatgtattctttttttaaaaaaggtaaaaaaaaatatgtatttcagttcttaaaattttacatttgtaataactcataagatctatatattatttagtgagaaaaacatgttaatttctcgaccactacagattccatttatttttgcaataataatttggtctacatcgatattaatcgcagtgtatatgttccacatttatttattaacttttgggagttatataagtattcagttttaaacttacagtggcaaaaacgtttattattgcattcacccgatctatttaattatttattataaaaacgtccaacgctaaagttgctcaatcttaaaaaagtaacttcataaatttttatctattactttccgtgaaatagtaaataaaacaataaaacacatattataattaatgtgttgtcctatttatgccccttaattttaacctaaaaataatttaaaaattagaaactaaaagaaaaaagtatcaaacctgttgaaaatagtatcaagataaatattaacgcggctatctttgaagaacaacaccatttcggtttggcatgtgtgattagagaccacaatggttttcttttgaatgctcttacgaagctgtttcgtggtactattcatcctatggtggcagaagctttaagctttaagctttaagtatttcctttcttcttcatcatactttcattttcctacacttccacacaaaccaaaaaaacaaatttttctccttttcaaaaattaaaaacctactcaaataaaaatcatacattacaatacatccatatttcaatttaattcaaattcaaaatcaaacattaccatactgatcacatccaaattcaaaaccactaacaaaataaaaaatttatccaaaatatctgaaaatggcaagctccatgaactaccttcaacctcccaacccaacccaacctcgtttacccgcacaagcccccaaacctgtcgacaatgttgctggagtctaaatttgggataagatgaatgagattttatctcaaaatcaattgacaatgagaggagtagctcattcatcttatatatggtaatttattttcacacattaaaaatgtgagactaattctaatactctcctcacgtttgggcctagaaaatataggtataacgaacgacctttaagagaccacatgaccaaacgtgacatttaaaagaatcccagaaggccaaatatcaagaaatttgtggatgtacacgtcgggaaatttgtggattttgaaacaggtcaaagaccccaacactggaaactggcacacattggctgaaaggtcccaaatagagattaaaggggagacaacagaagtatctttttggaccgacaacactttggctcacaacatatcacaaacggctttttttttaagcggtggcatttgggctcacaacggatcacaagtggcgatgggataagatgaatgagattccatctcaaaacaattggcgatgggaggagtagctcattcatcttatatatgataatttatttctacacattagcaatgtatgactaattctaatagagtctcatttcccgtcagtacttctttcattgatatctcaaaccttccttttttcttttacaaattgatttgaagaagggaagttgaagaaaggaagaagggaagttgaaaaagaaaaataaggattaagagtttcttttttagataaactataaattcggtttttatttaaaaataaaaaaaaaataatttttataataatttttatttttaattcataagaaaaaaaaactaatgtatatttttttctaatattatttttaaggtttctaaattaaattaaattaaatgggcaagatagattaaatttatcaatcactcacgtaaaaaaaataaataatactaactttagaacaaaccaaagcaaaagaataatgatctatataatgtaaaagtataccacccacaatgatattttaaccatgttggacttttttaacatgactcttttattaccaaaagcataaaaaatattaaaaaatatgaattaaaaattaaaatactgaaaaatcaccactcgtcaaaggcaaaataaaaattaaaataaataattataaaaataacttttatatgaaaaaaaaattaaattattttattaataattattttaaaattgacaaatattaaaaaatacagttttgtatttactttgaaaaaattacatttatttgggcaagattaagtttatcaatcacccacaagaaaaataaataatactaactctgaaacattcctcctaaaaaaacacttagggaatagaatggaaatgcttttgggaataaacaagcctctcaata

SEQ ID NO: 163505 - DNA, 2009 bp, Cannabis sativa
gaattcaagccacacaggggcagccataccattgaattgaaacccagtgccgcgggggagaggttgggttacatcaagctcgatacggactcgcagataggggccccaactctccttaagagaggcagtatcctcttcaatataacgccctagcacttcaccaaggcgttgcgcaagagcccgggatcgctttaagaagggaataccagaaacttgtaaccaaaagggtgtagaagtgagcatatcagcagtgactatcgagcctgcttcaagcggagtcatgacaataagcttgtagccgaaatgccacggttggccaatgagaacccttcgacgatcaccaaagcatccgaactccacagtgaaaaagttgggctccttctccacaacattgatggtgtaacgctcagaccacatttggcgaagcctctgtttgaaagcatccgaattaaaatggcgagtggttaacagcttgacagcaagaaaagcggatggctcctcacgggtatcatcttcagaatgttcagtggtgtcaggaaaagcatggattggataattattctctacctttcattatgtaattttgtttggcttctttgatatttaatgaaaccagcaagtactcaaaataaataaattataagccaaaatatttggctcataaatagtcactcctctagtccttttcctttttaaaatataaattaacccattacatttacttgttgcaatgggctacaactaaaaacgcatttcatacttcactatgaataaaaaagacaaaaagaacaatgaaaagttgaatacgacacactcatcgtaaaaacgacaattagatcaacaaatcaatggcagaataataatatgtttcagataaaaacaagcaaaacaaaacaaaacaattattagttcacgtaaccaccactatatttttaacgctatttattatgaaatctatgggattgcatgacaattatttattgattaaaattagaattggagggtttgtccaaaaaaaataaaataaagtaaaattagagtggggtggagtagaatggaggaatcttatcttaactagcatcagcattgactatattgatacgtaaaatataatttataatttgtagttccaaactttaattaatttagatcaaattatttgacaccaaatcaaataaattcagtatcaataatttagctaattcagactgtttataattctctgattctgtcattgtttaaaaattctcgatagcagttcaaactaaatcaatctatataattattttatatacttaatatatttttttcttgacggaatgttggaatttgaaaataaatttaggtagaatattaatattaatttactattgtaatgagaatatttttttattattgttatttatgtattataaatttattaaaagtgaaagaattactaaaaagattacaattactataaaaaaaaaaaaagaacaattacgaaatacaaattatagtttgaaccaaattaattcgttcttaagttgattcgtttggtttggtttgatcatttaattgatctgattaaattttgaatttttaaaaaactataatactggtttatttttaaaaaaattgaaaattcgaaacaaactaattcgtgaacacttgtaattatatgtatagtgttcagtataaaaaatggagtgtaaaaataatatatttttagaaaagaaaaaaaaaatcaacccatgtctcacaatagtcaaaaattgttattgaatataaaataaaaataattgatgaaattatattgtatacttatttaactttatttgttttaatttttatctttatttttatattctgtaagatataccaacttttatagataatgtctctattatacttctaatattaatgtaaattatgtgttaaacttaggaataattacataagacactattttttataaaatatttacatttttacgttcaaagaatattttttttgtttacatttttacg

SEQ ID NO: 163506 - DNA, 1925 bp, Cannabis sativa
aaaaaaaattaatattataattttctagactctagatactaattaattaccaaaaaaaaaaagactttagatactaattaaataaaaaatgaaattacaagaaagaagactattataaaactaccttacactaaatttacagaaattattaaaaagttaaaaatatttcaatataatatgtaagttttttcgtgttgtcaattattttaaataataaaaataaaatataattctatctattttaatttaaaccacacataaaactatatattttattaagagagtaaaatttaaggttcaaagtttgtcggattttatacacaggagatgaagggtctgaaaaggtttatagagtaagtgaaaatcgattaaatgacaatcttaagaagaatctctcgactacttatgatcaaaataactttgtttttgattgaaaagattgccaaattcgatcttgaatagattgaaagagacttttcaaatttccttacgaaacaagataaactcaaatactattcttggcaaactagctattccattaacatgatagttttggtagtagtagatttagagaaattaagaatttgacctaaaacttgactataccaattaaggatttccttgaatattaagcaagctcatgaacaaaaaccttaaagaacacatattgatgggactattctaccacaagagaaactataacaaacttgagtaacaatctttttaaacaaaaacaaaaagacgttaacgcaattcaattattacattatcagtaacgagagtctgctaaaaagaaaagcaatttgctcctcaaaaatgacatcaccgaagtcgaggagcacatttttcatccaattaattataactttagtaataatattataaatgacattacacaagttaatagacttgaaatcatttacatttttcgataattaagtattttcgctaaaattggaataacgattttgttgatactttgaatattttcatgtatgaacttacacaatctcaataaaaataacctagcttattatcatgatatcccaaatctaaatgccatgtatataggcttcaataagattttttatttatttactttttcaaagaaaaagattcatttggatgattttaatatttttaggttattctaaaggtcctatttgctacatcattaatttaatgtgtttaattttcttcttttgctaagaattgtgaatagagtacttaactgaaaattgataagaaagaaagtactatgtagtagttgcatgtcaattaattatgcttataatatctgtgaacatataaatattatacatacaaattggtatatatatggtataagtagaagttatcactatcattacagcaaaagaataaccaaaaataacatgttattatcaatgaactgactcatcaaaaaccaccacaatgaaagcagaggtgacacttgagaaacatttacaggaccacttaatatatatatctgcatcagatcttgttcatatacaaaatataaattttatataaaacaaccactatatattgttgtttctgattccaaacaatgaccaagttagcctaaaaatttatggggctaatacatataaaaaagagtaaaactccctaaatcctgttagtaatttgtcatttttgcttatttggttgttataagatattgtctacataaatacataaatacaatgtataaatgacacaatttaattgagtcatgtaaataaattatttataaataaaattaaaatttaaaattattacttttaagtaaaaattaaaaattaaaaaataaaatatatatatatatatttttttttgtctttttgtcttttttttttttttttgaaaattctaaggtgacgtttgattaggaggaatgaaaatataggaatgagaatgggaat

SEQ ID NO: 163507 - DNA, 4479 bp, Cannabis sativa
ttcgccttgccttgctttggtttcattacaaaacatggggaaaatgttaaattaaaacattaggcaatttcgagcaccaccagaagtgatagtcaagccatattccattatgtcttataattaaatattaataatgggcaatctatcatggagatataatatcatggtcgtcttaaatattttggaggccctgttctaatttaaaatttgggccctacaaaataatgtaatttataaataatatttttaaatattatcattcagttatatattttacaaaacaccaacaaattccaactatttataaaaattgttattgattccaatagaacaaaaaaaatataaaaaaaaaagaatataaaaaatttgaaaaaaataataaatagcagtaatagatttttttttttacttaaaagcattaatagaattgaaaatgagctttgagtattgggatagaaatgactaatgacaaattgttagctctttcaaaagttaggttcattaaaaaaaattattaggcattaaagaaaacaatatattgggccttttatttttttgggtcttgtgcagtagcccattttgcactccatcatggccggccatgtataatataagcagatatattgatctcatttatgattatgaacatttttttttaaaaaaaaaaaaacgataaaggttaaattaaaataataaatgtaataaagttacgcaattagtgaataattttatttcattcacagtctttcctaaggacatgcagagatatctagaaaaactagataataaaaccttaataaaaaaaaaaatcaaaattaaaagttgtgacttctgacccaccaataaaataactacaaaataaagaaaaaaaaataatatataacaaatgttgatggtgaaaattcgtcaactaaattatagccgaaaaatcaaaacttggatgtaagacctaagactaagatgaagatttggaaatatggaaacttaaaaaagaaatgtaaaataactatggagaaagatagaagtgtatatttctctaggtcaagtgttataataattttacaactccctctcacatctgagaatagggtatttataggctctaatggcctggaatacacttgttgttctcaagggacaagttaggcttatgtggctgtgagttgcacgtgcaggacaccttgtactattgttgggtgtcggctggtcccaaattttggagtagtggtcgtagggtacttgttgtcgggagataaggggctacagaggaagtgcctccactacttgtaccccctcgtctccaagtcacgttgaaggtgtgaccgtactccatttcgtatccttccgcttacatgcctcgtctttggattcctctcctaatggttttctctccaacacttagccaaattctcacacactcatcactcccacgtctcgcacgccccacagctcccacggacatctcgcaccattgctcgcacgcaccaccgcttgtagggaaatttcacaccacgactcgtgcagatgtctcgcatgcaccacgactcacgtggacgcctaacaccacggcttgtgcagacgtctcgcacgcaccacaactcgcaaggacatctcgccccatgactcacacaaatgctccacgactagcaaaaatactccacgacttgcacaaatgctccatgactcgcacaaatgctccacgactcgcacaaaggcaccacaactagcacactttacttgtcttagtgttttggccataactttctcgatatatgtaggaattggatgattcaaaatgctttagaaagataggaaagagatctatggatttgatgttcatgacatgatctaattctaaatgcatccttatgaaaatcctctaagagcttccacttattaaattggccttactaactctacttgcgcccacctacctccattgaaaataccacaaacaatcacaaatgcacgatggacctttcaaaatcttcatagagtgatattttctcctttgtgctttcccaacttatctaacactctgcttgcgggcgaccatgaggtcgattttcaaaatgcttggacaagtctctgtggatcgtaaatatcgattcttggagttaacatcaggttaatccctgactaatctcgaaggttagctttgctaatttttagggttaacaacaaatatttaatacaatataaaattttatataaatagtcacatataattctctcatgtaaagactagaccttatttattctcatctccattgttgaaagcgactacaatacatcttatgtgttattattagaccaaaataaccttacaaaatcaaaactagtaatataatggctttacaaaactaaaactaatcatactagcctataaaactaaaactagccataatgaccttacaaaaccaaaactagccatactgatcttacaaaaattaaaactagctacatttgtcattaaaaaaaaattttagccacattttccatacaaaataaagctagccacattggccttactaaataaaaagcaagtcatttacaaaactagacatattgccttacaaaacaaaaaagccacattagccataaaaacaataaagctcatctgattatggaacttttttgattcaccattatgcttataattaaataattaccatttatgaaaatatattcaccattttttttagagaaaatggaaacatctattaataggtaaatcggacaaaattcattacatgaaaatatagctcaaagagcaaaattatgaaaattagacatacaagtcgtttacaataatatgaaagaaaaccctaacaacaacctcaactagggatccaataagccactagcgatcaagcattgaagatgtgtaaaactaaatgaacatctgatggaattcacctatcaatgactatcagccaatgatcttctaataaaattgggacataacaaccctattttccaatcaatctaggatgaaaagaaataatcaaacgaccaaccatagcgataacaatcgtactaaattaccattactacaaactgtacttttcttatcaattttaaactgacacttatacttttagtattgggtttgtgacaaaaggtcaaattttttgtgtcggttctaaaccaacactattgagttttggtgtcattttacaacagacactataaagtacacatatatgttttttcttttagtttcgatttaaaactgacaccattgaattttggtgttattttataactgacactaaaagaacctgatttgtccggtgttagtacaagttatctataatatgaaagtattgcaatccgcctttggtggtgacgttgaagattataaataatttttatcttcttttaatatttttttttttaatttttgtcaaacgatatgctaattggattcttcaccttgtggctagacattctaagttatatgatgattgtgtttttcgaagtcttatctcccttctactgttgttgtcatcatagaggccgaattagtctaattgaataaaatttccaattcaaaaaacaaaaaaacataaaatttataaaactgttgattatttattaaaatatgttttaataaaaatattatattattaataatttctaaatcaatggtatattaaacatatacctaattaaatttataataaatcatactaaaataaacaataaatctataaaccataataaaaaaaaaataatatatttttgtgtaaaactattaattatttatttaattttgtttatttattttttaatgaaggtcttatatttataataaatcataaatttatagtaacttatataaaaaaaaattaatttaataatcttaatagtttaaaaaaaattttaatagtaatgtgaaaatttaagaataaaaatctttcaagaattatataagtagaggtaaaagcttatccaaccggaccacgtcagaataaagatttccacccaaccggggaaagaaattgctataatgagtttaattcggttgtgttccccaaataaaggaaggatcaaattttttatatattttgtaaacatttatttaaaagagaatattttaggtgaaagtactcgaataatatacgactatctgtgcacttaatatggaccattcgattgttctcattttggatcatgatttcgatttgatcgatgactcggagaccttaaattagaatattttaattttttttttaaacaaataattgggccttacatgcgtgaaaagttggatcctttatatgaatgaatgaatattatatatataattgaaattgtcctaaaatttagaatttcaagtttattgatttgaccaagacttgaccttaaactaatatataaattcttagagcagcttcaaggagactgcaaattgatagtttagtgtatataattgatccaaaaaagcaccaaattgagcagcaaattgtagga

SEQ ID NO: 163508 - DNA, 1615 bp, Cannabis sativa
  modified_base (1295)..(1295): a, c, t, g, unknown or other
cacataacaaatgatttgatgagaacatataatattggatatatgcccaattacatggtaatgcattattggttcatgtgctattatagccacaatataatataaaactataaatgcaaatgaatatactggaagggaagattcctaaaagagtgacaagcagctatatatatttatatagaaatatataaatatgtagtgctatgatacatatgaatgtgctgaaattaaatcatacgtaccgtactaaaaatggatgaggatgatgatgagtctgtatatagtcgtgcttggtgatgatcatatggtcctcccgacacttgagggaataaatttaattcatagaaagtgaaagggaaaggaacatgcatatacacattaacatatattctactcttctcttctcttaattcaatatcactattttcctcagcgatatgtatatctatatatatatatatataaatgatacagtttgtgttattttgtggtatggtataactctctaattaaatgtttggttgcaaaagtaagaaatattagatatgcgaattcaatataaaagagacatatagaattgacattgacaaagataccataaaattacacaattatataacatgcattaattccatatatatcaacccatgatattttcaactgcttttatatactatttaatgtatataaaatacattaataaatattctattggatgcatgaagtagtaaaaagttattaatctcttttcttgttttcattaattttctttttaacttacattagataaagcatggactacaaagcaaggcattacaaaaaaaaggtaaagaaccatttcaaattaccgactattttataaaatgccactgttactaatatttagtgacattttatatttcactaattgtgctacaatgtacattttataaaatagtggctaattaacacaattatgaactaccttattttgcatgctattagaacataacataccaatagtcccggattgaaagataatgagtatctaatacactttaaacatccccaagaacagaattacaacaaattttactacaaattaagtttatctactaaagctttacaatctgttagagccatgaaaaccggcatccaaacaagctgaacccaatttatatagtttatctactacatatacaatattaccaatcataagctgaatgatacctgcccattattttaagaatcagtgaccactacactcaaattgttttcatgttagttacgatctttgtttaatttttttttttttnttttttttttttttttgtggttatatacagaaagttatatgtgtatatatttacagcgtgatcataactatatattcgaaaccaaagaagaacttacccgggaatgagagaccaaatccgtgtacgcaacaattgattttggcgaaggatttatagctttaaattgatggtcccacataaatttaaaatttattaagaaagttggcttggaggtcggggattatatatcattttactaatgttttaagaaattaatatatgctttattttacaagttaattaaaatttaagtttaatatgtatattgttggattaaaaat

SEQ ID NO: 163509 - DNA, 1528 bp, Cannabis sativa
  modified_base (1484)..(1496): a, c, t, g, unknown or other
aggtcaatgcacttgctgtcagtgtggatgacatgtgtagtgagttaaaatcttgaataaggttttaagtatatctctaatttttgagaaaggaatgggtatcaaatcaagggttaacaatggattccttcatatgcaaatggatagacattttgagaagattacttagataatagaaaacatgtcgcgatcatgtatggcagatgatagagtgttttggaataaatttattctctaactaggtttttgtttgatagtagtcattaaagtgccattggccaagcactcttagaaatatggtatgaaaggtaacaatgattaccggtttactggaatgaagtccatgagaaagtgcacattagacgaagagggtccatggaactaatacgaccattgagaatatctaagctcatatgctcgccttatagagtaaacagaaaaaagcttcattgaattgaaacgtagggataatgagttccaagtggggactttgtgattctctgaaaggagtttagagatttagaaagataggtaaataaggtaggacaatgttaaagcatgtttatgatttaattacatgccttagaaatacataacaagatgattctattgttgaaagtgctatgatgtaacaacaaggttaagaatgcgacttgtgagttagagtcgcagatttaggaactatctcccgaatggttcacttaaattttgaggatgaaatttctattaagaggcgatagttgtaatatctcaaaaatataattatgtataattaggaaataataaataagattatagtttttttttatcgaagaaaaatgaattccattaatcaccaagtaaataaaacaacaagttacatcataacagactagcacaatccccctgcccaaacaagtgcctatttacaacttactgaagcatgaatctatgcttaggcaagcttagtttgcaccaaacgactctagtattcaaaactaggtcataattcagcaaactattatacaacagtgaggcttttaatttacctgaactgcctgcagccttcaaatatttctcattaaaattttgtctcaaattacataacttcctctactaccagctggtgtcttcagtaaggttgtatgtccatgaatcatccccttttagataaattatattaacccacttcacccacaagacatcatgcttctccataactgcccacaaatatttagcaagaattgcacgattccatttagaattatctctaaaaccaagccctctaaacttcttagggcaacagactttttcccaggcagctaaatgaattttacttatgttctcgctttgaccccataaaaagagtctgcaatacttttctatttccttgactacgctttgaggaaggatgaagatgttcatccaataattccttaatccaaacaatacagagtgtaatgaccgctctagaaatttagattagtaagggcaattagcactannnnnnnnnnnnntattattatttgtgaattaatttatttgtgga

SEQ ID NO: 163510 - DNA, 2761 bp, Cannabis sativa
gtaaaaatgaaaaaaaccctaataaaattattcctaataattatatttcttttatctatccttctattgcctaattcacatttggagttagcctttgttattacggggagagtttagtataaaagaaataaaatgaaccataataattcttttggtggttaaggcagagtttagtatacttttttgagtgattatcaaaaatttcatcgaagttctttttgggcatatcgtgcctaatttatttcttcctattgtgttttgttgggtattttctctagcaggttgttttaaggcagggtcgggcctgagctaaggcttatcaagcccgcgcctagggttgacctagtccaaaggtttaaaaaaatatatttttttagtagttttcaaaaatactacgtatattttaactaaacgacttaataatttttattttttttttaaggtccgccgaatctcagagttggctttattttaaagttaatattgatgcaactttagacttggaaagtactttttgtagcatgggaatggttattcgtgatgcttatggaattgtctttgtctcggctatctggcacatggtaggtttttttcaagctaaaactgagaaagctcttgttcttcgccatgctcgtatccaatgtcatcttcttgggttcgataatgttcaattcgaaattggttgtctcaatatggttaacaaaatcaataataatgtttttttaaactcgtcactagacttaattttaagagacattcatcctaatttgactctataatatgagtttttctcattattccaggatatttaatgttgtgttgcccacaatcttactaagtaagctttggatgtgactattagcaaggtttggtggtcatattattaattattattttatggccgatgccatacatctttgatgatatcatctaaattcctcttttttaagaattattgctcttggacattttgggtttttcttctaaaaaataataatcatattaaatataaaagaagaaaatagaatatgtatattgatgaaattaaaaatccctacaagaaaaaaaggaaaaaaaatgcaatgaagctgattagaattcatattaaatttaattacttttggaaggtgattagcgtaaatattaatggagggagcaaattgtgaataaatttattttaaaaaataaattattaatatatatgaaacacagtgtttattatttagataatataaaaaaaattataaatattaattttaaaaatgttaaactattaaattttgatctaattactataatacaagaaaattttaattttgatataataaaaaaaatttcaaattaaagtatttaaaattttcatgttaaaaaaacattatgttgtaaataaaataatagtacttaaattttaaggtaaacacgatgcagggctatgtgttttgtaaaacttattaattgaacattgtattttgttaaatgacaatacatacattgtactttttaaaatagtataaaatagattatgaacttaatttttgccgaattaaaatttaataataacttcacctggaagtatcttgactacacttattaaatttttatttatctgtttgtgttagaaaatgactttatattagttatattaaaaaaaatagacgaaaattaaatttagaatctattatgtattattgaaaaaaacaaactttaaattgttatttaataaaacataagttaaattttatattagttatattaaaaaaatagacgaaaattaaattcagggtctattttgtattattaaaaaaaaaaaacaaattttaaattgttaattaacattttacaaaatagaaatcaaaatagtatttagtatttatccaattttatttatttattttttgcattgaaggattgcgctttgagtatacaaacaattgtcgtttttcacaaatattgttgtccatttccttaattcttgcttacatttgatgattgatgaagtagcactgcaagtttgcaactggacattccttcaaaccgaagcaaaagaaacttgtgaaaatagtataaaccttatccttacaaaaaaaataaaaaagtatataataacttatcaagcatcattcgaagaattaattagaatccttcttccaattaaaaaacaaaatatgtttaattagtactaactcaacccctggcctgaaaaacattgaaaggaggatctttggtccttgaccttgagacttgagcttgttttgaatccgaaaatgaagcaacaactttggggttggaactcctataataatgactaaaactaatcatacatgatatggtacccaaaaatattaaacacttgattgaaaatccaaaaggttttggccaatagtacttattccaccatctgttgttattggcttcttcttcaccatctttaaagctgtgaagaactatattttgattaccaaaacattcatttaactctcttaacacatttggtggtggtgatttcccttcataactcctcaccaactcaattaaagctcttctgctttctttcaaataaattacagcttcatttttctctttctcttgccaacacagtagtttctgagtccacaccacaaccattgatcattatataaatatatatatatactagtaaaaagttacctgcgaggcacgtatactaaattttatgctaggtattttttattatattaaaaggtaatacacttaaaaatgtttatctcatcttggttcaacc

SEQ ID NO: 163511 - DNA, 2198 bp, Cannabis sativa
  modified_base (2143)..(2148): a, c, t, g, unknown or other
ttattctttctgaggttgattctagaattaatcaggatcaatataattttcttaactccactttcactaaggaattaatcaggatcaatataatttttataactccactttcactaagaatgaggttaagaatgttgtttttcaaatatttggtgacaagactcctagtagttttgaattagggctgaatatccaatgggtttgtctgggttttgggttcaaaaaaaagtacctgtatccgcctgtgaaatgggcgggtttattgggttcacaggcgcgagttgaccaagtcaacggtcaatcgatctactctttttttggttttttttttaaaaaaaaaataaaaaatacaaattgtatttgttatttcttaaataccttaatctatattgtttagattaaaagaaaacaaaacaccttgttaactcggtcaattttttttttaaaaaaaaatccaaaatgtatatggttatttctttgacaccttaatctatattcttagattaaaagaaaaaaaaaagcattaatttcaatccaaagtacaaaactcaatccaaaaccaaataagtcattgatcaaccttcatgttcatgataataaaaagtatcaaaataaattgggaataaaaatcaaaagttcatagtccataatattactacatatccatattgtccaaattaaaaaaatgcttacaaatttaatattcatatataagtatttataaaataaatattgtataatgacttgggtctccaaaaaattgaaacttaaaagttgttcgttggatgacttgcctttgactcatctctttttctgtcatggtatcacactttaaaattctacatctttcttaatgaataattaaagagataagtaaatatattttaaaaaatatttacataattaatacttattacttaatactaagatcctctaattgaaattgactgcattgatgaatgagaagtggttgaggtactggcagtggcagtggcagtagtagtgagagtatcatttatattttaaataataaaactattagtatagatattaatatgacttaattaaatttaataattgtaatctttataagatataaaattatagagtataaccaataccaatggcaatattctctattatcggtacaccttcttcttcatgcttatattcacgaataattataggttgatgtgattggctccactaattttttagacatatcaaaactttcatagtttttggattcaatgaacacctttaaggatctaaaatacgccctccagtgaagaaagctgcctctaaagcaacagtagtagttgaaacaactaagacgtcacgagaaatttttaacaaggccgggtatctgaataaatttatacaccatcatttcattatatcaaagtgatcaagctaacccttttgtaagagttcaacatcatcagagaagaagtacttatctaatttatattttttcacttcaccatattgctcgatttttttttttatgaaaacgcatcatgaatgtcatctgaaagaagcaagtaagaatttggtgcgaatgtagtagtatcagcactagtgtcttaaccttggctcaccaaaactgatagttgtaattgtgattgctcattcccaccatatacctaaaaaatatattcttaaagtcatttcaatcttgttcaccatcacattttggacgtattgggtcatgcaatttaaagaagtaatggttgagatacttcagcttgtatcttgggtctaatattaaagcaatcaagagtaccttgttacatttatcaattttccaatacttatggtacttctcattcatgttcttagccatgctctaataataggtcttcattttctgcaagtgacaacttataaaaatattattgtattccagtaatcataatgaagtacttatttgaaataacatatgttgagccactaaacttcacagtgacttcgtggaaagctcccaagacttgtgcaaagacctttacattctctcaatttttgcaaaatttatgctacgcaaatgtagacagtcgcaattagtaataaaattggtaaaactaagtattgttacgcatcttatggttactatgcaagtatacgcaatcaagtagtatctcannnnnntgaggtcgaaccacagggaattagattaagtactactaaactatacttat

SEQ ID NO: 163512 - DNA, 1695 bp, Cannabis sativa
tttgtattatgggtttgtggcttacacgtttcttcatgggattgtgccacatttttattaaaagtaaatttatttaaaaagtttggatttgatggtatatgtcgctcaatatggattgagcgttgtctgccctttatgtcgctctgtggcagttttttccgtttttttctttttaactgttccatcacctatcttcatcactaacttctactaaactgttcccacccatcttctacctttgaaatttcctctagtcttttctcctgtaactcctcctctgcttcttttcgttgtgttcccatcttactatccatggataatttcgttcctaacatgtctaatgctctgtctgaaagagaaagtgaagtcatcaacctgtccaatattagcattcctcccccaaggccagtagtcaatcgtcttctctgtcgagttttttctaagagagggtacaatcctaagcagttcaagaacttcatctcaacacaatgggttggtcgattcgaagtatctatctcgaattatgactccaacactaactcttacacaatttcatttggctgtgaaggcgatttacgacgagtcctttttaaggaaccttggcacttccataattagcacttgatcttatgccctccaagtgttcttcaaaatgcttcaatggacacttataccatcactccattttggatacaagtttatcgtatgccattccttagtaaatccgaagctttggcgaaaattcttggtaatatgattggaactttcttggaagttcatgatgactcgcttaatgaaggttgggggccttttctaagaatgcgagttggcatagatgtttctaagcctttgctccgtggtcaacttgtgtcctttccttggatggatgatgaactgtggctagacttccgttatgaaagattgcctgaattctgttatgaatgtggtataattgggcacgtttttgataaatgtcccattttttttttagaaaaattggatgaaggactgcacccagatctcccatatggcccttggatggaaggatctgctcttccaaagacaagttatgatagataccgacaggatttttctaaggaaggtccgtggactttcattacgcgtttgtctcgtaatactacaaacccaatcctctctcattccagacagttacctgcaattcctactcatgtcaccaatgctgaaaaaggcaaaggaataatggagtctattgataacattaacattgctaatcacgatctacatcatctgcaattaaaccgttcccaaaaaagaagtctgttggttttttggcttcggattttgcttcttcgtctggttctaaggataagaacattgataaacatattaccaatggataccatgaactctcccgtgacatgcctcctgttcaatcacattctccggatgttaattctctgtccaaccagtcccctgctactcctccctcaactcacaaacacaatgctatttcacattctaatcctactaaagtcgccactaccaccatccctattgctcattatccaccaacctctttgccaattgcaaaaaaatctgtggctattcttatggatactccccctgcctacatgcacattaactgtaatatcctaagattaagagaatggataagcaaaccctaactagttaactgtgtataattatagaatt

SEQ ID NO: 163513 - DNA, 3088 bp, Cannabis sativa
accgattcacattccctttacctggacatgcttcctccagccgagtttcgggtatagcaattgcccttcaaaaagttcttttttagtaaaaagagctttttaataattacagaaggcattttcgtcaaaatcctttcggatataacacctaggttcttggcggatggtgatggttgtgccttctcggagtccacatcacactcaaccactactttcctccactctgatcagattagtgaacatatcttttaatatgtgttttttaaattttatatattttaacatatcttttgactattttataagatttgcttttgtattttctttctttttttccgtttttaagaaattagaaatttcaacattacagaaattatagaaaactgattttagctgtgtaatattcatgaaacataataataaatttatataatattagttatatatatttttatttattgatttatattatatatgtatttgttgatataatgaaaaatatttgtcttttagaaactttgaaagcattattgtaggaaatttgctagaaaatttgatttgaaccaccacaaatagttagtacttttttatttttatatttatttattacatgtttatttataaataaatgtaatttgtataatttattaattatttgtgttaaaaaaattaaattttttagtgtaattttttttttaaaaaaaaaagatttagtatagttaaaaaaaaaaaatcagattttatgtaaaaaaaattttaagtgttactaattgtttaatttcttttggttatatgtaattttgtgtaagaagaaatagtgtgaatttgtgatgtatttaaaaattattggagtgtttaggacagatttaaaaaaaaaaaaaaattgataggttaaaaagtagttgttttgtcgccaaaatattagtagaattttgagataattaaaaaaaaaaaattatgttaattttataatttataataagttggtaaatttataagaaattattgaagtataaaatattaaaatatataattatttaaataattaattatttaaaaattgcatgaaattaattttaaatttaaataatttaactaagaaaatattttttatttttttaagaaaataataataaataattaggtgattaataaagaaacataatatcaattaaaaataaataattaataattgaatagagaaataattattaataaaaaataaaacaattaattaatatgtgataaaataataataataatttaaataatttaatatctatttacaaatattttaaaatttggtacatttaatttcaaaactaagtaatttaattaagaaaagtttaattttttttttaaaaaaaataattatataattagatttttaatttaattttttcttaaaatttaatatctaagtattattacaaagatattaaaatatagtgcatttatttttaaaactaagtaacttaattagaaaaaaaaaagtttaattttgttttttttaaaaaaaaaatattaaatagttagatttttaatttaataaattttttttttgaatttatgtaatatctaagtcttattataaaaatattaaaattcaattcatttaattttaaaactaaataatttaacaataaaaatttaattttgttttcttaaaaaaaattatttaaaattagatttttaatttaataatttttttcaatttatttaatatctaagtttcatctaagtttcattaaaagaaagatatatattataagtttacttattttaatgtttcttttagaattatcaaaatactatttaaaataaaagttaaaaaatattcttataatgaaataaaagcaccattagttcaacttgtacataaatcataaaatttatgtaatacaaacaaatttgattataatttatttattgtaaacttttagtagatgacaatcgatacgacttgggtgacgatgcgaaatcgtaaggatccaagttactgggaaggtcttcaaatctttatggcacttgcgtctaatcacaaaaattgtgacgaaagaattttttgtccttgtgttaaatgtaagaatacaaaactttgtcttttgaacattatgcagactcatatctttacaaaaaaaattaaatgcagttatgagaggtgtatttaccatggggagttggatgaaccagtcggggcgaataacaatgttgatgtcgatgagatggttgatataatttaagatttcttccatcttataaacgatgaggaaagagccaccgacgatggcattcaaaggggtcaatattatgatgatatgtttaaagggattgaggcagagttgtacccctattgcgattggatatcctccctcaactgtattgaaaagttaatgcacttgaaaagtttggagaaaataccaaattatatttttgatgaatttttgaaattgttgacgttggcattttccaagtataacgaaattcttgcaacacactatgaggcaaacaagaaactaggtaaattaggcctagggtacgaatcaattcatgtgtgtaagaataattgttgcttattttataatgagcatgcattgaaagaattcgattgggtgtgctagaccagtagatcgattaatgagaacgaaaggggaaaaaagtggtacataaggtgatgcgttactttttgttgactcctcgattgaaaatattatataggtcaagacatatagccaaagaaatggtatgacatcgtactgggcgtgtgaaagaaaatagtgttatgcattgttgacctcaaaaaatgatcaactgacagatgggtcgtatagatatgatgcttgctacatgttacataaacataatgaaaaaacaataaacagaaagattttttatagaggttcggtacccatgttataggtgggattggctatagcacccttcagattacaaagtatgaatcagtaggcagatctcaagcgttgaataacctagggtgttggccagcctaaggtgttggctagccttgggtgttggcgtgtgagagagacatcccaaatgggcatgtacaagagagagagagagagag

SEQ ID NO: 163514 - DNA, 1321 bp, Cannabis sativa
cagcttcgcttccagccctgcagcattcaacaaggccttcgctgatgccatgaccaagctcggcagagttggtgttcttactggtacacaaggagaaattcgaaaggattgcacgcgtcccaactaattatttgtttatttaaagcgggctataatcattttttgttataataaaggtgtgatgatgttctcttaatatacactacacttttataattttgtgtgtatgaattactagagcatcaatcagtgtatatctactacgtacgttgtaactagctgcatgcattttgcatgcatgaataaagatcttgtgctcctttgctcatggatgaaaaaatgaagtatacatgacatgaaatagattgataatcaatctaacacatcgaaaaattatgggatttaggagctatacgtactatactttagtatcagtgaagtaagttatatatgattgcttaagtaattaattaataatattatctaatggaatctttcaacccaataataatatgacacatactaatataatgtagaaagaactgatcatgtcggtttgtggaaaaaccaagataatcgatcaaacccaccaagaaataattaaactgaaaattatagaaaatcaacaaagggattttggaatattattaacaactgcattgagcaattttagactcatgcacatgggtccgtttaatgctatctaatcttagtgatgggcaataaattattatacaaaaatgcttctcaggataacccattggatagactgcgtaattagcaccccatcaaggaaaaagtaacagttttttcttattatatattaactagagaactaaatcggttgaatatttgttaatttttttaaaattattgttttttttaccaaattattaatatgatataaaatattatatagtgttgtgaaaattattagaattatgtattttttttatttttaatttccataagtctgccaaaaaattcaacattattctctcttttttttatataattataagattattttaattaaatattcaatttgacaatacatgtgctatccttttattttctaatcccttttgtattttgttataatatttttttcaacataaaaattcaattatttgtataattatatatttgttttatttttaattttaaaactaaatcaaaatatatatatatatatatgagctaggtttcaatagttacattataaatatgtaactattatggttacattattttttgttatattatttattatataatataatgtttaagattaaaattgtgatatgttatatatattatt

SEQ ID NO: 163515 - DNA, 1419 bp, Cannabis sativa
taaattatttttcatcttttaattattcttccaaaatttaatagtatattttatatatgttcagtttagattttttatgtaagttagactattaattattttagtatatttattatatggtatgtcgtttactgcattctactaacagttgtattttgtcaatttataatacataatatgatatgctatcaagttagaagtgagattcaatttatatatgcaagattgattattttatgcttttattatatacatcttccagttataattaatagtgtagagttgcaactgtgtttcgaattaatatcggtattagaataagatttacataactacatttcgaccttacctttatctaatcatcatctttctcactcatcattttattatttttaattcattctaacttctatcatattctatttatactaatctttaggggtaatttgcctccctatggatacgacatagcccgtttactaacacggtcgcagtgtaatatgttgggcaacatcaacgattattcaagatatgatcatacttacctaatggccaagaaaaatgtgaaacttttgcaaagtttatgagttcaaagcttagctgaaaagcaattacgtaagattagattgaggtagagagtatttagacaatgaattcaaagacttcctgatgtagcatgggattctatcccaactcacagcacttgcaacaccaaatcagaacgacgtttgagagagaaaaaagcaaaccttgtcaaacatagttaggtcaatattgagttactcttcacttccactcaacttttggcactattaaaaacatggcctttagaggcggttttggtaaaattcgtaactcttggtgttccagggatcactaaaggggttgaaaattagaggcggttgttagcaaataactgcctccataggtgttttttttattttattttttatattttttattttaatggcagtaaaatggagaataatgaatagagtgagactaactaagaaattgcagatctaaacgtaacaatccataataacacctttttttcttaaaaaatgcatcacaaatctaagttagccgcgagaaccacctaaaaacaaaaataaaatggtaaagaaaatacaaaatgaaaaatatggcaaaaaaagaaagagatgggaccttcggtggtggttgggttgttggaattggtttcttcgtggttgaggcaccgccggtactagagatagatttttttgctggtggtggtgagttcttaatggttgaggcaccgctggtgctagggtcgacagtggctcaactaagagacacatagaaagagtgggagagaaaaagaagaaaaaaaaatatacctttcatggcggccagtgtggtggttggtgagccaaacaaagagagagagagagagag

SEQ ID NO: 163516 - DNA, 2445 bp, Cannabis sativa
ggattgcaagagatcatgatcaagttttcaaccattcatactcagctggagttagaacaatttgcttgcattttgtggagtttatggatagaaaggaataaagaacgccatggtactaaaccccatctggttgaattacttttatttaagtccttgtcatatctagaggagtttcaatctgcccgtttcgttaagccgtcagaccaaaagcttatatcgcagcagtaagttccagcacaatagcagcctgttgcaggtccgattcaacctcctcaaaaatggttgaatccaccatcaggtaggctgaagcttaatacagatgcagccgtagacaaagctaaacaaattactggttttggtgctatattacgaaacagtagtggtgaatgtatcgctgctatgtctagacctttcccaggttattttaaactagatattatggaagttttggctctgatccataacctacaatagataaaagactgtggatttcatatgttttaatatagtagtcttttaattttgtaaataaaaaaatattaaagataaaattgttgttcaaaatgtgtagagataattttgtaataaaaaactaatttgtatttaagtaaaattttctactatatttatgtaatattttataattgatttttatatcatatattaaattataatacgtaaaatttgatattaaatacaccaataagagtaataacaataaatcacctcttttgcacccaaaggtgtccctagcatttcttgataataaatttaaataaagagaactttataaggacaggccgactcatttcaactacgaacggccaatttccaaaagaagaaaattaaataaaagtgatccgatctgaagacaacccacctcaatatcgcttttcttttaatgagagcttagcctgttttcatcatttaaacactgtagaaatatatatatgatccttacaatggagctaaaaccctcgtttatgtcagcctttctggtcatcttcttggtcatggcagcatcaagtaattactactatctctccctcatctctcttattacttgcatgtgcattatttgttttatttttgtggaatataatttgtttattgactgaaacatgattatcattatagaagaagtaattattaaggtggaaggaagaggagagtttcgttgccccaaaatgatagagtgcaagagcgtatgccaaggctaccccaattgctgcgtcaatggccagtgcctttgcgaaccttgccggactctgcttccacagccgcttgagtcttcttctccacctgaaaattaattcaaatattaactcatcatcatcaacaaaatttacttatatcttctcttactttaagtctttaattatctttatttctttattgttcaggcgaataattgctaattaattgaaatgaatgtgacacattaactttatacatatatattttataattgagtatgagtactcttcttttaactactgtaattgtgaattgagtgcttaaatatttcagtcaattattattaattaatttcttacattttatttattatatccgtttaattttctggtgaaacatctataaacgacaaaagggaaaagatgaaggcaatcaagacaagaaaatagagaaaatgacatctgcctaccactctccttcagatatctaaaatatatgacacgtacctaccactacgtaaagttcgtgataacattaatttaccattttatttattcttataacacactattttggcttctttggctggtatgctattgttattagagaaatgttaagagagatagtaattttaaaaactgtaatattattattggcgtaatttattattaagttttatttattttattttaacaaatattataaaaattaatatcatttattttctttataaacgaataagaaattatttttgtgtagtcttaggactggcctgtgcaagttggatgactgcacatgataaaaataataaagtaaaaattattcaaaatatgaaaaaaaaaaaataagaatttatttttttatggcataaataaataaagctaagtggttatggatattttttgtttttttcacatttatatggatttttttatgccatatttttgtaaaaaaagatagaaatcccatatttgtaaacattaataagttttgccagaaaagtcaccggcgccggagaagtcgtcgaaaaagtcaccggtgccggagaattcgccggaaaaactatcgacaccggaaaagtcgccacaaaaattgtcgtcgccggaaaagtcgcactaaaaagtcattatcgtcgaaaaagtcacagtcgcaggaaaaagttatcagaagtagatgtctcaaatataaacaaaaataaaatcggtcataattgaaatataaccggttctgtaatacaaagaataaaaa

SEQ ID NO: 163517 - DNA, 4083 bp, Cannabis sativa
  modified_base (4054)..(4057): a, c, t, g, unknown or other
gcatatccaattttaacgccatcaaccctccattacctttctttcttttgatattgtgcaccaattcctgagtgagaaccgaagattccgcaatccgccttcccgggataaaagctgattgtaatggagaaatcagcccatccatgaggtggggggagacgatttgctagaatctttgcaattattttgtaaataaaattgcaaagattgataggcctaaattgatccactttgtcaagaagttctatcttggggatgagacagataaaggtgtattttaatagtttattcatctccccagtaacaaagaaatcttggaccgttgagcaaaccgagcctccaacaacatcccagaaatgtcgaaaaaagcaaccagagaacccatctggccctggtgcctttaggggatgcatcatgaagactgtatctctaatttcctcctccgttggaatagcagtgagtttgagattatcactctcatctactttcttatcaaacaaagtatccaggctcaaagggataatcggctcatcagatttgaaaagatcaataaaataatcattaaagatacctgatatacgcctcttatcctcccagctatatccctgattatctttgattgtccaaatatggtttctccttcttctaatcatggttgacagatggaagaattttgaattttgtatctcccagtttgagccacacttcccttgatttctgacgccactgactctcaagtctgtagtattcttcttcaagtcttgcttgcaatctacattcttcctcacagaagtcattggaaatgttttgttgttgtatccaatttatgcgagcctctagattcttgatattctgttcactgaccccaaaatccttctttttccactgctgtaattttctcctggtctgagttagattgcgaatgcaattagtaacccccagctgagtgttttccttccaaacttgtttcactgttcccctacaggagctttccctgcaccaagcttcataaaatcgaaaaggtttgaaaccctttgaattatcagccatcgtatcaaggattatgggtgcatgattagatgaaataatggggagattagtaacacaagcttttggaaagtggctgatctagccaaaggagcctatagcacgatccagcctttctcggattagaccacccttaaatcttttattttgccatgtatactttccccctctacagcccacatctatgcttccagtattatgaagaaagtctgataatcatctgaagtccctcgacgaaactttattaccccactcttctcattcgaactgagaatggcatttaggtcccccatcacgagccaggagccttgacaatctaacatcctgctttccaattttttccaaaaattttctttctcactgtcgtaaggagtgccatacacaccaaaaaaactccaaatgacattctttcgagcttcccaaaaaggcacttcaataacattactatcaatcttcaagacttgtaatttaacatcatgtttccacattaaacagacaccaccagcaataccaaaggaagagcaactagtgatgcccgagtaacctaacatcctagcaaccccttccattctatctttatccacttttgtttcaataagaaaaatacaatcaggcctgtattttctttcccaagcacgtggagcttgggttgccggttctcgtagcaagccccggtaattccacgataggattttcattgggaaggagggagcttgataagggccgcctcgtcgcccgtctgaaaattttggacacaattgacatgaacctcaaccaaattcaaggtgtcttccagatttcttaccgtatctccagttagacagttgttctcaaccaattttaacttgcttcgattcgttcatgtggaggatcccttcttttgtcgtttatcgttcttggttgttgatgaagaggctcctgaacccattttgaaacaagcagtattcttgtcgatatcaatagctggtagatcaggtaaagtttgttcaaattctctggtattctcactggttccagggacagaaggaactagatgtaggctggctttccttttcctggcttgtggacatgggtggatcaattccgtaacatctaatgggtcatggaataaagttgggttgggttcaaacttgtccacttgcacagggcccataagttcttctgctaacccaatctcctctgtataagtgggccaaggaaaataggtaacttcaggatgcttgtggggctatctagacttgcataagtcaacatgtgggccttctataatttgattgtaatggggtccaatatcagccattatagtagtaatgactcttgcatcagcaggggtaggtacaggtttatgagaaacgttttttatgatatcattctcattgacaactgttgcattgccttgagaacgatttccccatattcgaggagaggctgatcgagcacatttgtccataaatagagcctttggacttgcttcccttgaaactagctctccactttgtttgtttgctaccaccaatgttttctttttcaccagtttcaatttcttacctaaattggaccctggatgttcctgcggaactctgatagccttctttgtagtcttgacaacaaacttaggacgtataacattctgactctcgatgctggtcattggttgctttcctttttccttgaagtccactagtttcatggtgtttccctaacttcttggtctttgaccaatgggatcttcacgaaaatactccaactggtttctggtattgaaatagctgtagactgctgtttcagccttcatccacaggccaaaggcaggaactgcctttccctctggcggataaacatacaccgtcgactggaaacaatttttcttgtcatgacctagatgcccacagttgtaacacagtttagggagtttgaaataccgaaattgtatccattccttcctacctcttcgaatatcaagatagaagcctgaagacagttggtgagccgttgaaatcttaacctgaaacttgaataaaccccttcgaataatcaacttttgatccactgtatcacatccaatatagaaccctgcttttgctgccacccttgaagtgttaattggattgagatagggagtgggaagtccaaaagcttggacccagaaaatggcctttgtcatatccaccttactccaaatgccgtcttctggccattccctaatgattaggagtttgccattgattagccatggcctgttgtatagtatttccacgcagtcatcctcttcatcgaaagatattccccaaagacccgcactaagagtctttatcttttagttgcctttcagcttccatatcttgctaaggatatccttcaatctatttcttgagaccccaactcctccgaaaaactttgccaggactccaatgttggtgatatctttagttaactcaaagtctggttcaagctccagagtcattgagtccaaaaactctttcctgaggtcttcaacttcttcctccttatcctcggcaccttctttacattcttgattcgattcctcgttaacagggttcccctaaccctccagtgggacttgttcttgttgctctggccccatttcttcctcattccttctgtcatttgagttgagttcattgatgttcccatcagccatattcatctccattgtggatgttaggtactattcaactcagtgttgacgtgtagggaaaagcctttgagaatcttaccaaccaaaaaccgttaaaagccttaaactttaggaacagtaaaagcttttaagatgaaagagatagaaataaattcaccagaagcaattataagtaataactacagggtgagaaaagcctcacagttggactcccgacactctcatcctagagagaaaagccttataagttaaggcacagaacacttagcaatatttttaagtttctatgtgacacaaccaaggtcaaggcagtataattgatacaatacattgttgggttttatgccnnnnataaaactctttacaatctgattagt

SEQ ID NO: 163518 - DNA, 956 bp, Cannabis sativa
tctctctctctctctctcatgctcttttctttgcacgtggatggattttgaagctcctttcaccgacaatggagggaagatcgagagggataatggcatttaccgctctttgcgtttggcaattgaagtttaatttttttcttctttttttcttgaaactttaattttctattgatgagattttggcaagaagagaaggaaatatgggtctgagacggtggtggtgataatagtgactgttatctttgtttctgatagctagtagtgggccaactcaatatgaaaacgaggcctattcatcgggaccacggaggttagtggcatgactcgttcattaagaatgggcgaagccagacttgacgtctgactccatcatgagtaaccctcgactacggatctggagatcccaagtctggatcacccaacatatgctcaaagagcagacaagtctagatcgaagaagaatgcccttaggaggcatccaagaatagaatatgaaagggagtctgggactacttaaggacacgaacgtcgatccacatggcacaatcctgacacgatctcaagtaatcaggcagcttgtctctcgtgtcaaaccacagaaaggctcacagcaaaaaggaagtcacttttttggccaatgcccattactctgacattctctttcctaaaaccgatgacacatatgaatctatcactgtcgatagtgcatccgtgtatggacgatggttacctacatactaggcctcacctatttgttggctttatggtactaacagaataaatgtaaagaccgcttaagattaacactttggattattaaataattagggttatgcatgagattttattattatttataaaatgcacattgtggaaatttacttaagttcatgtgtgtttattatgttatttatgtaaattcctcaatttctgtgattgtgttcggaagctgt

SEQ ID NO: 163519 - DNA, 2040 bp, Cannabis sativa
taacaatatctttatattgtgaatgtgatctctttacataacttacccacaacagatccaatccacggttgtccaagttaggaacagccttggtcaaactgtggggatattcatgccagttcattagcaaagctggaacatcagagtctgcaaaagcacaagttcatttctacttaatgaaaccacacaatacatcaaaacaattagggaaatgattattactttgacggtatcaagagggattttctccgtagtttcacgaaaggaacgaatgaatttcttgagatcagtctccatatactcaaacacaaaatacagaactgtcttcccttccttaatttattcaacccttgtttcacatccattaacctaaattcaattaaaacaactgaccttctctctaggtctgtacaccttcacgaaagtgccttctccaaagaatccatggccgccggtgtttccatccagagctacagaataatttcataatttattattcaaaattggatttcttttcttctaaatatagtagtcatttttcattacaaaaataaataaatatgcatatcaaaactttcccctttttttttcatatttttttaaatattccaatcctaattaaatagcctaacaaaaaaaaaaaaggtaactaggtctctcctttaaaaatataaataaccttcatttgtcttctcatctttctattactctttcctttgcctccgtcaccttcaccaatacattaagctatgattccttccttgtcgttaatctaactatctcaacaagtttggttttttatttcttaatcatcatcatctcatacttgtatatatatatatatatatatatatataactcgtgtataattttctcagagagttgactaaaatgaagtataatactgcttcgatgataggattaggattgggattgggatttggcaaaggagtgatgaccattattgttcgtcttctgcttaaggctacccatcatattattggtattttattttattatttcctgataatactaattattattttcaattacacttctaattatatataataaattaatataaaatattaaatttttatggaccttcttttgtatttaagtacattttttttttataatcatttacattattagttaatagagtattaccttcttttgtagttatttaaagatattatagtaaatttaaaaaaaaaatcaaaaaaaatttaacacgttgaaaatatgattcaaatagttaatagagtattttcagtatttttttttttcaaatgtattgaaattttgcatgatatcttaaataattagagtaaaaaattcttttaatatcgaaacaaatagatagagagtacatttaagggcgcaatagaagcatcttaaaatattttttgttaaaacataaaaatgacttagagcatatctaataaagagttaaatatgtggtgtgttgttaattttttagcatttttcaataaaaaatttcttcaatagtgtgttataagtgtgccaaatttgtcacacctaaaaattaggctaaatttagtacaaaatataacattgtgttaaatttagcacataataaatgctactttttaattacatttttgtaattaataaaatactctaataaatatattttatttataatattgccattaattatttgtcattaatgatattttattttttagactaatttatctcttaaaatattattgtagattagagcacaattacaaatgttatgctaaatataatgtttgtttactttttaataatggaagttggatttttgttgaggaaataaaaaaagtaagaaaattaatttcgttatatttagtataagaatttttaaaattttttttttttggtacaattgttctttttatattaccttgatcaaaggcaaaaaggtggtctctaataagaccctgtccatatccgcaccagcaccagcaccagcacccgcaccagcaccagcaccagcacccgcacccgcaccagcaccagcaccagtcc

SEQ ID NO: 163520 - DNA, 1282 bp, Cannabis sativa
taacatttcaaatattatgaagcactagaacattgagttcgctatattcatgttatgaattttaatttgccaaatatactatatatgtataactttctctaagtataaacaaaatatccttaatcaattatcaagatatatatttctattaataatttaatattaatcaatatatggttcttttaggtgaaaatcagatatattcttggaatttctcaatggcacaatctttctgtgtcatgcaattttatatatcaaatttaaaattacctctctctcaaatataaaatcctaaaactcaattcaaaattaatagttgattaagtattaagaagatgataataattgtacaagaatacataagataataataacaagaattatgatacctttagtacataatacattggaaaaggttaattaatgttcgattgactttttgatacttcaattttttttaaaaaaaaatctaaataaatatgtgaatattaattctattgaaaaccttaacatcttaaaaaaatcaagtttactacgtactgcactaaatttatatatataatatataaaataggaagtgtttacagtatgatataatttatgtctagtacaaatatatatactcttaaatcaaacaaatttaagaatttaatccagattttttttatgataatgtcctttgtagttataataaaatatttgtatgttttcaattttattttttttttaaatattttataatactgaaaataaaatttagtcaagatgttactttgtgcacacttttttaagaagctattttaaaatttaaattccaaagtgggctaaattatagtaaatcctatcataaaatatattcagaattaaaataaataaatatatgagagtaaattgctccttgctccttcgggttaatagtagttgtataatgtatgtatatattacaaaatatcttttaattatatataatattttatatagttagattttgatatttattatctgatttaatttttaattaattagttatctcacctataaaaataaggttcaggagctttttatttattttgtgcaaatagcaaattttatctaaaaaaaaaaagtggagagagcttaaaagtcgatttctcattctgaaacaattactgaaattgaaacttaaaaatcaataacgaaaagtatttcaattcttttattcttttattacatgtatggtttcaatatgtctatttttttttatttaagcgtttatatattacaacatgttttacctgggact

SEQ ID NO: 163521 - DNA, 1753 bp, Cannabis sativa
aaatttaatgaactgaaccaattaaaaattgtcacgtgatcattgacattgacttatacttaatggccgactaggtacctaaataaattctaaaatataacttaatgtaatattactctcaaaaattaaatttaaatatctacaaccacaaattaaacttagtatttattctaaaaattacgtaaaaaaaaaatacattataaaattataaatgaataagagaagataataatgaagttttgtttttcatttgtcggacgtttggagagcatggaaagtggtaggagcgtggagaagaagggtgacgtgtatgggtgtgcatgaatcaatctaatccaataaaaattgaccgattcaattacaatcgaccgccaaacattgaatatctaattgtgatccaatcggattggatgttatttttaaatatccaattggatcggatcggatggtggatgaggtgtctaaaaatctaatacatctaacatccaattaaactaattagtattttcatttagttttgatgaataattagattttttattgtttttatgtaaattctatgtgttataaaattaacattaaattttactctttttttagattggatggatccagtccaatccaatacatactagacctaaaatattatatggattcgatccgatccaaaaaaaaatataagtctaaaatattagataaattaaaattaaaccaataaatataaataaaatattccaatggatagaaccgattcaatccaacattgaatagatgttgaatcgattagataactgaaattaattagatcagatctgatggtgtaatctaacatccaaaaatattagatgagcaccctactgccgcgcgagtgacgaacaaagaaagaagcatcatagcacgtgggggtgtgtgcgtacggcgcagtgaggccacgaaaaagactgtgacatgtccaaaggagacgacagaaagctacgccgccagggttggcttggcctcgtcaaaatgctcttttgaggatttcgtgactcctgggtcccactcacactatcattcatcactactaatcgacacgtgttgcaatctctccacctcatagtttctttttgtttttcttttgaataaataatcatataaaatttacattttcggtgttttgggcggctatgtaatgtattgatgtaaattaaatttgagaacgacacgttgtggacgaagcggtgccgtattgataatgcccattgttaccggtgaatttatcctctagctaggtttcttttctttttttttttgttagggaaatctattttctcttttgagttacaacaatacgtatttgcattgtattcaaataaatttacttatctgctggaagttaaacaaatatatatttacattattttataagaaagaagctatttttcgttggataggtataggtggactcttgttccattctataataataactgcgaaaggacctaacatcctttatagattttgattaataaactgatacaataaataaatggaatgggatttcatttgtcgtcattttcttcaaaataaatggccgccccaacgagtcttatttagttactagtggtaggacacgtgcattgcacgggctcatatacaattttccaaaaaaaaaaacataggctaaactagggctgtacgtcggtcgggttgggcggtttatcctatatattttctaacccaatttaaagttcgggttgctaaaatttaagtg

SEQ ID NO: 163522 - DNA, 1223 bp, Cannabis sativa
caactagctagagtctatttttatttaataagtgttggcccttatattttctttctgttaaacatttctttttttcaataatgtctctgctgatggagcaattggatttggagctgagcattactggtggcagacttgcggttattgccggaggatggtctctggtaatttgaagaagctctccctcatccaactcattgtcactcgatcgacattctctcttgtcgttaatggtgggttaggttggttttttttttttctttgcaagaagatgggttagattggtgaatactcaaccaagattattgatggataagccattgaccaaatgaattctaattggagaggcaagctaaacaaaaataggctgatacgtcaaataaaaaaaaatgggcagatgaaatgaaaaggaaaaggaaaaaagggcggcttcatcaagatgggttaaaggtttgaaacatatgatatttttcttatttttatttattatcacatttggtacaacaaaactgaaagtataaattaggtgtgggtggaagaaaaagaaagaagaatattgaactatattaatataacaacaacttatgaatttaatttcatattttagagatgttatataattaaagtatacttgataattttttaaaatctaactatgtgtggttcttccataaataaaaaaaattaccataacagagtgacatgatgatcctactgtacaattttagttgatgccatgttttagagaagctaaagaaagagtgtgaaagagaaaatgatgaagactatatagagagagatttttctttaatttctcaaaaaaaaaaaaaaaaatacataaaccaaaatctgtttgaaaaaatcatcaagaaacttaaaaaaaaaatccaagataagaagaatgtgaagaagattttgatcataatataatatataattaaatttttaaaatttatatttatttctcaattgtttaatgatttctcaaatattattaaaaaaataaataaaaaataatctaatgcaacccaaatattaatcaatactatgtacttctttatttatcacccttagatctatcatctatggctataaaaacatcactaccatagaaacaaaactaatgtccctattatagatatgtcatatatatatatatatggaacacttcttaacgggtaatactcatagaggggaactaaaaaaaattaataaggtaataa

SEQ ID NO: 163523 - DNA, 1851 bp, Cannabis sativa
  modified_base (1812)..(1825): a, c, t, g, unknown or other
tttttaattgtaaatttgtatattgtatattataaatgcagtataaaagttatgtttcccctatttttccatttgtcaccttaggatgttttgttttttttttttaataaaaaaattaataaagtttgatgagaaattggttgtcacgtctgtggcagttcctttttttttttttttaattgcaaccaaattaagaaatatagtcatatatcctttcttttttactgtcattgttattctgttcttcttcttcatctttttttttccattttttttccttagtttaaaaatcttcagccacgttgtgtatattgtggttggtttttgatcagtttattgtacttggtttttgatcaattttttattttttaaaatccatttccttcttatttttcccttcctaaccgtttttgctttttgtcttataaattttcatcttattttcttttctagggtgtaacacggtctaattcttcctccacagtagttaaaaaacccaaaaaaacttaaatctaccttatcccgatcgacattgggaatttttttttttaagagcaccctcctagtcctacttctctggttgatttcaaacagaagtcaatggctaaatctccttccaagaggaattctaaatggcaacaatctatgttggaagattttgattcagattttgagcttgaagatgactttcttgaaatagccaaagttcccaagataagacatatgtttttgtgttttttagggttcttatgtcatattttttaaattgtatattattgtgtttggatttttcaatacactttgtttagtgtgttattttttttttatttgtacgtgtttggtgttttgaaataatttataccttctttaatagttgtcttggtatttttttttattttatttgttttttgtagggcaagggtaaatttcatattgttaatatttctcatgataatgttttggaggaaattcttagtgaaatggttgttgatgtatgtggcttttttaattattattttttaatttttgcttttattattttttatttatttttatgttgttttagagttgtttttaaaagattttttatgttgcttttttcagagttggtcttgtaaatataggtgttctcagcattatcattcaaaaataataacttttgggtattatttagttattaaagatactaaaagtattctcaccccaacccaattggttttccaaaattatatttggtcactttcttcatatttctgagcacggtattcacttcaaactcttacatagtctgttattgaggaagttcaacaaccaaataagttggaattctaaaatttttctgtggctaagaagtttgttagatatagtgttgaggaatttgcattagtaaccaatctagatttccacgtcgagtcttatatttttcagtacaagtaggataagaatatgcttgtacaacactgtttaaagggcaacacaaaaattaccaagaattctattcaagttaccgttacagctaacaattataggaataatgatgatctagcagtcaagttggctgtcttgtattttgttcagttttacttgttgggggggggggtcctcctcataaggttgtttctattgaggaacttgacgttgtggatagtggccattacaacaagtatgagtggggcaatgagtgctttgagatgactattgaatcttttaagggtaaaatcaatttaggtattaggatgattaagaagaaggaaaaagatgttgatttttataggttgttagtgttggagttattttaccaggatctagatnnnnnnnnnnnnnngtttcattaacatcctaatatgagtt

SEQ ID NO: 163524 - DNA, 1611 bp, Cannabis sativa
cctgttttattttttctgccatatatagtgcaacatttaatgtatatgttagatgcattatgctttacttgaattggtgccccattaaagagcattggtcttttcaaaataatagtgcaaatttataatataaagctttccaaaattgcatatcttccacttccaccgaaaaaacatattaagatttcaacaaggatttcaggtttctaattcccacatattatagtgacgcactcaattgcattgtcttggtcattttgaggatccaaaccactaaagtatattttttttttcaataataattatttaatcaatcatagcacgacaaatgttggattaatttgtatattttattagaatttcttcaccattaaaaatattcaaactttaattctatgccacatatcttctttattgacatgataatgtgtatgatgctatgataatgacaattatgatgacaaggaccatgttgcaaaattagtgcatgattctcttctttggccttgtaagttataattggtgtaattttttaggtggtttaccaaaatttcaattctcctcattttgaagagtattactatttgatacttttaagtgattgatcttttaaagaatctaatatcatttcttgtagtatttagtaccttagtgtctctcttagcatctcacaatttttaattaagttcttggattttaatttcattgggggccaggtgtccatattcttcctcatttttttgacccaatgattattcaagttggtagtattaagcttatttgacttatacgatcaagtaaactacaagagtagtaagtttaagtaatatattatcatattatttgagttgccatgcttgaaaagatagaaaaaaagcaatgatttaaatataatatatatataggtatattggtatggacggccataatattatgtatggacacatttttttcaccttgaattttccttttttcccttcctagaattttcttgaatacgacaactctaataaatagtgtacaattgttcacacacgtgttagatggaccctagctatttcatgtttaattaattgtataccaatgatctttcatacacttagcagttattagttgaattttataaacaactgattggaaaattatgataagtgtgtgttggattaaatataatctacatgaagatataataattttatatgaattcgccagaaaggattgaatatatatatgtaccaccacgcctgaataaacttgtgattgcaaccaagttcgggtcgtggttattccggcgtggtggtgttgctggtttagggttaggggttatgggtttttaacagtaagaagaagaagaagacaaaaaagaaaaaaaaattcaaattatttatttatttaaataataatttggaccaataatatttcgacatgtgataatttttaaaaaagtaaacgtaacgaacaaataaaaagcatgataccttgagaattattatcgttatttttcgaggttgaaaacttatgtgtatcaaactgaattttttgaggacttttgccattaattaaatatgatttcacaattaatggtcttatttttagtttgaaatttattgt

SEQ ID NO: 163525 - DNA, 2025 bp, Cannabis sativa
ctttcttggattgaaaagattgtttttaagattgttaaaagaaaaaaaggcaataatttaaaacttattaagattgtttttttttaaaactaaagtttaaggtatgtgtgtaaatttctgttatgatgaactatagatggtttagaaatgaaaatgaaaatagaaatgcatattaccagcggctaagatatcattttagtttatatcataggattcttttggcaattacttaaatgatttattagtatgcataagtagataaattggatatgtatataccattagtatatatatatataaactataaagtgattctcaatctacgtacctagctactttaaaaaatattggcaaatagtcattacagcacgtgatcatgccatataaataagttgttggagccaataagaaatatagaaaattatagcatttcactacgatcggataccatatgtgaataaagtaacatttctgttttccttaaattgctattatttatggtaaaaatttgtacatattgtacacccacccaaatcacaggccaccctgatcacatgggaaacttgccaaaaaataattgcaatctatttctctaaggcggtgctttacccaaaagtaatttttgtttttatctctttattcactagtggcaaacaaaaagtatcaaattatttgaaaaacttatatataaagatataaatacattcattatttcaaagaacttttctagtaaattctatacataaatttattatatatagttgatctaatgaacatttatgattcatgcaggaagagcggggtcgtcaccatgtaatcaaccgcttgaaattcggcttaagatagcaagaggcattgcgagagggctaagctacatccacgagaagaaacatgtgcatgccaatattaaaccaagtaatatacttttaaacaatgaaatggagcccataattagtgattttggcctagatcgccttattctcccacccggaactagtactcacaagagtggttcggctaggtattttggaagcctaaaatcggcttccactgccacccgcgacagccaatatgatgtcacctttggtggtagcccgggatcatcatctttggctgccgcgggtgtgtctccttatcaagcacctgagtctatgaagaatttgaagcctaatcccaagtgggatgtgttttcttttggtgttgttttacttgagcttctaaccgggcgggttttttcggaccgggaattagggcaatggaccggatccggttcgatggttgaggataagagccgggttttgagattggttgatgttgggctgagaggtgaggtagagtacaaggaggaggccttgctggcatgcttgaaattagggtttcaatgtgcttcttttgtcccacaaaagagaccaaccatgaaagaagccctccaagtgttggacaagttcactttcatttctttggagcactaatgatgtattaatttgtgccacaacaaaagtttttcttaggctaaaagctttatttcatttttttaatttctttctctgtaatttgttttttcttcatctttttgttgacttggacattgcataaaaagaaggaaatgtgttgataaaaattatttgtgagaaagcggtgataagtttgactgattataaccaaatgtcattgatctttatttatttatatatacaaggcacttgattacaagtatgaccatagagagcattgattgcaattttacttaagcaagaagctctttgtaaaaagcccacgtaagagaaaatcagcaaggcccgtgtaatgtaagcccattaaaaattggtaaaataagaagaaatgacagtcatgagaaaaacgaagttgggctcaatcagaggcagactgaaaatgcaattcaagtatgttaaaccaaaaatagaatagagtaaattgcactctatactctttttatgttgtcttctttgatttttactctcttttctaaagtctattactttatttttttaaatattgtactaa

SEQ ID NO: 163526 - DNA, 1338 bp, Cannabis sativa
ttctcctgaaagtgatcattgcttggtagttggccagtgtaactttcatcatatttgttgtagcacacagcagcagagtgcccatatttttcacacacttgacatgtgggtttggaattgttttatctacccccttcctcttccttttgtgccacctcctcgagctgttctaggatattgataattgcctcgaccatggttaaagttgtttccaaatctacctcgtccatgattagagttaaatcctgggctatatggtttttgtgccatgttcgctgttggactatcaagctgtttggagtttgttgaaaaagatataagcctctctagcttgctttcaaagctaaggagtgtgctagagagttcttgacatgagagggttgtcctagctttaagaggcataacaatagtcagatattcagctcctaaaccagctagaacattacctcgaagtaggttatctacataaggctcccctgctagagccagtgtatctgaccaaagtcgtttctgtttcaggtagtcagtcatatattgagaccctttcctcactgtctgcagcttggttctaagatcctccatgttggctcttgagtgagctccatacaagttttcaaggactatccaaagacttgcagctgatctacaaccaatgatttctaaggaaatgccttctgtcatagatccaaaaaggcaacccaccaatagttggtcatgagttatccatagttcatactatggatttggattagggctctctatttcattattttcagaaatcagaaactctggtggacatggtttggtacaattgagacatccttccaaacgatgccctctgataatggttagaacaattgtcttccacagagggaagctacttctatccaacgtcatggtgaatggttgacttaaggtgttgttgaagggtgtagtcattactccagagtcggcagaggatggtcctgcagatatgatacgagagttgattgagggagcctgccctacagctcttcttggattctgagattcatttgtggccatggcgtttgcctttaaatggctctgataccaagtaaaaatacttgagaaaaagtagagtaggaaagaaagtgaatctcaattcaataagcatgagtaatttcattgatatttaaggtgttgttagctttaatcataaccattaaataaaggacaaatggtatggattataaaaaaggaatattacaaaaataatgataacaatgcacataaattgttgtaaccaaattgtacaatctagaatattccttttgacatattctccaaatatgggggagccatgtcagctgccaaatc

SEQ ID NO: 163527 - DNA, 2515 bp, Cannabis sativa
tcgttacctagttgtattataattctattacacaatttttaaaataaaccaaacattgtaatgagaattttgattctactacaaaactcattacaataaaccatacacgagcttaagtaggctttgaaaaattggaatcatatcttttattattaatacatttttattttgtgtccttgctctatgtatttatttgtttcttttttggattttttagttcaagtaaagtaaatttctttatgcaccaaatattctatcgtttatactaaaatctaattggttttatgatatgctcaagatttcaaaatgtcacttttgggatttggtagggaaattaatatataataatttatttttaatagattagttccatatttataaggcttattttttgtcttcttctattgtcacaaacaatttataatttaaatacaaaccacaccaaaatgccatcaaccataaaattattgtccaccgactctttttaaatgaaaaatgaagatagagatcaaagtagctttctaaagtactcatttaataattttcgtacgagaagaaaatgctcacaattaatataaaatgtatgaaattttagcaaattcttatattagtcaatggcttattaaaaaattacaaaaaaataaaaaataaaaaatagacaatattaagtgattcatgtcaaactttaattgatatccttagaaacagatacaatttcaactactctctagattaaatcaactttttatttatttatttttaacttaaagtgctactatttaaattgtagtaaaatttgactaataccatgtatgtgactatgtattttttttaaggaaaacatatctataatgctttgaaaaatacttataaaatattgtttatatatatataaaatagtgtaaatataactaatataatgacattgattttttgtcttaaaaatagaacataggtagacaagttccttttaaatggttgtcccaagtgacgttgcttatctagataaattgacaacctacaaaataatgaaatattattgctccacaatttttgtagattgttaagctatcacttgtaatatcaaataaagcacatgattcatgaaacttataattgaaatgaagaaggaaaacaaaagcaaatatagctatcaatatcatgtattggagcacttatattttattaattaaaataaaaaaaaagacaaaaataaaaataaaaaaataattagaagaatgagagagaaagagaaataatatataatatttttagctcaccactatatattgagctacatgtagttaaaagaatatgtggtggagtatcaatctaagtcccacattgtaagaataagtaagaattgtcttggatataagtgttcttcctactctagtaatatgatgtcttttcagaaggtgcccaaaaataaaattgtgagggcttatgctcaaaacggacaatatcatactaatatgagagttaaaatgaggtgatgacccaacaagatgaaagaacaaggcctaacaaggtggtatcagagctattttagctcaccatttaccttacttgttgaatgtgcaattttaccaaattctttaaaattttagctcatctattaagaatgttgtcttgtctaatactattatgtgacatcgcgaataactagaaattttttataataattattaagttaaaatatataaaacctaatacttaattacaacaataatacataatactgttaagaattattgataccatttagagattgtttggtatgatataatttgtgttaggtaatattttttagtaatttttttattatttttttaaattagaaaagtgaatttatttttcaaaaccatgttctataaaattgttttcactttttaattatttaattaggagtcagaattttgaaaataaaaaaattactttcaaaatttttttaaacatattttttttaatcaatattttggactctgaccccaacctagaacttagaacccaaaccccaatctcgaccccgacccaaacctagaccccgaccctatacctaaacttggacccgcacctggatctcgacctggaccccaaactcggaccctgatctcgacttggactctgggctcgaaacctagaccctgacccaaacccagacccccagccctggacttagaccccgaccttgggcctggacctggacttgaccccggactcaaaccctaactctgaccccgacccgaactcccgatctcaaacctgaaccctagaacaaaactcgaactcgaactcgaacttcaaacccagacatggactcgaactcgaactcgaactcgaacctggacccgaactcagactccaaacctgaacctgaacccccagaccagaccccgaccccagtgttagaccacgaccccggactcgacttaaataaaatcaacaaataaaaataaaaataaaaataaaatttatagaacatatttttttttatttttaaaattgaaaaaca

SEQ ID NO: 163528 - DNA, 2631 bp, Cannabis sativa
taacaaaagaagattataataaaaggtgtagtcaatcaattctttctttttccattgcatgttaccagcacatgaaataaaaaaacagaccaaatcatctttatttgaaaaacccttttcaccaaaatcattcacacccactaaaaagctctgtttcaatgtcatagtcattcatttgtttgggcacataaatattcatattataccaaaaaaagaactaacagagcttgaaccaaaaaaaaaagtgacagttagagaatttatatcccctaaacatggatctataccaagtactgacaagttatataacaagaggataggaggaccatctccatctatatatctaataagagattcttacccccaaacattttatctcttaacttaatgagaaaacagacaaagacaatacacaaccaaaatatcatcaaattgaaagaaagatttgacaaatttagcaagtggggtttttcagaattgggtcagttaagagagtggttcacattttgtttattaaaagcttaagaagcttagtatgggcttgaatgaactacccaacccaaccccacctcaccttacccaccattagtgaatgtagttggattctgagaattagctcaaattacaataattcctctaaactatattctaaaaaaacatgtactataacattgattgttacccatatatatacacataataaatagagagataatgtgaacaagaaaagattaacccacatttcaaccatggaagcaacttcatctggattttccactgcatgttcatgattcacatcttcctctctgtaaaaaaaaattaattaattaattaaaaattaaatacaaccgacaaaattaattttatttctatttttttatttttttatttaatatttactcgaccattgttgggctcaaagggagtaaaggaaatgaacaaatgaaaaaccgacacgtgtcagagagagtacgagtactatgaataaagagagagaaagagtgtgtgtttttgtacagtgctcgaggcacaaaaaagcagtcactgtcagtaaaaccgttaaaaaaagccgtttctagaggaacaattgaggcgacccgtcgtggggaaaaaaggtgaaaggacggaaatgccctctgttattttacccttttgtttaaataggttaggggtattttggggaaatgaatatggaggtgggagctacgaggtgaatggagggttttttggttggtttgtaagttaataaagaggaatccgaagacaaaaaaacgtaacggaataaacggtggtgatctaaagatccagatctcaacggttgggattctcgtttacggtttaagtagtagtaatagaatagaatctgaagtgaaacaagaattggacggtgaagatgatacgagtgagaaaagatttgacggttcagatcgattttcgaaaaggaaattgtaataaatgaaggaatttaataaatgccggtgagtctttttagttaggtgacagacctggaagccattgttgagttacttaagctctgcaactcctctgttccttcttcatctctgtaacaaaacaaaacaagaaaattgaaaagttgtaatgtactgaaacaattcaagagtaataacacgccattaatggctctttctcaattattaaagaaaagaatagaaagaaaaatgcagctaccacgaaactcaaaactccatttaaccaaaatcaaaaatcagaaaaattcaaagaaagtaaaggaaaccttgaatccatacgaactactcttgccattactccagcaaaacagaacatgagaagtacagcaactgaaacagaaacccatctccgagacaccgccattaatctttgtttctctctcttctgaaaatgtattatagagagagaaagtagagtagtagtaatggtgaagtcgaagaagaatgaaatgaagctgctcccacaatatggctccttttatagacaccttgtttgtttcgtaacgacgtcgtttacagttattcgactttttcttttactctggttaggttcagttataacccaacaaccaaacacacccctttctttctttctcctattaaccgataattttaaccgtctctcccctatgcacgtgcgtcgttcgaccactcatgtgcctctttttttttttttttttaaattactgttttagtgtgggacccatattaacgcaccttatcctgccacgtaggcgtgaccgttatggagggagtgaccattgttttccgctgattttgcgctaaggaatgaaaaataaataaattaatattaagaaggttaataacattttttaagactaagccagtaaggctagcttagtggtgagggagggatgggaaaaaagaaagaggttatgggtccgaactcaggacctttaagctattaagctaatatatgattgtaaaaaccattacgctacactcaaaaaaaaaataacattttttaagactgatttaaaaaagttaacaattgtaacatctgttttgtaaaatgataaattaaattttttattttttaaaatgctataaatagtattctgatcttaatttttaataaattttttttaacataactaatttgaagataatttttagtaca

SEQ ID NO: 163529 - DNA, 987 bp, Cannabis sativa
atgaaaatgataattgttattattgataaaattaaatggcagattaacatctgagattaattaatccagaatttttgctggtagcactaaggaaatccattgggcaaacataatggctaataagagagataagattgaaacttggaattatcccattagcaagttggcctctaacatttttaaataacactcaacaatacctatatcaacttaggtgttagattttctatagctgtcatatgcagatttctctaatatattttttgtttttaacaatttaagaatcactatataaaatatatatagtagatttctctaatcactagctatgattagatatgcaagtttctctttagataatttattagtagatttttgctaagtatctgtatgatacagaaaaacaaattggggtttgacatgtttgctgaaagaagccaataatgaataatctgctacccataagatagggtttttcatctcattattaatcactctcggcagcactctatactgtatactcaactttctgcatttattctttttggattaaattgaaactattaatgcagagaattagatgtctttgaccttgccatatgcttatccttatgtgatcaggttgaagaaattattaaaaaactaaattaatatattattcattaaataaatattgttcaaccttgaaattttctaattttattattatcattttagaaagagtaatgatatctccttccaaaaataaaaaatatatatgtcaagcaaatcacatttgtcctatactagcattactgcattttgtgacactgttccgcttaatcattccaccaaaggacccatataattacattcattacgcaaattttaacaataaacaaaaacctgtacaatacgtaagtaggcatatgaggtgatcattaataaggtcaaagttttgtggaatgaatttatcattaaaaattgtgtcatattcggtacaatttt

SEQ ID NO: 163530 - DNA, 1128 bp, Cannabis sativa
ttttataatttcaattatttttttataactttccaacaatactatacatataattttataaaaaaaataagaaaattttacgtaatagactaaaaaatttgagaaattttacaaaagtacgtcaatacagaaaggtttttatttttacgctttgaacttttttatttacaagaatacatcttcaataaaaataataaactgtttttttagttattttataatttattattattattattatgagaagttttaacgtgttgtattttaagttagtttattcgtgcttacgtgtcgtgttttcgggcttgttgttctgtgtcacactgaagaccatttttttgttatgccgtactaatttgcaacatcgtgccttgtcatgcccaaatctatattttttcgtgtcgagtcatgctcgtgtcggttttgtgatgtgtcaaaaaatctggcccatatttatagctctaactatgacttgaaaatgtgaaatcgaaaacggcataattaattatcaagcgagcgtaatacttagaaaccaattcgcctgaaattggtcctaattaacttaactgctattttatagttttgtaattccatcgtaaagagtgttgatgaggagtgcttattacaacctctcattaaaaaaatttagtttatctttgcacccaaaatcgtatgctgaaataatttttttttttcatagagatattcattatagttataatattatatttgtaaattttgaaaattctaaatagtttacagtactgaaaacagagctcctgatattacagaaatgatattttaactataatgaatatcgtcgtatgaaaaatatgtgggtatatattttgggtatagatattgttattaaaaattgactgtaacactcttccaccattctagaatatggtgcttttttactattatttctattcatcgtgatgaattacaattttgtattgaaatttaaagaaaattgggagtttttttagtgatttataatgtagtgcatttagaaatttttacaccaaaaatctgttttgcacattttattactgttttactcctacacgcctacatcaacatttttacttaccatctttattttattacaataataccacttac

SEQ ID NO: 163531 - DNA, 1694 bp, Cannabis sativa
taagacattatccgtgatgagtcgttgagataggaaggcactttgatattctgaaatgacatgtgggaggtgaggcttcaaacgcagaacaatggttttagacaccagcttgtataaaacattacacaagctaattggacggtattgtgtgacatggcttggctttttaacttttgggatgagagtgatcaaagtcgtattgattgaggtagggtcagctccattgtttagaatgtctaaaactgttgcagtgaccagggggccaacaattccccagtatgttgtgtaaaacattaccgacatgccatctaaaccaggacttttgtcactactcatagtctttagagcttggtaaacttcctcagctgtatacggttcggagatctgttcctgagatatacaatcaatagtggttgggatagtggcaagaatggtgtccatggcttcttggttcacaccttgactgcagaaaattgcttgaaagtattctgtgatgatatgggaaattgcaactggatccgattgtgagttcccatgtgaatctttcattttcttaattcgattattactctgtcttgaagttgcacgttgatgaaagaacttcgtgttcgaatcgcccgactgcagccaggatattctggatctttgatgccagtagtcttcttcttgagccaataagtcatcaagaatggattcagaattttgtacagcatcgaagtgagtttggtcagtcctaggcgagttatggagtgctgtaacatgtttgtgtgcctctcgaatgtctttcttcaaattaccaaatttagcttggtgccaagtctgtaatgcagctgcacaattagacagattcgaattcagttgtgtaatgcagtgttgatctgtaacagcccagttgtggatgattatatcagtgcactcctcctccttcaaccatattttttcaaagcggaatctcgatttaaaaaatctctctacaggcatagagtcacgacagcagacaatggcttttagagctcgatggtcagatttatagaaatcaagatgctgaattgtgggtgtttgaaaagttgagtcccaatggtcattgacaaaaccataatctagccgctctttaacattccccaatccttggcatttattactccatgtgctcctttgaccttcaaaagataactgagaaaggtggcaacttaccactgttgatctgaatgcttccattagagaaacatttctggggggtcctccaatcttatcttcattagaaataacttcattaaagtcacccataaccagccagggtgaaagtggagcaatgtcaaaacaccttttaagaattgtccatgtaaggtgtcggagagatgtactaggatggccataaaagccagtgaaatgcagagatggcccatcattactctcaagatatccatcaatatggttggaggaaaaattattcaatgagaaactgatgtgagacttccaaagtaacatgagcccaccaccttgaccttgtctcgggacttccaaaccatgagggaaacgcaatcgtcgacgaaaaacttctatactaccagcttttaatttagtttcaataaggaaaagcacacagggggcttgctcagaaacaagcaagcgtaaatgtctaaatgcgctggggttccccaatccccgggcattccaacttatgcaattcatgg

SEQ ID NO: 163532 - DNA, 1780 bp, Cannabis sativa
tatatatatatatatattctggtgtttacaagaaatcttaattatcatcaaactacttgaattttgtaaattctcatctaaacaaatttaagaaaataaaaagggcaccaatgatcattagcctagctaaccaaggacaaggaatgggtagaatataatatcacaatactgccaaaaaatctagttttggtggactgtttaaaatgatggagtaattaagacatatattttaacagtattaatatttaaattttgaatcaatagggagatttcatttaaaaatgtgattcataaatcaatcacctgaaacttattattaaatagtgtctatattattttatataccactttcaatataatttgtgttgaaaatcactacaccaatacaagaacatcatccaatatatgtaacaagatgatgagaatcaaaaactaaaattaataaaaacttaaatcgaaaaacagatatcgagagttgagacactaatttttgaagaacaccctaattaagagaacaaaagctatacaccaagtctaaaaaatgtgagttctggttattacaagtatcttttcttggtcatattgtcagtaaagatggtataatggtaaatcggggaaatattgaattagttagagattggccaagacctaaaactgctacagaattcagaaggtttcttagtttggttgggtattaccgttgttttgtaaggatttttcaagattttcacacctttgatagaatttacacagaagaattagatatttgtgtagaaagataagtgtgaaaccagttttcaagaactaaagtagcggttaattatagttgcattgttagcctttccattagattaagagaaatttatgatttattgtgatgcttccaaacagggtatggggtatggggtgtgttctgatgcaggctaacaaggtaattacttatgcttctcgtcagttaaaagagtatgagcagtagtgttatcaaactcatgatttagaacttgttgtcgtggtgtttgcactgaaaatatggaggcactatctctatggagagaaatgtaaaagttacactggccacaagagtcttaaatatttctttactcagaaagatttaaacatgagatagagacagtggttggagttagtgaaagattattattgtgagattttgtatcatcctgagaaggttaatatagtagcaaatgcctttagtagaataagtcccgagtaggtgtttagtactaagttaatctcccctcagttagcaattgagatggctagggctagtatcgagtttatggttagtagacttagtaacctgatgcttcattcaaacccgttagaaatgtacaaatgaaagaccctgagttatttaagtctcaggaagaagtcttagtgttaggtttttttagtactattttaggttaatcttagtatatttttaattaagttttactcttgttttgagcaatttcatcctttttggtatcttttattttgtaggtttgaaatagaagaaaaataaaaaatattgaaggaatatgaagaaaaataatcaaataaattctcggggcaagagcacctggaaattagtttgagaaaaaaatccagaagttatggtgtgattggagatgtgtaccttagctggccgtaggggtgggcatcatccaatccaatccaattgaaccgaactgatccaatccaattcaattacaaaaagttggatatccaatgacaattggattggattggatggtaaaagttggattctaattggatt

SEQ ID NO: 163533 - DNA, 1268 bp, Cannabis sativa
tattttcttcacaattttgagaccatgaacgttacagatatcaaatcgcacaccttgccttatctcaagccgagagcatcactttgctctcactagtaggggtattttttttaacattttattggtcaaagagtgatgtgcattttatttatcacctgtattagagcagagaagtataattttttttttttagccagtaatttttttttttgtacaaagagtatttttctcaatttttatttaaattgtacaataattttttttttctaaaaaccaaaaaaatcaaacgcaatattttttgaataaaaataaatactttcattgaattgaaagagaaaaacagatcttacaagagatcaaataaaagaagagtactttatcattatgtacccattaacatgaggcatttagttctctttattttttaaaactctcacatgaattctaactcatttcaattcatctcatttactaatattcactttcagaaaagaaaaaaaaaaccaaatttattactgatcacctttcaccatcttactagtttcacccaataacataatttctatattaaaaaaaatgaaagacaagaacgtgctttatagaaagaaaaaaaaaatgaatatatattaggattcaattatatatttaaaaaaaagagagagaatggagaaatattaaaaaaataattaatcctattctatcataaccaaaaaatattacattctatatggggtaaaaaaaatgccttcacttgagagcaaaattatgctctcaactaaggagtaccccctatatagggataagttgagtaagatctcttttttgtatccactaatcaaaaatatcatcatattatatttcattaaaatgtatctatttttgtagattgtttaatacaccttaattctctacttaagtctagcatataattttcattagcctaagaggtataatggagatatcatctataaaaatgagtatatcttaaataatataaaaacaaaggtaacaattaaaatagataaagtaaaatgggtatagaatataatttcctcctctcgtatatatatgtgtgcactcttaatgggtattacccatgaatgaataatattaaaaaaatttaagtttttataattaatttttctatttaattagaaaaaaatattatttttacattatatgggctggggacgttgttctatcagctgaaaaaaaaaaataaaaaaaaaagttttcggcaaaaaaaatgataaaaaaaagttgagttt

SEQ ID NO: 163534 - DNA, 1305 bp, Cannabis sativa
atgaaagaagatgaatccttatcctccacacacttccgtaatctcattacatattaattaattcagcttaactttttaattaagagaaatgctaaagtgttgtctaccaccctcttatgtgtcaatatcactattagtccaattaaatatcagatctcatataatttaatataataacttttaagaagtatcgctagtcaatcgcaatgtgacatatcgagaaagtattaagcactactggtacctaataacaatggtctttaattaatcactcattcactgtgctatgattataggttcattattgattgatttattcatgaaaaaggcctaaacaagcccacgagtaacacaaaataagaagggatgactcatctctattctattctaatgtatggacctaaacaactaaaatgaccactctatataatatatgtcaaataatgatatttttatttttagtccattatcaaaataatcaatatatacaaaacaaaaatcaaaatatgctaaataaatttcttcccaaactttcacatgtactaattggtactattaattttttttaagaccattaataatttctcttaaatgtttaaaattatttgatttaaaaattttcattcaattttactaacaaaaaccttacatgaacgaaagttcgagagcacgatttgatacatggataatttccacgttaggtgtccgtggtgtccgttaataaatttgtacagaattagatctttgaatcgaacaattttagtagtttggatgaatttttaacggcctgaaagttacacttcgaaatacggaaaaaatatcctaattaaaaaaattaaaaaaaaaaatactaccgtcaaccttctattttaatctcttattcaatctccgcgctcgaaaatacatattgaaatatttttataatgcttatgctcattatagttataatatcaaacctttaaaaaaatttcaaaataaattctacagtataccatatcgacaaatttataatattctaacttattacacatatttaaaaggcttcaaaataattttggataacataaattattcaacaatttataaaaataatactataattataacaaatattgttgttaaaaaaattaatggatatatttttattttttagacatacaagttaattaagagattgtaattactacttcttaaaaaataaaggctaattaggatttttgtcccctgaactttgacatgtaccaaatcatgctccctgaatttttaaggtcgttaaaaatacccctgaactattgagatcgttgg

SEQ ID NO: 163535 - DNA, 1544 bp, Cannabis sativa
accagagattgaaaataagagatagacttttcaagatgaaaatcgtggcagatcaggtatgtttactctactgtgcacatcaagaatctactgaacatctattttttggctgtactgaaaccagcaggtgcttatgggaattgactacttggttgaattggaaaacttctcacatttctctccccaatctcatcaaatggattgggagagctaagctgagtaagtttaagaaaatgacatatgttgcctgtttagctagcttgacatacaatatatggagaatgagaaataggtgtttttgggagcaagcaaaaccagaaactgatttgctgattaaagatttaaaggctgaagtaactcatcggattcatttgttttggccaaagaaaatttcagaggaggataaacaatggtttttgaatttgtgaataatgtaattgtatagaatgaattgtggtttttatgaaacacatgtatagatgattatttaggcccttgatgggtgctattaggatgtaaatacttgtttttgagccaatacatttcagattcatcaaaaaaaaaaaaatattaaaaataactaaattaatttatataataaatgcaattacaatgataacacttttccttaaaaaatttattcacctaaatttttatatgattttatttagaaattttttctttattaaccaaatttgtttactattagtcttatattatacatttggttgaatcgttttgctacttgcacacacacacacacaaaaaacaatatttatcatcacaaattttaataattatccaaaacaagcataggaaaaataataattttaaataccattaattagataatttattaatattaattctacttttatttttattatgtttcattgaaattcaacatcaaaattatattttcactcaattaagacattctatagcagagatatataattttacaactagttaatagttaatccaaatatctagatactaatgagtttttttttttatctaaataccaaaattagtacttatctttttttgggttatttacataccaattaatatgaacttgcatatgatactatcataacaaattattttgaatactaattagtatcaaattatatatgataccaataagtagcataacataatactaattattaattttttgatattattttaattgtattaaattatattaaatgtatcacaaaaaatatgccaaaatattcaaaaaaaaaaataataaagaaaacatctttcacacaacaacaaaagtatcacatcatttctcagaaattaatcacatttccttatatacataagaaaatgaagtaattcaatagtatttttaatatgtatgttattaattataaatgcagtaggtgtgttatagttgataattaaattttaaatatttggtatttatattaaataatagaattattacatagaaaatataaattgacactttatttacaaaaatacctccataaggtaaggacaacatttataccttttatataatttta

SEQ ID NO: 163536 - DNA, 1367 bp, Cannabis sativa
gaggaggggcacaaatgggaaacgggaacgaggttgagaggtgcattacctgcttattactcaatttctatccttacttgtattatattaaactagtaaactggtcacgcttcgcgcgtgcggctgtttataaaaattttaaattatatatatatatatgtttgggaggaaaaaaataaaagaagtaccatttcaaggcccaataaaaaagaagtcaataagattgatatgatacaagctcactaaatagaaagaataagtgacgtgacattttaggaaaaacgacccaaaagtctattgaaactagaaaataaagacaatagttaaaaccgtaactcgaccaaaatcgagatgaattccaacttgggatattcagggatagagtatgtttaaaatcatgctgagataagatctaatcaagtactaactgagatacaattacctcagattcacttgaagttgagagtagttgtattcagaataatccaagatagactagcttgataacatgctgagataaaacatatttaaatatcaattgagacacaattacttcgaaatcaacataggtcatgtttaacccaactcatggcaggataggttatgtcttaaggctgtttgagacgaaccaaggaccaagctaaaatcaaagttcatttatgactaagcctaataagaaaaaataaattaataataaatagttgatatatgagatcaagataagataaaaataacatcaagttagaagaaatcacatctgagacccgtaaaaaataatttaagtcaaataaaataaaattaatctaaagataaataatcataacataaaattaattactaaagaattaacaactcataagtacacgtatcaatcatagcattaagagatagtacaactatgcatgtaaataacacacaatataaatgaagcaagaagcttacataaagggcaagaaaaaacgatcagatcagaggaagtactaagaactcaaagaggaaaatcctgccaaaaaaatagtgactgtttaatttgatcaaaataataaaagtactatttttgatcaaaatagtttggcaccgtatgtgggaatattattttttctctttttgaagatttttgcatccaaaattttgatagttttttgacaaattcaaagattttcattcctttctccttttgataagattttaaaaaaggggtcttaaatggttgacgaagaagaagattacatgacacaacatgcatataacactggccaagaaaaggaaaataatactgttgggttttgtgtcctaaataaaactttatttcaatgtaattttttttatttatcaataaagagacagatttattttcattacttatt

SEQ ID NO: 163537 - DNA, 2690 bp, Cannabis sativa
  modified_base (1043)..(1044): a, c, t, g, unknown or other
tgtcaacaaggattcccttctcaaatccaatgtatcatgttcttccacacttttcaacctaaaacaaactcacaatacttataaaaattgttattcggagagtagagagatagttacttgtgagtcacccgaatattatggaccacgttcaccattatatgtatcatcatcatatgcaggtcatggtcatggtgatcgtgatgagaaaaaaagtggaatagtgaaaggagttgttacttatatgataatggatgatcttgaagtgaagcccatgtctgctatctcaagcatatctatacttgatgagttcgttaatgttatgggagttggtgctcttcaggagaagactgtttctgttggtgtcaatgaggtgtgttatatattatatgagtataaatatatattagtcttataataataaagtgttattgttgttattaatgtaattgttttattattatgggcagggtctgagtttgctgaaggcttccatggaaaccaagaatgttcttactcgtgttttcttggtgaaccactaattttctccagctcatcttcaaatgctccacaaattactatcttttgagttttatagagagtgttttttttattggtttttatcattagagaatattttgtgagatatttatatatgttttggagctttagttctctctatcggttaaagtatattttattaattaagactcttgattagagttcttgaagaaataggatccaaattaattaaatttttgtcttttattattatatatccccttattatatataccaattagtgtttgatcagatgaggatattattaattgatagctcgatatggtaaaataatgactacttacctataatattttaaaatcctcccaaaagtattattgcaattagggcaaataacacttggggcatcactccaataatatataattaccagtacttgatgaacagtagctacaagagtatatggtttttttggaggtggtatcatgaacattagcagggccggccagagggtggggcagccnnggcctcggccccaggccccacaattttagagtccccgaaaaaattaaaattagtgtttatacatagaagaaataaaaaacatataatatataaatatttaactcaacaaagtaaatgaaaaacgtattggcattgaggttatgggttcgatcccttcttcagtcattttttaaacttttagttatctgtgaaaggcaaggccttacatagcatttcataaataaataatttatatattagactgtataaaaagtgtattaatttataattttaaaatattttaatattactattaataataaataaaatgtatatttattatttattttttttaaatatatattatttaaacatattattttttttctttcaaatgtgttaaaatatataacactttaataaatatgctcttagtaattaaatattacttgatcgagttagcttacgttgcaaaaaattatttattacatagaaataaaaaaattaaaattgatattgtgtcaaaatttaattaaaatttattttaaatttttataaaaaaaaaagcctcatttcaaattttgccctagacctttcatcaccttaagacgggcctgaacattagtcaaggagaaaaaggttgaagagccaacttcaactgtagattttggtttgagaagtgtatctttgtggacattagattgcatgtaagtatcgcttagattttctaagctttgatagagttttcctaaggtaccaaccatgccaatattggtggacaagagccttatgatggtaccaactggcatggagagaagagagaagaggaaatcagtgaagtcttttcctccttccgcaaataaaaccctgttctcctttgtatagatcaaaagcttgagtgtcataacttttggagtagtaatagttgccatagtatagtaactctttgtagctaattcgtttgataatgattttaattttctttgctctaaatttacttcttctctctttctaattaattaactctagatatatatagcttgcatgtgtggtgaggaaagatcttctacatattataattacgatatgtttgaatttgagtatatgtgtgtgactataaatattaatataataatcttataaataacgttttaattttgactacctaattagggctattattaactattgaaatgacaagttatatagctttgccaggtcatagagagccctcaggccagctccaacgcgtggcaggggtcatcaggtggtgtggcacttccaaaaggtgcttctgcatgcatccagataattgaggcaccttcaatttttttaagccagtatgaaattaattggtacgaattcgaatgctacgagtacgattaggcgtgtaaaaatataaatttgagcacaaatcacataatactacactttggttcgatgcgtacgaaaaaaatatgtgcttaaagggggtagtactctcctcaggtgatacccaacatctcctccttgctcctaatgttgtatttagtgcttagtagtatgtattcttaatcctgttgatgtgaatattacatttaccatgtcatatatatgcaaggtgtgatatcaagaccataagtaaggcactacaaaaaactgctacttttatgataattttttagtca

SEQ ID NO: 163538 - DNA, 1304 bp, Cannabis sativa
  modified_base (1270)..(1274): a, c, t, g, unknown or other
aattccaagccttttaagacttacatgaccaagctttctatgccatagcactgttgagttaatcatgctctttgaagccacatatgaaaaattgttggtagtatttccttgaagtacaaagactccattaatcatgacacccttcatcagtaccattaagcctcttaacaccttcaaagttcctacttccatcttgacctagcatcccgctatattcagcataacgacgaagattaggttcctctttttttgaggaacatgcctcacatttgcagttcatgagtatttccacatgttaattgtaacttcacagatccaatcccaaaaagtggacatgctctattgttcccaagtcttacagatccaccatcaatttccttatactcgagaaattgatctctatttggacaaatgtgaaaagagcaccttgaatctttgacccattcaacacttagtatttcttggagacaaccgttacattagcactctcatacccttcaaagtcactgcccttagaaaccatgtcagcatttccatgtctctagttaaaatctagattctttaattgaggataatcactcttgagatgagttttcttctgatagatgtaacacattttcttgtctgagaagtaggattgaatttacctctcaattttccatgagaggtcatttttatctctcggtttgttcttcccagtacaatcaatacccttcaccaagatttcttcctttagttttaattttctcttcaatttctttaatagcaaggcactttgaaactcttctaatgttaaagattctctgtcatatatcatggtgtccacgaagtgttcatagaactccaatgaaatagaattttgcctggtcttcatcttcgatctttatgccactgttctcaagatcaagaattatcttgttgaaatcatccaaatgatctttaaccgatttaccatacaacatcttaaaagcatatagtttttgtttcaagaacaacatgtttgcaagtgatcgagtcatgtataaactctccaaccttgtccataacccagaacttgttgattccttcgaacctctctcaagattttgtctctaagattgagaatgatagcactatgtgctttgtcaagaatctctaccttttctttatcagttttgtccttgatcttcttagctccgaacaatgcatcttgaattccctgatgtacaagcaagccctcatcttcaccctctacaaaccaaagtcattcttgttgggaattattttaccnnnnncttagatctactcacaattatgtttattaa

SEQ ID NO: 163539 - DNA, 688 bp, Cannabis sativa
taaatgttggattagagtttagtgtaggtggcaccaagacaaggattctgagcttgaaatagagatggagatggattctttatctagctataaaaatctaattgaagacgtacaccacttgtgtacaatggccggaagagaatgggaccatttgaaatcaattcatgaagatttcgttttgggttagaatggatcatattaataatacccaacttaaaatatagctaggaatttctaatgctacaaatttcattctaaaatccaaaggcgtcataaatggtgaatagaatgctaacttaaaggccacctcacattatcaatagagttccagagaatagggttccgaaggaccattttagttctttgtcacaggctggaaattgtgggaataattgggggcatttaggagtgtaaatggattgggttgcatctgatccagcaatgatctaactcgatcgagatcagatgatgattcgccccgccccgttggactagtttttcgaattggatctgatccgaccttccgaccttccgacccaacttatcacggtcggatctaatcccatgcaattttttctttagtataaaaagagacaaagggtcaaaagtggggttgtttggcttcataacttaaaatttgttttcagttttaaaaaacagaaagctgtttttaaaaactaataagggt

SEQ ID NO: 163540 - DNA, 1812 bp, Cannabis sativa
  modified_base (1765)..(1771): a, c, t, g, unknown or other
aatacaaagatattaaaccattggagatataagttatatcatataaaattgtattgacgctatatcttttttaaaaaaaattaaaggtaaataaatagtgtgacaatatttatagttaatacaaataatatattaaataataatgtacgggatcataattttagcattcttgaatggtgatataccattagggtatttttaaaagtaacaatgtcaaaaataacgtggaaaatagataaaataaaatattatatttttgggtgatgtagagattttagtgcctttaaacaatgctactactggagatgctctagacattaggcaaaaatgaaaaagtaaaaaaaaaaaaaaaaagagcaaaggcatagttataaattagatctaattaaaggtattagatgtgtttctcgagatttttagaaacggaataaaataataagagctgaagaaacaataattgaaagtaaaaatataataagagacaaatagttttgtacgtggttggggcgttaactagccttagtgtacaagtcagttttatttaataatgtgttttcttgtatatattctcaaaagtatacaggatgtatctttgtatgtttgtcagagaaaaagtacacgtgagaattcatcccctaatctatgagattaattgggtatttatagtagttggagaattacattagggttttccatttcccctctactgaggagcttacaactgaacaatgtctttgggcttactcaagaagtccagcccatgaagaacacaattactgactaggccaatcaggcttgagttgatcaagtcaaaactgtatctgcttataatgggagaatattctaaaataactgccctgcacttatgatattctggcccaatctgatagctggagtttccttatttataggaggaaaaaaaaataagaaaattggaagagtctttcgagaacgcaactcctcttccctttgggctcatgatactggagctgtcttctgggattaatgtgttgagggcgaaaggcactgtgaggacgaaactaagataacacttggagggtcctatctaggtgggcttggcccattgtatccttgatgtgggtttcactgatgagtcttaaatgtcaacttggaggccacatgtccaatcctagaaatgcgggtaacatttagcccccaagctttcaggatgttgcacatggtggaaacttgctctaatctctttgttctagacatgtggagattggagaaagaaaataataacttttcacaagttactcgaccacggaagctgacttctacctgtgatgatggtgcatccatgtggcaatcgagcatgttttaggatgtggttatcaaggagtcatcttctaggaatgactatatttcgacgactgctcaccgactgacacgaaaattgaaaaagggcgtcttcattattatttcacccctttattatgaagagcattaaatacggagatacacatagattgtttatctccctaatctttggatgaagatcgtgctttatgaagaaagatcacagcagtccattcttcatgtggattgttgtctgtgggtataaatatccctggtaaccttcagttaccacttttactctctttttcaaattttcccaactctcaaatcgcaccaaactccttaccaccccaaagctttgaatcgtattcaaggagaacttttcttcatcaccctggaaggagctatggactactacattcacctgttggaaattattttaccnnnnnnntagatctactcacaagtaagttgattaacaccctaaatatg

SEQ ID NO: 163541 - DNA, 2229 bp, Cannabis sativa
attttagccatgaaattttagcacgctcctgtcaataatcttcttattgtgccaatagttcatctaggatattttcacttaatttaaactcttcaaagtgggagcgactaacatccatcgagttgtgaagtgcttctaccttctcctgggaaatcttaattttcttaggaaggtctccaaatttattcctatgccacgtttgtaattggagagagcaagctgtcaaattgtggagtatttgagtagttggatcagcagtggtggagttccaattcctagcagatgatgtcagtacaagcatcttcttgcagccaaagcttttcaaacctaaatcatgatttaaatttctaggttggagcaggcatatgaggagaaattgataccttaagagccctgtgatccgactgaaagaaatccaaatgcgagatagttgggactttagaatgggatttcttggaagaaatgttacaagcttttaattttttgataaatttgttaagctagtaatgacatgtgtttgtactcctagattctcacttatgttcaatgacacattgcatggttattttgaggggaaaagagggttacgataaggagatcatatatctctatttctttttgtccttagaatggagtatttgtcaagaatcatgctacgaataggagccaaaccagagtttaaatttcatgataggtgtgtggagttaaaactgaatcaattgatgtttgtacgtagatgatgttattttattctgtcatggtgatttcaaaagtattcattatgtcttgtaaggcttgatgttattttcatgttctcctggattgcaacctaatccttcaaagtcaacaatctaatgctataaaatgaagaacagagaaatccaacgcattattgatatttcaggtttttgcaagaaagatgtaccattcaaatacttatgtattcctatttgtgccaaacaaatttcaagcaagaaatgtaatattttagctgacaaaatgatagctagaataaaagtttggagttctcaaaatttatcatgtgtaggtggagcagtgctaattaattcagtatatttgtctgttcatttatattagagccaaatcatgattttaccgaagaaagttaccaagggcatagaagctatatgtcgagcttatctatggaagggctaacttatgtttcaaggctcaggacctatagcttggataatatttatcaacctaaggtagcagggggaattggttttaagaaaatagcagattagagcacatcatccattactaagtatgtttgggcaaagcgaacaaagaagataacttgtgaattaggtggattaattgtgtctacatcaatggagaaaattggtggagctatcaagctccaacacaaggaagctagtattggagaaggctgattagagtcaagaaccaaatcaagagtcttattgatattcagcagttttctaatgatcaatatatgatttataacggttacaagcttctttgtcctatttaaaataaggtcagatggagccaagaagtacgggtatacataatattccaagacacaattttgtcttgtggatagctattcaagatagattacaaacaagggagaggcttgagaaacacaatattatgcttgatggttgctgtcttttctgcagatcacaaacagagacaatggagcattgtttccttacttgttcattccctttggtttatctaaaacaggtgaaatgttgcctggattggggagctgaatcgagctcattgtgtaatggatcgaccgggcaaaaatcagtagatttaggaagctagttttagctgctgctactgcaacccttgtgtatcatctttggcatgccagaattgacattctttagaattcagctgagagaaaagaagatcaattggtgtgtaagatcaaagagaaagttaagagaagaattagttatgtttggcctaaaagtgttagtatagcagatacgaattggtttgcaacattgtaaatttattgaggaaagtaaaagaaaaaccagtagaaggactataatagggaatttttctataaacaatcattatactgtatagttggagatgtctaggtcttcaaattgaagatgctattaggatgtaaagttgatgtttggagtgataaatttcttgctgatttactaaaaaaaattagaaaaataaaaatatttttcaaaatcatattctata

SEQ ID NO: 163542 - DNA, 1152 bp, Cannabis sativa
tatgcacaagtttccgaacttctatgtcgtttttcccagcaaacaacaactcaatttttatgcttctcaaaaccactataagcctaaccaaatgatactaaacttcacagaacagtccaatatcatagttacatcaaatattacaactcaaataacttaataacatcaccaataaaaaatctaccgttagagttcacctcaagcttgaagctcttaaccaaatcaacaataaaacactttaaataactctatactaactcaaatttaagatttaatatataatatataatctaacctataacaatttgtacagaagcaagaacacctaaaacacctaaattccaaactttaactcaaacaatacgaagagaaattaggggtaagggttacattgatcttccctttgcaatttcaccttaacttacctaaaatccttgaaaaaattgatggaaatggctctgactttttttgagttatggttgggttccttggttcctttcttaaccgagcaaaagagggagagagagcaaatgataactttgatttacttaagtctatctaattaaaataagatttagaataacctattaatttacaccagcccctatttcattaataaaacaaaagaattaacttaaaagaaaaattaagtgaaaagaccattttgcccttaacttaacacttacgtaatctttaacctacgggtaattttgttcataaccaattatcccaaaataccccaataaaactaaacccaaccaaacttatcaagatcaccaataccacaaactaatattgttatgacatttctggccaccaatcaggtctccacagttgtcggacctaaaaatattttatttcactaatagcatatattatatctacatattccaataaaatctttataatttataaattattcttattcatcagtagtaagatcataatcctacccattatacccataacacttattatttcatattttataaaatctttcctaattattaaaattagatttatagtttattacaactattctttctttatagaaatttcatccttaaaatttacctgaacaacttgggatgctgctccaacatctatgactctatgtaacaccctaactagcataggcgtgttaacgtgatt

SEQ ID NO: 163543 - DNA, 977 bp, Cannabis sativa
tcaatactcaccgccggcgattgagccggcaattcgagtacgagtttttcgttccactttgggtaacttccaccttgggtatcaatctccgtcgttctgaagtgatcgtttcctccttctgatggcctaataatgacgaaggaatttttcttgatccatctcccatcaattcgaagattttctccagataagattgtgaattctattgttcgcgatggagaagagaatattttcgccatttatatatatataaaatatatatatagtttctttagaaggtaatagagtgggaaattggctctgtttgtttgattattaaaaatcttttcttgataaaaaaaataataaaatagtgaggggaattattgaaatgattttctattttgttttgagagagggaaaattaaattatgaaatgagctctggtttgaggtttccctctagcagtggcttttatattgacatctataggaggggaaggatgttggaaaggagagagaaaataataggatacttcattttttttactcaaaatacattgggttgaccgaagcaacacgataagaaaagtaatttgaccctttactaatatttccttagaaaaattgaaaaaatagacttttggatcaaaaataggggtagtgactgagtcatttggccgtcattaggtaattaagatcttatgttaaaaattatatactataatgtactagattaatctaaataagatacatcaattaatttaagtattttaagaaaaaaaattatcaacatgataatattttaaaaaattaattaattaagttagcacatttaaattgatttaatatactatgagaaactaatttttcacaagctatcaatattctccttatgtggctacaaattagaggtgttcattgaatcacatttaatgtttttaggcctattcaaattcgatccaatcatatattagatgttagattttaccatccgat

SEQ ID NO: 163544 - DNA, 1808 bp, Cannabis sativa
ctctgaattacacgcctcagattttcgctccagatttgccaatacctagagctcagcttacaccaattgtttacagacctaccacttctagtctcgcccttacacaaacccacttttccaagtacatagtggcacagaccggatgtagcgtagcactaagacaggaaaagactgaggtcttggagtccaatgcaagccactcccagaataagagagggggaaaaagccataactgtaatgattcttcgaagaaattgaggaaagaatatgacccaaaatacactaaatacacaagattaatagatacgcggcagaacgtctataaagcaacctataacatggtccactacaggaaacctccgcgtatgtcacaataggtgtgaccaaagcaaagagtgtaagtaccatggagagaagggtcacaccacaaacaagtgtgactacttgaaggatgagactaaaatgctagttcgagcgggacatttgggacagtgggtccgtatcccaattatttatcttagacagggggcacatggacatatgatagttccaagatagtagagcactgtaaatcttccgcagggggtaggatgctctcaagctctgggattatcgttgcctgcccttcctgcttcgtcagctccagctgggtggcattacttgccctgggaccgagaaccccataccctcccagactagctctaccatcggtagacagagatgttgcaataatctctggtggacctcatctcgctggcagtaccctcaatgctcaaaaaagatatttgaggaaaatagaagatggggaagtgtatgccctggtgcactctccaactcaatgccccaagatgttgaatctgcccatcacctttaccgaaaatgatgctaggaatgtgtgtttcccccataatgacccactcgtaatcggtgcacagatcgcaaacaagcgagtctttagggttctagtggacaacagaagctctattaacattctattaaaatacacattctaggagattgggctcaccgaagcagatttaaccccctgtcacattcagatataaggtttcaacggccgtgccttaatgccaacgggtaaaatccaactgcctatcactctcaagggggaaaatgaggtgagtgcttttaagcattcgacctttattgtggtagactacccaactgcatataatgccatattagaacgaccaattctcgtggattttggggcgatgacctctattcggcatttgcgcatgaaattctcgtgtgataatggatgcattggcacgataaaaggcgatcagagaagcataagaaattgttacaatgttttgacgaggttcgtgttcatggtttgagaagaaacacttgttgctcttgaaacaaaagacttgatggatactgaaactatccgagaggagtttctagatgagttagacccaagaggaagtgagtattagtgaggaagacccctcaaaaaccattagagtggcaagaaatctaccctcgtccataagggaagatgtcataaatacggtcaagaggaatcaagatgtgttagcttgtagccattctgatatgatagggattgaccgtaataccattttccatgctttgaatatctgagaagatgcgatcctagttccccaaaaaaggtggcccttagacccggttagggctgaagcagtaaagacgcaagtggacaagttaaccgccaataatttcctccaagaatctgttggaaatattttaccaggacctagatttactaacaagtatgtttcactaacatcctaatatgaatt

SEQ ID NO: 163545 - DNA, 2087 bp, Cannabis sativa
caaaagttccttcattcatgaagttcaattcagctgtagtgtaagtatccaaccaagcaccattagccatcattctatctatctttgaatatatcatggcttgcccatgttgtttattattccagttaaagtagcaacctgtgtacttgacatcctccatgttgcaggcttccatgcaattaataaattccatgtcagcctgatatttcactctcttgcctatcctttcctccttggctaaaatgtcattaaaacctcccatgattagccagttatgtatccctgtaattctttccataaagccagtctcccttgcttttgattaaaagcatatatgactgtaacatagctgctaaaaaatccacctactgtcatgatatgcatatgtatcgaatggctggtgcaagctaaaatgtttacctggaaaataagaaggttccatgccacaacaattcttcctcctttgtgccaaggtaagttagatgtaaaacaccaacccgagaacacatttgagtacaaggcccctaatttctggaccttgactctagtctcgaggagccctactaagccaacattttgtgtctgaataaactgctttatcaaattttacttatgctgactattggcccctcggacattccaacacacaaacttatctattgacaagagagggatctcccccctctcctgtctttacttcattgtatttgctccccctatcctctttttcttctattgcttgatcttgttgacttgtctcagctagagcttggaaaccattctctgtatgtgtcccctcagtgataatgatttcttcccttttccagcccttcactactggttggaaacccccttcatctttctcatctttcttttgcttcatctctagttttcctcttttgtcttccttgactatccattccttcttgccctttccctttttcttgcattcctctgtggcatggcctaaaccgaagcaatgtcgacaagtaattggcctccactcatagtgtaggcctacatgaacattggaccccaattcatcttctaattcaatcatgtcaggcaaatgttgatccatgttaacctcaatcataaccttggggtaattgagtcttgatctatcccgagttacttcatccaccattactggtactccaactttccctatcatcttgaataaagacctctgtccccaatacttcaaatcgagatcttcataataacaggtctcttattgaagaaaatataacctccgttgagtacttcatctctatactccatgctttcaaatctgataatgaacactccatgagagactaccttgactttgtcaattttttccttccatagtctgttagcaaatccttccagagtgtgcgagggtgggttagaacccaacacgtagcatacgatcgagggcctccaaaattcgacttcttcttctatgtcttccatagtgattttgactctaggagccttcataacaccattaaaagacgattctaaactcctaattacagtgccagatctcaaaacaggtggtacagaggcaataccttgttgtatgtcactgttacattgcttactcgctactatgaattgttcaaaatcctttcatgcttcatcctgttgcattatactcctcaatgatgattttggagagagagtacgctgaaacatatccataatcatggggtcagatccagctcctaattgatcgcgatcctgatcctcctcatcatccgagaagattaaaggttcagtccctagagattcctcctttgaattgcttttccgaacatcaacagatgatttcgatccctttttctgcaatttcttagtacctgatcgttgtttcccagcacctttcaacctagtttttgccatggctacagccaaggccagagttctctgcattttctctgcaaaagtgatttgacagaggtcagtgaggatcgccgtgccggagatggtaggggtgccgaaaaaattatcgatgctgtaattggtgctctgttaatttggtaacttgaagtatttattattattattattaataatagtcaattatttattcttataat

SEQ ID NO: 163546 - DNA, 2763 bp, Cannabis sativa
aaacaaaaatcacccaaagtttcaaaaactggaagatcactcaaaaaacctcagcatttacaggactgcatctgctctgtgaaaaccacggcaaaccccacttctcaccctatccagcaatacatttcctatcataaactatctccacaattccttactgctatcttatctgcctataaaattactgaaccaacaaactattctgctgcttccaaagacctgagatggaacaaggcaatgaatactgaaactcaagccttggaagataaaaacacctgtattgtcatctctcttctccctggatacacacccataggatgcaaatgggtctataaaataaaataccttcccaatggtgaggtagacagactcaaagcacgattagtagccaaaggctacaaacaaaaatatggtattgattaccttgatacctatacacctgttgctaagttcaacactcttaaaatactacttgcacttgctgtaatatacaattgggaattgcatcaaatggacataaataacgccttccttcatggtgatttacatgaagatatatacatgaaactttccccggttacaaaccagctgggaaactcccccccaaatgcagtttgcaaacttcaaaagagcatttatggccttaaacaggcctcaagacaatggtatgcaaaattaagtaccacgcttctctctcatggctttgttcagtctcaatctgaccattccctattcattaaattaaacaacaacctcttcatggccattctcatctatgtagatgatatagtaattgctagcaacaatgctacaacaattaatgtttttaaaacatttctcaacaacaaattcaaattaaaagaccttggtcccctcatgttttttctatgcattgaaatcagtagatctccacaaggaatctacatttcttaacgaacttttgctctccagttgctcaatgaaaccggttatcttggtgcaaaatcagtttcaacaccaatggagcccaatctcaaattgagttctactgatggccaactcttatccaatcccacttcctatggtagcctaattgggaagcttttgtatctcacaatcacacggcctaacctttcttatgtcgtcaatagattgagtcaatacttagcttcccctagaaaaccacatcttactgctgcccaaagaatacttcagtaccttaaaaccacaccaggtcagggcctctttttttccagcaaagttgaactcaaatctctgcttatgcagaaaccagtctcagcatcaaaattttttctgatgtggactggggtagttgcattgacaccagaagatccatttctggttattgtttgtttattggcaactctctagtatcctggaaataaaaaagcaggctactgtttctcgctcctcaacagaagctgaatatcgagcaatggaacatgccacttgtgaaataacttggatacttgccatactcaaagacttcaacatttctcactctacacttgctgtcctttattgtgacaatgatgctgcaatccatatctatgagaatccagtatttcatgagcacactaaacatgttgacattgattgtcatattgttcgggaaaaagttcaacaagggaagcttaagatgctacacgtcttctccaacaacaatctcgctgacatcttcaccaaggctctatttcttgttgccttcaaggatattatcttcaagatgggtgtcaaagatttatacactccatcttgaggggggctattagactccatagagtttgttagtagttagattagttgggcacgtgttggttagagttagttacactttctattatactgttgtaacaactctttccttactttcttcccatgtatgtaagagctctgctctataaatattgtactgagatattcattcatttcttaatgagaataatacgctttcatataagaattctctcaactaatatagctttcaaaaaaaaaaaagtaagggaatataacttacaaccgattgattttttttctattacactacatttcttttattttgctaaattttattgtactatatttgtattatattaatcttgtaaaataattggtaaaagcaataatttggtacatgtccaagttcagggaacaaaaatcataattagcctaattaataatataattattaactattttttacaaatttgagttacttatttaacaataattacccacaatcatgtagaaaaaattaattataattattaatttaaataattattatcattttgattgatttatagttgatagataaatatttttatattattattattattattaaattattgaattttttaatgtgtcatgctttcgagctaatctgctcgtgcttatatgccatgcctttaggcatatcatgtcatgtcgtgcctaatatcgtattatttgagctagtttgtgcttgggccttttgggctcatgctagttttgtactgtgttgaaaggcttgacctgtatttatagcattaggtccatttatgtaccttgtcacgaatataggatatctgaagagatcataccaatgggtgtgattaggtctaaatacagttggtgaaagtgtgttgtctaaatctcataaaattaaaacttttttcaaagtagtctttgttaactcaaacttttaggtctccttattttgatgattaacaaatatttgattattatttgttactaatgatttgttgattttgtagcaaa

SEQ ID NO: 163547 - DNA, 2552 bp, Cannabis sativa
  modified_base (2464)..(2465): a, c, t, g, unknown or other
gggcataaaacccaacaccctcataggttgactactatgactcgagtctactcaactccatgacgtcatccttcatgccacatgtcaatcattaatgtccgtgtctactcaactatgtgacatcatccttcatgcaatgtgtcaaacattgatgtccacatcaccaagaaaaattttcaagttaacaagggagaatatctccctccatatcccaaaaatctaattctgccacttttggaaagatttaagaaaaagataacttaaatatatcaaatacaaaaattatacttttaaaaaataaatattaatactaaaaaggatattatggtacttttaataacttactccatctccatccttataattttattcctaatactaaacaacacaaagtccatccatcctaaattatgcctctacgttagtccattcatccctccttaccaaacatagccaaaagttttacattttgaagttttaagaaacactttgtcctcaataacctatgatattcccttactatatcacaacaattgctccgtcattctttaaaagataatgccttttttgcttataataataataataataataataataataaatcaacacatctaaaggactcactttataatcaatactattctttattttgggtgactacctaagcaacattttaagaacatctctaatgagaatgcttcaaaaaatactagatgacatgcatctaagtattaccctagtttatattttctctctgcagattttagtcataatccaagttttatttggtaaaatatttgccaatcacaagatctagttaagttcggtgttagacctaccataggttctagaagcactactagcattttttctcatccatggttacttgacccatccaatgcttatgtgacatcaactcatcttggcttaatccgcaaaatggttaactcccttcttgttcatagtagcatcacttgggattctgagattattcaagacatgtttaatgctcaagatgtgactctgatactcgatatgtctttgagtttttctactaatgaagacggctggtcatggacaggaaaaagcactagcttattctcagtcaaatgggcctataatctactacaaaagcaaaaacagcagcagcctagagttgacaactctaatttttggtgaaagttgtggcaactctagtttaggcattctcgatttttatctggttgtagcattcatgcttataatgtcccgcctgatttacaaggccttttgtactctgagttaaattttaaaaaagttgtcatttcatattaaaaaaaatgatgacatgcatctattttcgacgtattttaatagatgtttgccattagagtgaaaaaaatactaaaaaacagattaattgcgcatctcaacttcattttgaaaatattaatgaatttctctctgcctattttattgcctcaaataccgatatatttttatattgtttttgaaatgtatactgaaattaaaaaatatttctctcttctattacactaatatataatacgcctgagctatttatttatgctttttattttactgtttttttcttttacctagctagtagctaaaaccattttcttttgtgtgtgaataaaggtgatagtacgttatatatatatacactatttattattttgactcaaaatttgcaccattgtaatctattttttatgatgatcattttgataagtgggaagcatatattttttgtcgctacaaaaacaaataacgcgaagagtaacttttaattttttttttctatgtacctagttaacaaaaataatcaaactttcatcttaaacaaaattaaatatatcaaccaattttataagttactaagtattgcgtttgatttttcgcaaaatatgtggacgcggatgaagatgacacgtggatctgaaagaaccatcactcacgaaaatcaattaagtcttgaataaaagaggaacaacatatagaagatgcctcccaaaaaagggcataagacacatctttatcctccgggaggctagggccatgataaggcatgtcgaggaggtaaagagattacttgaacaatcacttcacatttaacgccgcatggggcaagacgtattggaacttccataaaagatgtgatagatggcgtacaccccttttttacggcgatcacacaacaatcgatgagtctaatgacgactactttatgaagaatcacatcagtcaagaggagataaaagattatatccacctaactcctaagatacctacggtgtaggtcatgtatttcctattttgtatctactgggaatatgtgcccctatgaagctaacacagatagacaagtgatccattcctagggatccccccagaaaaacactagaaataccccaccaatagatggaaaaggggtcgatcgattttatttaaggaatcnnagagagaaaataggagagaaatccaccaagaacattctctataataaatactctcattaataccaatgactcgtggactaaggctca

SEQ ID NO: 163548 - DNA, 1663 bp, Cannabis sativa
ttatttaaatttgatgctttaaaatttgaagatagaatcggcagcaaataccatgatcttttgttcttttttcacttctaatttaataaattattactgtatatattgattgtattttgaaatattatattaactcttgtgttttttcagctatgcctcctataattagaaaacatgaatttgggttaaattcttaagaaaaaaaaattgaagagttaagtactcaatctcaaagaaaaactcttaataaatttattataaaagaaccacatatttctttagaaaatcataatcatgacattgttgatgttgaaattcttgaaaatatggttccaaatgagaatgttccaaaactacccagccaaacatagtataaagttgcggatctaggtcaattgtcacaattgtaaacacccaacctaattactgggtgtttgagaacgatcctacgatctgattgggttcctgagatttctgacacaattgatcgctaaaataactatagttcgctaaattcagtcaaacatagtatatagttgcagatctaggccgatcatcacaataagttgtaaatcatgcgcacccaaccattacggggtggtttgggaacgatcctacgatccaattacgttattacttttcttgctgagttattatgactcacagatgctttgtagtataggtaagatgtatcagtcgtaagttggggtcttctccagcaagtacatatcagtctatctggctagcgaggccgagtttcctggacatgtgttttatttcgcttttgcggattaaaatttatattttggatgtaattctgagttggcaacttttgtaaaagttttaaatagggatccccgaagttaaaatttgtaatattatgttttagtttatttatttaattaattaagttttaattaaatcatatgttttattaatttgttagtttattattataaactaatttgtagaaacatacacgtagcattcctaccagttagggcatttcaagagtgattaacagaaagagttgtattatcaactgcgtaatttatacaattactgatctttgttattcatcttgattcattagaaacatgttttagtttttcttcatttatttgtatgtgaaataaagaaaatacatgaattaattgtgatatgtataaagtattctcagtatttccaatattattattatcgtgatatagggagtgaactactataaattatcgcgtctttttatttacagtttattttcgataccattgccaattttcttaaatttaattaataaaaaattacgtcaacatttattattaaaaaaactacaaagtttattaaaatttaaatatatgttttcataaaataatgtatatatttttatattaaaaaatttgtttgattttgtttatttatttattttaagtgaaaaataacattggtcaaaaataaaacaaattaaagtgataaatatacaggccaaaacacataatgatgacaaatttgtaaaccaaagcaaagcccaaagggatcagcccaacccaccatgatacagcctcgccacgtggaggggagcttgtaataacaggtagtagttggtgaagaaaataaccggatatttattgcatcgcatcataattaaaaaactgttttttgtttt

SEQ ID NO: 163549 - DNA, 1856 bp, Cannabis sativa
atttttgatataaaatttgatgttaaattagtaattgatggtactttaacaatattatagcgatgctattatgaaagtatgattttttaggcaaaaaacaatgtcaaatcaatgcttaacgacagaatttagagatagtctacgatggtttgcgatgaaatttgtaaaaacaaactttggtaaagcacatattttcattatttatgtgtttattttgagtagcattaaacataaatattttttttttttaaaaaaaaacaatatatatattctatatacactctaacttaagtttaggttctatacaatcttaatcaatttatagatcttgatagttatactgaaattcgaaaagaataaataatcatttgaaactggcattaaattaaatattgtagtttatcaaaaaaaaaaagagttaaatattattgatgtagtcaaagtttttatcaaattttatcgcagatcaacgctatatataaactattattaaaggtcaagtttttattggaccattaataaacctcataaatcagttgttatttccttaacaaaaaagaaaaaagaagtttataataacaatgactaacgttggcaatagaaaataaatatatggtattgattggcataatacctcaaataattctccatgctaatacacgaccacaagaaatgtacggcatcattatatatttatataatcctattaattcagtgtaatgactgaagaattaagcactaatattgctgtatgtacagtatggcattggcttaaataaatcaattcaattgaataagaaccgatacatcgaattacaatcaactgttaaatattagatattcaattgtgattggattagattagatgttatttttaaatatttaatggtgaatggagtattcaaaagtctaatacatctaatatctaatcgaactaattagtatttttattttatttgaatgagtaattagattttatattgttatacgtaaaatctatatgtatatatgaaaattaacattaaaatttactcttttattcttggattgatagatccaatctaattcaatacatactggacttaaaatattagatatatctataaaatctaaaacattagataaaccgatctaatctaatattcaatgaatattagatcgattgaatgactgaaattaattgaatagaatcgaatggtaaaatttaacatctaattaaatcagatctaaataaacctaaaaatattaaatgtaggccaataaatctaattaataagtagcagatctgcagttaatatattaactaatctctctcctataataataaagtcttcttcttctagaacatgtagctagctagctagccagcggagcaaggaccaaagtggccatagacttgcgccataatattctgaggagagccgaacaaagacacatatatatcacattgttcattgtattgtctatgtttttttactcctccttcttttagaaatatataccataaaaattctaaaaaagaaaaaaagaattttattcctcccccttcaccatgatggaataactcgctagagtcgagatatctcagcttagatctgagcaaatcctaaatccttcaagacaaatgaattctatatcctttctccatttgtcatgagctttaaaaccaatagctcaactctctcaaaaaccaccgtcagatggtggctctgccactgtctgtcgttggagcttcggcgtggctttggccgatgttggaaatattgtgaatattttaacaaaatatataagtgtcttagtgtgtgtgagttggaaagagtcccacatgggatatgaaccctcattgacaagggtat

SEQ ID NO: 163550 - DNA, 716 bp, Cannabis sativa
tgtaacatgttcccgatgcccgaatcacgcaatgggttttggatactccgtactggaatttgtacagcccgtcgcctcgatggaaacacttcaagcacgacttcaccactcctctctcttttgttggattgtatttacaacttttacacttttcgctttcgcttctgctctggctcttgctctctctcttgtagtaaattacttcattgtttttcacatatattcctgtaaacatctcctacaattattgtgtatacacatatgcttcctaggaaggatagttttgtaaatttctctattaaggataattcttgattttgtgagttagaatattttataataaaaattaatgaaaaaaaaaaattctcataacaaagcaaatataataaaaattatgtaaatatgtttttctcaagacatcatgacccaatgcaagaaatcttctttaaaacacacaaaagagaatggagagatatgagaagatcatttttattattagggaaaaagctttatatatggatatatatatattttgcattaaacaaaacactcaataaaaaattaaatactcaatagtataaaaaaaaaaaattaaaaagagaacaaataatattaattagagaaatcttattatgttactgtctcatatctatatactaaataagatataagactatttaatataatttaattatttaattaatattcatatatat

SEQ ID NO: 163551 - DNA, 1132 bp, Cannabis sativa
tttttattaggtttgggcaccaaaatagggttggaaagccagacctggtagaaatcttctctaatgaagttattttcccacaacctctcaacttcttccttgatagatttggaaaactatttgtcaaggagcctgcgtttctactagacaggcttgaagttctcttattgatgttgagggcatgacatatgaccttggggtcgatcctgatcatgtcctcatgcgaccaagaaaaagtatcttgatttctctttaggctagccataagcatctcacttaaagcctctgccaggtttgttccaatcttgacaaccttggctgggtcatcattgtgaggggagtttctttgagttcctcggtcggaccaactctcaattcaatatccctaaaataaggatcaatgtcctccccatcttgggtgcaccttcaagtagtcttaggtgcggtctctgtcgtctccttggttgtaacctcaaaagttttcattgtctctctagccttggcgggagaggtcttggtcatccccttagctattgatgtagttggggaggccttctttgcaagtgttagtgaggtgttgtaacactcacgagcgattctttgattgccaagtaggtgtccaatgtctgttgctgactgaacttgacagacaggtggtatatggacgagatggctcggaggtcgtataagactggccttccgatcatcacatagtacgtagacttggagtcaactactatgaacgtttccatagtgttcttctgacttagggtagtgttgatagtcggtggtaattttattttcttatatagagcaattacatccccactaaagccatacatgaactgatcgcatggctccaggtcctggagaaacaaatccatccgctccaagttttgtttgaacaatatgtttgacgatgctctatcgccaaacatcactctatccaccatcatgttggctatgcgtaccttaacaacaagaggatcgttgtgaggataacaacatgctttgagtcagattctctaaatgtgattggcactacaagaaaaggtgtttttgccgacgcatttcgtgacatgcgccggtaaaagttgtcgagactaccaaaattgtggaattccaaatttat

SEQ ID NO: 163552 - DNA, 2860 bp, Cannabis sativa
  modified_base (2806)..(2811): a, c, t, g, unknown or other
ctctctctctctctcttctcaaactaattttttttatcgcgtttcacgtgcagttgtattcttgtttagtgattattaagtcataaaattatgtcaaattttaaattttgatattttaatatttttgatgtaattttttttattaatatgagtaactattttataattttttttacttagaaaaataaactaatatcgtcaaacattatagcagagaaagattataaaagattaaagatgtaaagaccgcttaattttaatatgaaggattatcggataattagggtttaattatgaaattagaagtaataaccataatttatgcatttatagagatttatttaaattcagaatatgctatttatgatatatatgaaatttcttgttttttgtatttgtgttcggtagcagtggaacacgatgttgggccggtagaaagtcacgttttcatatagtttagtatttttgtagtagcggggcaaaccttatagacatcagaaaatgtcgggaatagtaggggttttggaatgaccaaattacccctaagtgtcaaataagcttttggagtatgttaggggcataatggtccttttggctatgggacctttttgttttttgtggacattaataagctgattttattcaaatgggtttgataatttctattaatctttttcaagagataagttagaaaaactcattctctctctctacaactctctctcgaatttgcaaagaaaccagctaggattgtggatttcttagctcatttcagtgaattctaccagagtttgagtgtttcaatctaaggtataaactcttagcatccttctctttgattttcctaagctcaagttagtttttagtgcaaaaatttgtgaattagggttctatagttgtgtaattcgtttgatttcatgctctggagttttattgggattatttgtgctattttaagctaagttagttgattgtggtgatgtttgagaaaaattggagtttgagaactcaaacttggttctctaatggtgtttttaacatctgggttaattgttgagatatactgcttgtgtttgagtttattgtggtatatacaggtgttctggaaggttttgagaagtttggggttgaattgaggtgttgggagtatttttggtgtttcctgtactgaaccggtcaaccagtttatggggacatgtaggaaccgaaattctggttggtccccaggaaaccccacaaaaatggtcgtccagttggaaaaccggtctgccggttggggcagttttgtgaatcctaattttttttatttttatgatatttagagtattaccatgatatatccatcgatagggaaatttccacttttgattttaagttcttgaaaaagtgtgttagcgtgtctttcattagatttacgaatattgtgatatagggtcctgtaaagcgtcgagttgctattccactcaagttgaccagcacacctgaactcggaaacaatgtaagattagcataaagtatgtacatgtgtgaatgaatgcacatttatattgtttacactactaacactggaataattgtagtactgagtatgtagtacaatatatggtgtttaaggataagttacggtattaccaacactagtacacacgagtacaaagtgcatgtggtacaacacccagtaacacggagaagtacaatttggccctaccaacactagtacgaagatggttcaaaaacaataattagatgaaaaacaaagacaaataaagtattaaaaaccagaaacaataaatgcagaaaaaaaaaaatcaacaccaagatatatattagttcaagtctgatagatcgatgtgatttatggctctactccaattctggaacaccacaaaaaaaatcttttttattgattgagcaagaacatgtacattacaatcgagatagattctctgttgagttctctcaaagtgtatcaactctcacattcttacccaagaattttcttcacacaaaatccaaacacggtcttttctcaatacctctctctacctctcaatctcaatctaaatcatgtgatcttccttctttttcaaatacttaagtaggtggtatttatagccttaagattaagatcctaaagtcggtgagtgcaataatagcgaactaattagtcataacccaatccaaatatagaaaagccaaaatatataatattatgataagttatatgaacgttttctttgttttcttaaatcaacatgttattaatcgtagtactagctagaaagaacaaaagaaaacttagatttgatttatcttataaattcctttttctttctttaatttttctttatatatatttgtgttaggaggagacaatacatttgtgttgggaattaattacttaattggtatatatagtgtagaggaaataaagatcgcatgagtaaaagagtacatgcggcatgcttcaaggcatttcccacatcccacccttattcaagccattttatcctccctacaaatcttgtgtgtcgttctcatgccatataataataagtacttaatcatctacttagtttagaaagttattgaggttataatataatgattatcatattttaactaaattgaaatagaaagacaaagctggaataaaatcataagggttactaagagaatattcataatataccctagttctacacttcacttcacaaataggccattacaaatttcactacaaaaaactgcaatttttagtgataattttttagttacaacataattttttgtgattaaatgtgannnnnngtcacaacaaaatattacttgtgattaaagcatagtatttagttacaag

SEQ ID NO: 163553 - DNA, 3204 bp, Cannabis sativa
gagagagagagagagagatgtgtctaacctgtcgatggaaccggggatgtccatctacgaaggctcaggtggctatggtaggctaaggtggcaccgtaggcttgggctgaaacgtctctctctctctctcttgcacatagagagagagagagagagaggtctgaacatgaaggggtgcatgtaagttaaaaatgtgtatttatatatatgtaggattttatttgatatgtgggcttatgttattgggaatttttttgtcggcttagcgtcggtttataactgacgccaattcttagcgtatattataaaccgatagtaatgggtggtgtctgttttacactaacgcttaattttaatagcgtcggttcttaaaaaatcgattttttgaccaacaggaatgtccttttatgtagtagtaaacactcaggcttgtcttcaatgggataccatctctgatcatttctactgcctagtgaaaagtgtcaaggtgagaagcataggcaagtgacctttttcatttctttaattgttgggtttctcattctaatttatagacttttgtgatgaattgttggtcttcaccaattcaagagatgagcttacatggtgtggttaaaaaagctattaaaatgttgaaacatgtgctgcatttttttaataaaaatactattggcgatattcagctgccaaaataagattacagcatggtcaaatgactctcgattcagatccgtcaaataactcttttaaatgggaagaacaaaaatcccatgagcatttcaattttcattctaatatgtgtgaggagttcttgagtcacaaaagtaagatcacttggctctaattgggagatgagaactctgcttgcttccacacatctttaaaatagaggaaggctatgaacgagattgtttcatttacttctaattagggttttatggtggatgactacaattttatggtgaatcattttgttgcctatttcaaaagtttaacggggagtcccaactcggctactatctatctcaataccatggtattttctcattgtaacgttctagatcttgagaagcaattgttgttgataaaaccttttactagaactaatgttatggaaaagttatttactattaattgtattaagagtcctggtcctgacgggtatagcttgggttttttcaaatatttatgggaagatttttggaatgaggttgttgatgttatgataaatttctttgaaataaattctattccaagtgtgttaaagatgacaaccatctcattaattcccaaagtggatgacccccttaaaatagttgattatcggcctattacttgttgtaacatcttgtacaaatgtatttccaagatgttgtggactagattcgcattggtgcttctttttttagtgaataataattaataacatttgatcaaaggtatatctatagcacacaacattcttattttcctagatctactgaagagctacaacaacacacatgtttctgcccagtgtttgatgaaggtggaccttagtaatgcttaagatatagtagattagaactttttagagagccttctgaagagcatttttttggccgattttatcaagtgggtgattatctagttgtggggtacttcttacctcctcgtgatgaatggttgtgttcatggtcaatttaaacaagagaaaagccttaggaaaggtgacccgatatcctccttgctttttgtcctaatcaaagaatatcttactcgtttgtgtactcaagcctcaaagtccaaggattttcatttccaccatttttgcaagcactggggcttaattaattgtgctttgttaatgatcttgtcattttgtttaaggatcatcccccgagttctcaacttctgcaacatgattttttagagtttttaaacgcttcaggactaatttccaacaaacagaagtctcaaatttatttttggtttactgtccaagaagctaagtcgatcattctggacattatgggttatgagggggttcttttcctttgaaatacttggggttccgtttaacacccacaagatggagagtatctaactgtgggcctattatctctaaggtctaacatcacttagatacttgggctacttgaaatatctcttttgctagcaggggtcaacttattcattatgttttgcttggtatatgaacctattggatgataatttttcttcttcctcaaagtgttggcaaacttcataaaaatttcttatggggtaccaaggacaacagatgcaagctttacttttcttcttcggataaattttgtctcccaaaacactatgtgtgggattggctttagagagggatcaaaatggaataaagcaatggtcaataaatacatgtaggatattgcttctaaacctgatgccctttgggttaaatgggtacttgaaagggaaaacttttggaatcacacgactagagggggccccagtttgtattggaagaaactcctcaagcttagattgaccaatctctcatttcatgatacatgctactagtgcaaatggaatatttaaagttagcaaattttacaactctttccttgattttgataaagtagagtatgctcgtgtggtgtggagtagactcccgattcccaatcataggttcattctttggaaaacggtgaattcttagttgatgaccagagaccaacttcaaaggttacaactgtctatttcttcttcataacgtccaatttgtaagactttgttgagagccatgaccatttttttctttgctccttctatgttgtgttgttgcgcaagttccttggatgattggattttacaacttggcctattgtgtattcagattggagggtttggattgggaagttgggttctgatttacaatgtctagtgttgattgttgtggttaagtttatccgagttaataaaaacctttgtctttttgattctagtttgttcatcatttagtattctggtgatataattaaacaagcataaaagctcattttagttgcttacatagaaggaaaatatcttctaataataagcttattgctaatgttgtgaacaattaagggccaagatgcaaaatggccctaaatctaacaattaagttaataaatgtcccttttttaaaaaaattaacaaaatgtccttttagttaaaaatttgatgata

SEQ ID NO: 163554 - DNA, 3766 bp, Cannabis sativa
atatgatagaacagtagctagacaggattatatatatggctaggacaaatttgaaaccgcttgctgacttaattagaataatcatttcaaattttcaatatacatatgtttgcaaagagactaacaaataacctcaattagtataggttaaacattttattatggccaacttattataatagcgatcttcaaataaatttaaattaatcaagaaattaggatattagttttggtgttatatattctttatgtttgttattttgagatggaacatttatcttatcccaaattacatcatgttattagagaaaaaaaatacctctagcgactatccgactcaaaaaaaaaatataaagcaatcgaagtatagccaaaaataaaatgagccaccgaaaattcaaaaaatttttatcctagaactaaatcaaaaaaagccacttgtgattcgagaatagtgagccaaaaaataaaaagagccacaaaaaaataccaattcaaaaaatagagcaaaaagagtcacttgtgattaaggatagtgagccaaaaaaagaatcgcttattatcgagttgtccaagatggtgagcaaattaaaatagccaccatcttgaggagggatgttagatagtcccacattgctaatgtgtggaaattagataatagaatatataagaggaatggactactcctttcattgccaattggttttgagatggaactctattcatcttatcccaaattctatcaatatcactacaagaaatgtcacttttgcaagcacatttttgtgttggtaaaagtttggtattgcgctggtgaaatagaatttacttctgatgtgttggcaaaaggggttggcaaatcaaacgttggtcgtatttagaacttttgcctgcacaaaatgaaaaagcgttggcaaaaatgatttttcgcaacgcgtaaatgcgctggaaaaagttagattttagccactgtaaatgtgtgctggtaaaactttgacctttttgtcagcgcagtttgctaaatccgctgataaaattacttttaccagcgtaatagcgatttgtactggtaaaagtgatatttcttgtagtgaatgttgttaaaatattttgagtcaatgtatggaaatatgaatggggttgttgtatacataatatatgagcacttttcaaaagaatttatggataagctagtttattttttgaacaaaacgtcgtacgtaattactaaaaaaattgatcatatgttttcaatttcaaacctcattgatctgcaaccaatatctaattttcatgccaaaagtttacaagtttattacaatttatgttgtataatgtcatttgacatggaaatatgcatatgaatgtaaaccctaataatatacattttatcggagttctacatttacatgtctaggtacgtagtaattgaattgggtgctatctagaaagaaagaaataacataaagagtgctgatttaacccttacatacaactgaaaaagagattatatatatatttatataaacatttgtgcataattaatctcaaacctaaacctatatatagatccgtacatatatatcccaatacctagctatatatattatgtatatatagctttattccataaccataaaaaaaatagaactgcctactagtactgctggttgatgaatatgtacacatatcgatcgaatgagttgttttgtattgaattataactatcaaatcctagtacaatgatcattagattacctaaaatctatcagaatatatactgtattttatcataatatatatgtataaagagaagaataattgggtacctcccataattaaggctgtcgctagcttccttaaagacaagagaacttattaaaggaaagagctatctaaacaaaatcataataataaggtttgtatatatacacgcataaacataagtcaatcttaagaataggcttcttctaaacgtaggcatttacaagttgatcaagaataatcatatatgtagtgtagagactcattattttattagttttctccacaggtatattaattcatgaactacatcaataagagtcaacgaaataaaaatcaatattatcctaagcctagccagctaggcttttttaatcactttttataactaataattaaaatattaatactattaagctattagcaccatattctgttgtcattatcaccaaatgaaaatgctccacgtattactatttagcacatttatatatttataatattaaaatactactatttcattttcatcatatatatatatgtgtgtgcatttttttcttgagtgaaacattcataaattatgagatacgatgatgatcgaaagtgatggaagtgaagcatactatatgatctatatctaactatatatattaacaaaatcaaagtgaataacgtagtacttacagagagctagaatttataggtatatgggtcttcttcttggtcttcgtctaagttcattcacatggaaacagaaggaaaaacaagagaaaactagtatgagaaacaaaactcgtcactagccatatatttttttacatatataaaattaattagcttggcaatataataggtttgtataaattaatagctagtacagcaaacagcgcacataataaagtttcgaaagtttgatttatatattatgatgaacttttataggagcatgtgtatatgtatacatatgttttgtagtacaacatatgcaagcttttcaagtacattgttatttgaagtagtacaaatgttgtttcatcgatcgtatgtagtccaccacaacattgttagagaataatgcgttttaattttatgtacgtaccttttttctagaactatataatattttcttcattcatttcaaggatcactagtacgtggcatggcacgtgagtaataaaactagttataattaattatcccttcaaacaacttatcttcttgatttcaggaaaaaaaaacagtaacttatcttcttgcagaaaaaacaatcacttatcttcgttgttacgttttttttttatcatattctaattaaagtatagtaacctatcctttttatgtgaacaccattaaatatataagaaattacaaatttaccatgatgtcatttgttaaggttgaatagatcattacaatgacccttatacctttattatgaagctacattaggattaaatattcttaaagagtaaaatatacatatttacatataaaaataattactaatattatcttaaagaaccaagatgcaccactagcttgttttgttttgccaaaagaaaatgcaccacttgttttgttagaaaaaaaaaaaaaaaaaagcacggagagtgttgtttaataatcaaaatgaaatattaacggcaaaattaaactttatatatatttttttaatacttaactataaaaattaaaattttgacaattaaacttactgaacttaaattttgtttcgctcattacactttcatttaaaaattttaatggcctatgtaatactaatttaaataatataaaaaattattttattttatttattttttctttttttttttcctatttttttttctttttcttcttcttttgaattgaacaaagaacccaaatatctccactctctctcccaatttctattgggaaatttgattttctatacttaaaaattttcaaaatttcttttttgaaccaatacattttacactatgaaaaatatgactctttt

SEQ ID NO: 163555 - DNA, 1338 bp, Cannabis sativa
gttgtttattttgtattactgctaaaaattataattttatgatcataatgtagtaaagtgggcttttgcccataattagtctggacaacttgctatttcgtttatacatagaaacctcttttgtaacgattagaaagtctaaactttattttaattgaacgtttactttcaaaaaaaaaaaaaaataaataaaaaaaagacaataatggtcattaacctttcaattaactaagttgcacaagtccagtcgtccacttaaaaatctttattcttgtatatagtagatagataagatatgagtcatatgacccgtttagcctactaagccaccaaatccaaaacagtctcccatttccatcaaactaaaatattcatattaaccacagcctcaacaaactccaaatgtatttttttatttaccaagtggaagtggactagcaatgttaataacattattctatcattaataatcatttgaaagataaacacactaaaaaaaaccatgaaaaatattcctaatactgcatattcaattcactgcacatgctcatttcttacactctgttataacttatacacacatgtggcttaggaataaatgtctcttttctatatatgatatgatatatatgatagggggctgtactaaataaataaataaatatatatttccatccataaatttgtatatgttgtaacaaagttaaaaaagagaagaaaaatcattagatagaataaagcataaagtatggacacatcattgagcagtagtgggaagttgtggaatgaaaaaaagaaagaagggaattttggcaatcattaataagagagtcaacgtggtgcttcctctctatgccttcttcttatatttatttaattttattggctaataagtatgatcattattagttattcaattcaaatgcaaattcctacattttaacccttcaaaagtaaagttacttgttaatatttttttaacagtgtttctttctttatattattgtgtattgtaaggtgggaacccatggaaaaggagaaaatctaacataattagagcttagatatttcaattatttaggaaattatattatatatttataaacaaaagaataaaaaaggtaaagaaggtaggagaaatggtgagtgagatgttgtgtggttaggggtgttgttgggttgtccattcaatttttgatttgaagaagagggaagagagacctaatccattctcaccacttctcttagctttgccacaaataattaattaaataatattatgagttttttttttcttttaaaaagaacacacattaagctttcaaaaaaaaaaaaaaa

SEQ ID NO: 163556 - DNA, 1466 bp, Cannabis sativa
cagcaaccctcttagaatctgtttttacattagtgatggacaactttattacttggcaccaaataagagagtatttgcagagcaagagcttcagcatttgttgaggaatatgtcccttgtaaatagttagccaaactagcaatggcttcccctttatgatttctaacagctgctctaacaacaaaagaattcttctgtttgtccatagctatacacattgagttttagacctccaatatttggtggctgccaaaaatgttgatctcttgttgaattcacttgtttattttcctgccatttgtttatttgaacctccttgtatgtaacctgcaaccttcctgcactggaataacattcttaccaaatatcattgcatctctattgttccagatcatccacaataaacagtgtttagaaatcaattcaaacgcatatagcagatattctttgatgtcattatttttgtgtttattatagaaggtttcatatggagaatggttccaaattttcctagctctagaacaatctaaaagtgaatgggtcatggtctcattacattggaataaccttcctgttaaagacatttagacttgatgggaggatatgacaataagatctccatgtgaaatgaccactattttagggggaatctcaaacactccaaagaaaggaccactattttatgatagggttagaagtggaagccgatggtggcaacgaagctgtgataagcagatttaacagtgaaattacccgaaggatcatagccccaaaataaagtataaggttggttagtgtttgacaggggagcagaaataattttttacactagctctttatgaaataataacttagtttctttaagtcccaaaagcccatattgtttatgaagaaggaaattgtgggagaaggggaattatcaaaagagttatatatgatgtatctagtatgagggatcaaatgatcttgaagagttctcatagtttgaccatccccatataaggatttgccaagtgaaagagggcaaatgatctttatttgcatcaaggaaactagagtgattgaaatatcttgctttaagaaggataggccaagattatttagctaacattactaggttaaaatggattggagatctaaatcattaacctccaaagaattttaagtgacaaaggtcaaaccaatattctagtgaactttagagctattaccgaaggttcctcaccaaaattttgccataagagattcagttttgctacttatatcaacatgaattctgaagcaagacgtagcataagaaggtaagacttgtatagcaacttttaaaagcatttctttaacaactttggaaaaggctttatcattccatgaattaagataagatttgactttatccaccaggaactgaaaagaggctttcttagaactcccatagcattggggctatagaaggcttatcatttaga

SEQ ID NO: 163557 - DNA, 3010 bp, Cannabis sativa
taagcaccattggtccaactcagcataaatttgtcaaaactaactaatatagtacttaaactagtgttgaaagaaacataaatgtattaattaaatctaatacatgttgatttaagtgatttaaatggcatgcttactgtacatcatcttcttttatagattgattgttctaggttcatttatatgtacttacttaagggtaaagataagacatttaacatgtttaaatctataaattagaagtagaaaaacagttaaaaacgaaaatcaaaatacttgaaagtgatagaagttgttaatatttttccaataaattgaatatgtattgtgcatgatataatacataattggtatagcagatggaaagaaaagaacattcttagaaatgatatagaaatgctaagctatggtatagctggtgaattataatttgtgagttttagataacggtcctcttcaagacaacaaaattttaaatgtattttttgagatagtcaatctcccaattaaaataaaattataatttcttattccattctttgatttgtaaaataactttacatatttatactataaataattaaataatactaacaatttactaattaacctcttatatattttcatgtaacagtgaaatgaattatcgtctttgatttgattatacgttattattcttgtttataggaagagatgttatttcatttattttgtattcatggaaattattttgattatcctatttaattatattaactgttttcacgttataatatattgaaaatcataaaaaataaattattcttttatctatcgcacattattttaagagtgtaaatgcatcgagttagatctgatccggctatgatctaatctgattcagatcatgtaatgatctgccccgccccgtcccactagaccagatactcggattagatcagattcgacccgacttattcagatcagatctgatctgacctgatttttttcaaaaaaaaaaattaattttttttggattatttcttttaatttttttcggatcttattcaggtctcgggaccgggttcgggtccaggtcccgagtttgagtctcggtccgagtctcgagattgggtttgggtccgggtccaagtctcgagtttgagttcgggtccggtcccaagtctgggtctaggtccaggtccgatcccaggtctaggtccgggttcgattccagtccgagccccgggtttggtcccggtccagctcttgtctaagtcctgagtctcgagtctaggttcaggttcgggtccgggtctgggtttaggttcgagttcgagtttaagtatgaattcaagtccaggtctaggtcccggtctcagtccgggttcgggtcccaatccaggtccgggtccaggtccaggttcgtgctgggttcgggtccagtcccggttctaggtctgggtccggggtctggggcccgagtccgggtcatgagtctcgggtttgggttcaggtccagtcccgagtttgggttgggtccgagttcggatccagtctcgggtctaggtctggtctcgagtccgagtccgatcccaagttagggtttgggttcggcttcagtcccaggtccgagtttgggttcgtctacgggtctgagtctagtcagggtcctgggtcccaagtcccgatctgggtccgagtttgggtcccaagtcctaggtttgggtttgattttgggtcgaggtctaggttcgaatcttgaattaagtttatttttaatatatcaaaattggattagattagattcaatccgaaaaaaataaatgggacgacggatctaatctgagatccaataagtatccaaatgtttcggatcataaataattcatcgaatcgtagctctgaccctatctaactaaatgaatctttttgatataactacattatttttggcatgtcatatactaaatcgaatgtataggaagaagaataatatctctctatgtgagttattttaaagtgtaagttatcttgtatattgcaagagcaccaacttataaaaatgagataagtagaaaattattattttttattatacatttattaaatataactctaaaataattttaattgataaatactctctttcataatcaaagtacgaaatataacctcacatatcttatcaacattagaatctctaatgcacataatgaggatatgacctataaaattgggtataaattaaaaaaaataaaataaaagtaaaaattaaaataaaaaataaaaagtcggtatataatgtaattttctctataaaaataaagttggttcctaaccggcccgaccctaggcatagggggttaggcctgtgcctaggcctcacccaccccatgggccaaaaaaaaaaaatctttttaagaatacaaatatttttttactcatattgaaaataccatatttttatcctaaataaaggtctaattttcttttttcttatagtccactaaagttcagcattggctttctagatcataatatgtgtttttattgtttgtgttattattatgtataaatataatattttatatttgtattttataaaagttactgatcaaatcttttattttgttagatgataatcatatttctgttcgtactaaaaattgacttcaggtttattttattaatgataaaatgacaaaaattaaactgatgacattattttgcattattttttaaaaatatagaatttaaattgtcatttaacaaaacacataacctaactgataacttttataaaatacagagtttataatggtatttacaatattattacaatgaagcttataaaatttagattccaatgtgattattgaatcaacacaagtagagtgagaatattttcaaaaaaaaaaaagtagagtgagaatatgttatcaagtgatgacacatacctcaagagcttatggtgttggaagaatctcctaggctagaaggagtgtaacgtccccgcttcaagcctcca

SEQ ID NO: 163558 - DNA, 1314 bp, Cannabis sativa
gactttcctgaagagtgtacctctcgatcgcaggccaaaaatgactcctgacaaggaagtcacaactctattgaatgtcaatcctccaatgaagtagaagagtgatgttcttcgatctcccctaattgatctacccaagaaagatcccaaggttgttcaagagaaagggaaaaaattcacggtggacccagccactaaggtgcgcgatcttgtggctttacaagacacgtttcttaacaatgagtttttttacggccctggaaagtgcacctatcttggagtcttggaacaagtgctcaaaatatatgttaaaagggatgtctgactattctcattcctttatggacacacactagatgcttaaagactgtgatttgataaagaagcaaaatgttgccttataggagcaaatgaagaaagcaaagatgtcactgcttttacaaggagaatgtagtgttggacatgaatacagccttggaggcagagaatgagaaagtgatgaaagccaaaaaaagttgtcaatgatctaacacatgagaagaaaacctttgaggatcaactaagggaggagaagaagaaatcatatgaccaagtagttattgattacatctacaccaccttgaccaccatcccttcattcaacttttctgtcgttggtcaagaggctattgatatggttatttcttttcacaatatgtctccaatggaaactcaaggtgtagtggggactccatttcctgaagttacgaacatcgaggttgaagtgattgtgggggagactgttgaagagaacgtcattaatgacaatgccctagcttcttaagttttttttcttcttttaaatttagtggtacgtgggtactctctatatgtactaagttcaatttttgttaagcacagacaatggcttcgttccattactttaaatgcgtgaatgttatccttgcactttttggttctacgggtaacttaattagtatttttttatttatcaacttatgtgtcctttcatggggtttattattgcaatcgatgaaaattaaagtagcaaactttaatggtacgattcgaacatctctgcgtttttaagtatcgctcataataacaaccgattacaaaaaatgcaaagataatgaaaattctaaaaaataatatgagaaatagaatatgcaagaaatcattagtacttatgcattcaagtgtcataggggtacttacacattcttgttagacttaggaaattaaatagacaatgaaaattgactaagtatataaacatgcacgtactactgataataatactttaaactctcg

SEQ ID NO: 163559 - DNA, 4882 bp, Cannabis sativa
caaatgagtaacagccagtgctcctctagccaattggataccatgaattctccccaactcttgatctctagaaatgattcttgacagaacatcattacacaagaggaaaagaaagggagacatcggatccccttgccgaatgcctctcttaggactaagcttaggaagaggcttgccattaagcagaatagaatatgtcaccgaggagacacactccattaccgtcttaataaagtgagaattaaacccatgaagttggagaaccttctcaatgaagcaccactcaagtccatcataggctttgttcatgtccattttgatagccatcagtccacctttcccttttttcttattaataacatggaccagctcctgagaaagaatggatgatttagctatccatctccctgggatgaaggtcgattgatacggagagacgatgcaatccatgataagcaaaagccgttgagaaataatccttgtgataatcttgtaaatgaaattacatcgagcaataggtctaaattttttcacggaatccgcattatcacattatttacaataaaaccgtgaaaaacaccattatttaattttttttatttttttaaaaaaaaaaaattaacatattctaccaattaatagaaaaataaaatagtaaattttatatgctaacaataatatgagaatgataatttattattattttatataatacttatttaataatgattttttaaaaaataaaatatacttttttatagcaaaaattaagtcattattaactataccgtaatatttttctcaacttttataaactactacaaagacacattctaaaaagagaaaacaaaatatagaaagaaaagagtaaattccttcaaaaaaaatcttacactaaaaacaacaacaataattttgttaggaacaaaggcaagaattttgaataaatgttagtagttgtaagctgtaacgtcctgatttcccgatttcccaagacgtcacacttgttaatctgtttaaaactatttataataaagacaataaactaatttattaaaaataacaaaagaatgaggtctcattattttgaaacaaaaacacttgattcattcacaaacttttataaaagtaatcggaccataatctttaatgtgataatcccctaacatgtaattcacacctcgaactcgccatcctcactacaattctacaattctacatgtaagagctcaatatctccatcttcatacccgttttgagaaacatataatacacatgaactaataatgtaataaatttcttattcttaagaaaaacaaggcaatttaacaatattaagatagagagaaaaaacatacttgttgcatgtggactgaatatggccaaatacacttaccataaagaagaggacccatcaaactctattttaatataaaaataatgcatcttctatttaaatacatatatacaaaaatatagtaaatatcatgctatatatatatatatatatgcaaaaatgtatgtagctgaatttttattaatgttaaaagttaaaaaattataacttcatacacattacaaacattataattaatattataacatatatacatgagacttataaaatgaaaacacattcttttttctttcaattaaatagccagggcatgttataatattagtaaattgagaaaaataagagagcaagaaaattagaagaaagttcatataaaatgacatgtcattatgcttagtaagaacatagtcgacttataatttgctcaagttgtgatttatattgtttttaatcatgatcaaaaatacagattataaagtatataaaatactctcactaaatataataagatatctaaaaatattttcaagaaaataaaattttaacttgaaaataattatatatgtaaattgcaaaataataatatgtactcttatgcagagtaaaaaattaaacgttgtgaagaaaagtattataaaatgaaattgagtctaaatgtatatgtattatataatgtatttctagtgataatctttcaaagcaaaaaaaaaattacctaataattttgttgcaaaatgtattcattggagaagaaacttcatatgtgatgccacatcaacctttttaaaattctcttgataaaattgatatattgatatatacacaaatataaaatatatccttaattttttttttttttgtaattattataatccataaactcttcatatttttttttgtaattaattatcatttatgaaaatttgtatttgtagtgttaattagtaatattcaatataaatatgagtaaataaaaataatgaatttaaactaaataaaaagaaaatttgaaaaatagatcattattgaaaaataaagaattaaaaacatgacttcttttatacattcctttatatatatatatatatatattaattcaaggaactttcttgatgtttggtagcaaaatttaaatgttaataaagttgattatctttttttttgaaaaaaaaaaaattgatcattattaaagaaacattcattatttgaaatttattggttattatacttttccattttagggcacttcaaaaatccaagggatatattggggtggttctgagagaggaaaaaaatgcataaacttggacccttctgtctttaaaaaaatgtcaagattaaaatttcttcaactatcgcggggtaagtggaaccatggcttcaacgatcgatttcagtttcctcatggcttagactcttttcctaaagagcttcgatatcttgactggtatgaataccctttgaaatccttagggtcatcatttacactacacaatcttgttcatcttagtatgccccgtagtgagcttgagaaactaccagatgaatttcaggttcgtaaaataatttaataaacatttttttgtctctttatgtaaatgcatccatcaaattattagttgagatttatatattgtaaattttaaaggtttgaaattaatttgtaattagtttagtttagaataagtagatatataggaatttattgtgtttaatggttgttgtagtaaaatgttgaagtaggtagtgatattgaagaataattgttggtttagtataagagaatagtttggcttagaacagaaaatcgcatgagaaagcacgtatagtaagcttatttattgatagttgttacacacttcggaactcttgatagggtatttatagttgctcagctcttacacttctttgtggtttaatattatttcttctagagatcctatttcttttattagaagaaatctgttcatgttcctaaagttcaacttaactatagtatattctagacaaatctaatctagctagattatttcacttaagttgttagagatgtttatttaaaaaattgttgtgtagaaatttctaataatttaattgtcaatcacaatatacacacattgacactgagtttatgtttgttgtttattttataataatcataacaacaacatgcatgcaggatcttgaaaatttaaaatatgtggatcttaataggtcagacaagttaacttgtctcccagatctctctaaagcgaatctttggaagctagacctaagaaattgcacaagtttagttaagcttcctcctttaaggtttcacaacagtgatgatgagaatcatgatgtaacaagagaagcaaaagtaatatactcatatgaaacgtatctttggtttatggatcatgaggaggaggaagattatgatgatgatgatttaattaattatcacttgaatgattgcgtacttgatcttagagggtgctgtaatcttacaactgtgtcaaagattactggtaatatcaaattcctacttttgtctggcacagcaatagaagaattaaaacctttcattggctctcttaacaatcttcttgtgctcaaactgaatggttgtcaccatctcaagattcttcctgactgcctttataattgtaaatcattggcagttcttgatatgaatcactgtaagtccatagacaagtttccaaaacttccagaaagtatacaatgtctagatttgagtcgcacatcaataagtgaagtcaattcagaatcctttcagtccatgcctcttctcaaggttttgtacatggattattgcaccaagcttgaaagcctcccaaacactatttgtaagttgaagtctattaagaaactgtcattttactactgctcgcaactcaaaagatttccagaaatcttagagcttatgacgaatctacaagaacttcacttaaagggaacagagattgatacagttccaccatccattcaaaatctatcctatcttgaaatcttagatttgagtgaatgcaaaagtctcaagtctattccattgtctaacatcgataacatttgcagcgattctttaactgtcgtcattgattcaaaacaagatttggttgttttgttttcgattgatgttatcatttttgaaacgcttcgattcggccttcgtcaagactttcgttccgatacaagtttgatctccatcctaaaatggtctcatgtacatcacaattatgaattttggaaagatatcaatagctgtctgagccagttgatccgtgttatatacaacattttaaagagcaaaacttcccaggataaaatattcataacacactcatctgataaggaggtttatctctaattcttaatcatatatacatatggaatgggtagtagtattagaaaaatttaaatttttatatttaaatttttttatttaattaaaaaaaatctctcatttttatattagatgggctgttattattcaatccgctgaaaaaatttaagaaaaaa

SEQ ID NO: 163560 - DNA, 880 bp, Cannabis sativa
  modified_base (778)..(802): a, c, t, g, unknown or other
  modified_base (852)..(854): a, c, t, g, unknown or other
ggcataaaacccaacaattaccacctgtgtgtttgaggctatttggctatgcaaaaataattgtgtctttcatggcatggtcccttctatcactgatactctgaacctaatctccaggagagcagcagacttctctgctattctcaacagggatggcaacttaatcactcaggtgggtgagcctttggctccatcacactcccaggcaagtcatgggatacagtttgatgctagctttttagtcgatgcctctgtccttgatggtgtggctgggattggttttgtcctaaacttttcgggggttgagaatgcaatcaccatccattctcattgattggcttctagtgtgcttgaagcagaattggtagcaattctgactgctacagagtgggcttgggacaatcgctgtggatcaattctaattgaatcaaactcgaaggtggctgttgaggccttggagttgggggagttacctctggcctggggtgcttaccctgtttttagaaaatgccttttgtttgctactaagtttcatgttgtttctttcaagtttattcctcgtgagttgaactccttggttgatctcctagtttcccaagccagagtgaatcgtttatgacaaacttctgtggttagggagtaagccccctttgtggctgacacttgagactctgtttgtgtgttttttcttgttttgttttaatgaaggcaagttcaaataaaaaaaaaatagaggactcttgaatagttgtactccctgttgggttttgtgccctannnnnnnnnnnnnnnnnnnnnnnnngttatcaatttagaattttgaagtcatttatgttaacatgtatttttcannnttatggtttaatatacatatttaata

SEQ ID NO: 163561 - DNA, 2342 bp, Cannabis sativa
aaagaaaagagagaaaaaaaaatagaaaacaatttccatttataaaaaaaaaagtgtgtttgattagactaaaaagggttatgttatgtcattctttggttttaaacaaactttttaagagaggggtataattggtattgtaaagcttaataaagggtatatatggaaaagaaaaaaagacagagattgcttgcgcaaatctagctaatctaagcttttggggtaagcaagtaaaaaagtgagttaaggggggccttaataaaacaccaaaaaaaaatgaaattaaaaagaaaaaatattgttaattgtgaagtttgtttgtacgaacacaaaaataaattccacttctttctttctcaacatttatttggcctcattatgttgagattgacaggcatactaatactcatatatttatagttatagatatagatagagagataaaaaagagtctcgaacaacacactccaaaccacttttgttaagcctatttttttttctaccctttatacgaacaacaaggcaaaaaaatcaaagaagggaagaaagtgaaagcaagaaacgtacacacaacaactacttattattattattattactttctttaaaatcaaatccttcttatgtttttcttttcctatctttgtttatgctcccaccaatgatgttatctttattattattttttttttttttgaagatagacaagaacccatctttatttcttgtccatagaaaaagaaaaagcccatctttttgtttaatctaattttatgtaaattttgttgttgttgttattgttgactgaaacgacattgtgttttgacaccataggtggatggttgaggaggtgggaaacatggtggtggtgggggctatggcttcattccccatttggattttcaatgaagaaaaaagctatgaattttcttctttcttgaagaaaaaagttgtattaataatggggtctattctaaatgaggaggaatattattggtctaaatgtattagtagaagaagcaagtcaaccattttcaagctccaattcttgaatcaagttcttctcttactcaatttcttcttcttctatggattttgatgatgatggtgattttctatggggtgatattggcgggaaggctcaatcttcttcttcttctttaatttttttttttttggtatttttatgataatgtttatttatcttctttttgttatatttactcaaagaaattaataactcatcatcataatcatcattatcttttaccatttttattttattatttattatttgttttatattaatagaattgggttatgaagagttcttttcaaccttaaagggatggtccttgttaatttctatctaatgatacattattatcatttttttttttgtgtatttaatttttgtattttgtgcttttttttttctctattcccaagccaacaacaacaaaaaaaacttcaatctcatgtgaaagaacgaagaagacgaacgttgcccattttgtcacaaagtcacatctcattcagctcagcagggttggttggttggtgagtaaataaataaatataattttattaaaaaaattaaaaaaaaaaacattttttcattttttttaatgtctctccaacatctgcagagacttcaatgcatcaaaaacactgttttatcatggattcaaattactgtcagccttttactatttatatataaatatacacaatagaaagggatacataatacaattttattttgctttctcgagaaaatgtggggctaaaagaaatatatggtgttgtatgtatgtatgtaatgtaccatcacatgtttattttttgaattgtcaagttcattttccaagttgtatgtttgtgttaagaaattactctgcccatttaggctaaaccatccatgttgttttaacatcaatatcattatcatcatcttcttcttcatcaatcatcttagtgttatcttttcagtttgtctttttagtgttggctgaggtgacaatgcgatttaagattgcgggtgattgatggggtccattaggtttggctcaaattggcttatagggttttaccaccaatagtgtgtctaatatcaccaccatgaggtcacatttaataagtttttttacttcaattttttttttcttttttattgttggttgtagttatttagggtcctaaatttttcaaaattatcaaatagttttcaaaattaagattaaaatatattgttgcacactattataatttttggaacacgattttgtctcgtgatgtactttcacggaatatatttagtgatgtacggcagccgttagatg

SEQ ID NO: 163562 - DNA, 3284 bp, Cannabis sativa
tacaagtaactggagccagtaagggctccctcgtagccttggtagcctctttttgagtccggtcctggaattcatgaagctccttgagttcaacggtcagattggccgttgtctccaagtcagtccggtgcaactcttctagagacttaagcttcacggcgagttcctagttttcctctttagagtcccggagatcctttctgcctgaagtaatgatatcgtccttggcgttcagtgccgcctgatgatccctctccatgagagccttctccactagagcctcgtcacgaagggcctccgaatccctgagcttcctcatcacccatccatgccaccgaactccaacacggtgaaaccttgatcgataaaagtctcagaaagacgaccggcctccgcagcaatttagcaacaaaaatgatgaggttataattttgaaaataaagcataaaaggaggcgcaaaaaattgacacttgccaaagtcagggcaacactcatgtcctggatctggtaaacgcgattggaagaagcacaagctgcatacctcttggtggggagctaggttaaatccgcagcaatatgactcaccatttctgaagcaaacgaagccaggttagggcccgcaaagcatttgaaccaatccatcatgggatcgaaagtcaaatcccagacgtccccggtatactcgcctaaaaaaggcccgtcttgagcctccctcagccactttttcagggcctccgcttcagcatctcccttggacagttcctccacaacattattgtgtttggcaatgcggagttggatcctttcttcattaggatgggcaggagtcagaatgatgcctggaggggccggatactcgtcgaccttagagggaatccctgaatcggcactagggccgagggtgtcaaccctctttagcttttttgaaggcttcagctcagatgtgacacttttacgcttctagtcaagaggagggacaacctcctcttcctcctcgtcaatcaaaaccacctcctggttcccactagcttcaacgacgggaccccctacaactcgagggtgctttagtgcatttttcttggggctatgggcctgggccaaggcatcaaggagatcctctataggttctgctattcaaaatgagcaaaaagtcagagtgacatcaaaaattataagtacaagtatagtgtagcgagactaatcctaccatggtgatctaactcagccctactacacttataaattaaaaagctggtgtcgtcatctcttaaaaagctatctgaaggaagaaaccaactcgaagtcatgaaggaggaatgatccaaaaggattagtacgggaggaccggagcccatccgagactgacctaagaaatgacttaaattggagaaataaaaacccttggcgttatcagcccaccaagaatggggcatccaaaagctatataatcttttatcaaattccactggccttaagttagcatagtcttgggcagagggaacgaagtgaatattcaaaggagacttataggcactggaggtgcttgcaccaggggctccagagttttgaaccgggaatggaaaattgggccagaccggcgtcttctccttctctgtctcctcccaggaggccctcccagaggcatcctacaggcgagcatactcgagctcctgctccctcttatacctatacttgttgtatttatcttttgcggattaaataatgtctgccctgagcgccttctcgcttctgggattctagacattgagacagaggaccttggataacttgaagtcttcgacagactgactctccagaatcaacttagccctcctgcagttgaacgttgtaaccagatctctcacattcaagtcctccttcctgtaactagtaaacacttgcgcatggttcaggaagagttgagtgggggcagtgcgatgcatgggggaatcctgacccagtccattagcaaatctggacgctcgaaggccttgaacccagaagagaaaaaaatctgtggtaatactcctttacattcttttgaaaattaaagggtatcggggtctcattagccgaatgggcctaaattttgtaaaaaccatctttaaacttgtccccctttttggggaccgagagtagttcgtaaaatataaaattttggcagggttgggcagagcccagttcttggctacataataagtctgataacaggaggtaggcttgtggaatcagttggtagggtgagagcccaacgaaaacaagaaagacaataaagtagtccttgaggaggagcatggccccagacatcagatgagtctggctttaggccccaacgccattataattgtggtttaacatctcctcatccctgggaagacgatgataaactccagaaccggagggcttgatcccagccacagtgacaatcttctccagttgatgggcgaaagtcagtgttgaatagagttcgttggcttcccaactattggaacagcacacgaacttcttgtagacagccgagcccttcataaccttgtctaaggtggctagtttcttttgccccttcttggaggatttagcttcagtagccgcagaggtggacatggaatcggtctagtgaagattaagaatttcttggtcgaacccgaagaaactgtgtgtgtgaagatcgtgaaggacttcactcatctgaaacaacaacaagaaatctagcagttagcccccacatcaaaccctaagtcaaaaaggggaatgagggttccctaactgctaaaaagaggccccctcaagatggctgtcaaaaggaatccaacgattcacaaacacaaacattgggtgcaaaatatccaagcaacaaaagccaatgatgacgatcataaatattgcccacgcggctgaggcacgtgtcattgcatttattagtgttggaggcaactcacgagtctcatttacctacgagtaaataagagttggggggtaaatgttgctcctgtttattcctaatatacgtggcagctattgtgtgtgacatgtggctgacatggacacgtcccccggagatgagttgaagacataacaaaaccatcttaagaaataaaatgaatgagtcgaagtgccaaccccccaacatgagcaaaaggcctattttcttcttcgggagccaaggcatggacaagcttctccgggccagaaaggttgggggttgaacagtcacttcgcatttaatgcagcatggggaaaacgtctgggcacacccataagaggacgtgtcagacgtcataaa

SEQ ID NO: 163563 - DNA, 1410 bp, Cannabis sativa
aagaattaggtaaaataattaatccaatatctaaggttgcataataatgagagtaggtcacatcacatgttatccttttttggaatataattaattaaacagttaaaaagaacataaacagagcattcataatgattagttacacatatcatagacacacttgcctcttaggttctttctgtcagaaaacaataatttattaatttattaaaattaattctattatttttaacaatggaaaaaagaaagagaccatctatggactcataattgtgttcttgtaaaagaaaaattgtttaggttaatcttctatacatacatttttttttccatttataatgtttttttaagtgtttctatttatataacttcttcttcttctttctttgtaaggtgtttttatttataactaaaaatatatgttggatgtacctatcataggattactagtggcatatacttaccttaatttttatttttatttttgagataagagttttacccttaaattttaatatttaatttgttctgtttataatttagtccttttctattttatttttatatttttatattttaaattaatttttattatgttttaatttttatgattattctctcttctaatttcttcgcctctgctgaacaaattttcctagctatatgttggcatattattttttttcatgaggtattatattaattgtaactatatttatattttttttacttctaaatttaaaattatttatagtgccgatcaaaattcataatattataatttataatagattaatttacgtcgtaaatacttgagttaaactctcaattgtaaataaatacttaagtttaatttttatcgataatgatacttaagttatatttttgaaacctttgtaggtacataaccctcaaatgtcaaatgtcaagtcattatccacgcgttattttcttattggtatatctaaaacatttttttaaaataaaaatttaatgacctggaccaattaaggattaccacatagtaatttacttagagcattgctattggacaccagtggtgcccatcaccttccatagctgctatcctatgattggttagcgatattccctaaaatttatttatatgggacccgctatttaattacactaaaagatggtgctaggcaccaatggtgtcctttaacaattctcatttacttaacacttaacagttaggtacctaaaaatttaatgaattgaaccaattaagaattgtcacatgacaatttacttaacacttaacagtcaggtagttacaaaagttctataattaaaaatttaggtattattattatcgttaaaaattaaacttaagtatttatttatgactgagagttaaatttaagtatttataccataaattattct

SEQ ID NO: 163564 - DNA, 1664 bp, Cannabis sativa
ggtggcgtaagatactagtttgctgtctagtcccaattgttcttctaacacccaatttaagaagatcatgagcgctctagatacttcgccaaataaaactgggattatttcccaactcagccgtcagaaaatcacctcttggaaaataacgagctttgtaaattctgctggcgaaaatcgccatccttgcttagctaacatagcaaggttgaagtcaagaagtcgccgaaagccaagaccaccttgatttttgtgagaggccatatgatcccagttcgtccagacaataccgcgacttttgctagaagtagtcttccaccaaaattgagccataagatgttcaatttcagtacaagttttgacaggcaacaagaagacactcatagcatagaaaggcagggattggacaacagatttgcagagaacttcttttccggcccaagatagaagcttaccgtcccaactgctgattctagactttatcttattcttcaaaaagcccaaaatagatgttttgtttctgccaatagtactgggaagaccaagatacatgctattatcggtagcagcactcatattcaaaatagagcacatgtcagcatgagtaccgacatcagtattggtactaaaagaaatcaaggacttatcaaggtttacttgttggcctgaagctttctcgaaggttcgcaggagagttatgacacgagcagcagcatcaggataggcttgacaaaaaaaataactatcatcagcgaacaacatatgagtgactgaaggagcgccacgagtaacacgacaacctctcagaagacaacgagattcgtaacgtttaattagagtggagaaaccttcagcacaaataataaagagataagttgagaggggatcaccctgccgaataccgcgagaaggaactataggtcccatcatatgaactccatgaacaaccgaatatcgaaccgttgagacacattcaagtaacaagtttatcgaacaatcagcaaaccccatgcagcgcataacagtcttgagatatgaccactccacacagtcatatgctttagacatatctattttcacgaccatgtatctctgtttgcctttagttttgcgcttcaaataatgcatcactttgaaagcaaccattatattatcagaaataagacgctctggaataaacgcactctaagtgtcggagataacacagtcaataatggtcttcattcggttggctaagacttttgaagcaactttatacagcacattacagagggctatgggtcaaaggtcgctcatagaagtaggggttttcttcttcgaaataagtacaagatttgtgtcattgaatgccagaatcaaagaattgttttaccatagagacaacatcagacccgacaatatcctagtgtttttggaaaaaacccggtcccattccgtctagtcttggagatttatcagggtgcatttggaagagtgctcttttaatttcctcatcatacaggggctgtaatagatcttcattttgagcttaggtaacagtaggaacaattccatgtataacaggttgatcatctgtattacactactacaaattacactttttacgtcggtcaactctactattcatggcgttgaccgatgtgaatagtgcctagataattggg

SEQ ID NO: 163565 - DNA, 1060 bp, Cannabis sativa
gctcgagttcttttgggacttgagctcgagccacagttcaacgagccgcttctctcttcctcgctccaagacttttggggtaaaagatggaaccttatggtcaccaacatcctaagaccgagtgtatatgaaccaacccttaacttgttcaagaatttccttggccgcgagtgggcatcaatcccagctgttatggctaccttcatggtgtctgctctaatgcacgagctagtgttttactacttagggcggctgatgcccaattggaagatcaccgccttctttgttctccacggactgtgtttgacagttgagattgttttgaagaaggctgtggcagggaggtttcagctaccaagactgatctcaggagcattaacagttgtatttgttttcagtacctgtttttggctgtttcttcctcagctccttcggtttcatgctgatgttaaaatgttcgaggagtgtgcagcagtgggtgccttcttgaggaatatcattcaatcatttactcactgaatctttccaatcatattagtcttcaggtaataaattagtaatcaaaaaacaagagagtttgagaggttatttatatctctattactgagtttgtacttctgttatcatctttttcataattggaaggagatgttcttgagaaagctctaactaaatgtagatcacattgaccgaaatactataactcgttgcgtgttcttcgtgcaagcatttgtgttttactttctgttttagatcttagctacattgtttgatcttgatttagctaaagcaaataggattagagtaaaagagaccggaattaacaacagcataagcagaactgcattagaaaaattcataaaatgacaaaatggaatagtaaatataatccaatcagtagataaaatttgcattcaataatagaaatcaatattaaatgaacacaatctttcttgtggtcactgtcagagtataataattctacaataaatatcaaactaacattgtggacacttgaacatacaacaaattgtaatctttctatcctatttatattttg

SEQ ID NO: 163566 - DNA, 752 bp, Cannabis sativa
ctactattaatacaatttaatattacgtttcacatattttaatttaataaattatatttataagatacttaatatgtaaaggaatgctcacatatatatttatgtcttctaagttccatagattgatgtggtttcagtccaacctacccacttgatttttaattccagctcattaacggttttctatgtatgaactaaattttcaattggaaaatttggtcatttactttatttcattttctacatcacttgacttaatatgaattattattaattacttaattttggcaagttaactagtgcgactatgaataatttatttatttatttttttttttttgaatattgaagtgtgcagagtaattttgatgttctttttaaaaattcaatttttccaaacacttgtattaatttgtaggcaatttaaaaaataactttaagtgacttacccgtataaaagccacgagttcctaagctagagaatataattaaccctaatatatatttacttattttaattctatatattaattaattgcttctattattattttagtgaataatgtgaaacaccttaatttcaaaggctgcacagcatgaccgataagacagcattaaattattagcaatgctcaaattttaaatttcaaaaggaaggtgacgacgaagctcacatgcataaatatttatatattatataatattatcctacatataatatccagggccggccctagacataggcgggctag

SEQ ID NO: 163567 - DNA, 2529 bp, Cannabis sativa
aaattgaattgttttcccaccatgcttttgaatttgatgaacatgtcaaattcttgagacttgagaactaagagatttatccagatatatctactatagtcatctaagaaatgaaaatagtatttatatccatctttagacactatatgtgaggacccatatagatcagtatgaatcaattctaaaggttgagaggctctagagctagatatggggaaaaatgttgcttatggattttccctaattgacacgctttacaaaattttaattgattcaagttgcttgaatgattgaccaatgataaaatatttcttaagacagctaataagggatggctaagtttgtgatgctaattatttatgttattatgcttgctactagtgtgaaaaacaactggtgaagaattagagataccagaaacattgattttattgatatcacaatcagtacaagaggtttccgtggttacatggacattgttatgatgaatattacacaacataatagtaggattacaagaatatgacattgtttgacttggcatgttcaatcttcggtgactggaagactctcctagtaggtataggccatccttaagggttctcttaagcaacaccctcttagtttccttgtccttaacaaagcaacatgttttatagaattcaaggtaaacatgattgtcattagtcagttggaatacactaactaaattctttgtaatagagggaacatgtagaacaaaatttaatcttatgggataagaattaggagtaggtgaattgggtaagccaatattagagattttgagcttcttgccatttccaatagtaagaccctcaaaaccagtgtaaaccatggcgaagtcaagattgtttgtgccttgagagatatgattggtggcacccgtgtctacaaatcaactcgagtcatcaccaaaattaggaggaaggaggtggcaaaggcttgaggatcataatcaaattcttgctctgctatgtaggcacgaggggatgattagtggtattgctagtgtttccattggggccaaaggtgcttggtttgggaggaacccacttcttatcaaatcaataatgacatactggggttgtatggccaaatcaaagacataattggcattgttgtcgattgttgggattggatccacgaaagaaaccacgtccaacattcttggttccctgaggtagtctgtaaggtgtgtttcttgaattcccaattgccacattcgcttgcatcttcatggtgagatctaccatggtgtcgtggtgctcaagacgactctcatgagaaagcaagagcgcttgaacctcttaaagagtaagcaaatcacttcttgtagtgatatcggagacgactgggtcaaattcagacccaaggccattcaaaagctgtagaatgatgtcttgagttgggatatgagaaccatcaatggattgcactttgtccacatagttagagattgagagaccacctttgcaaacaattgagaactgattcttttaatcgcagaattcaagcttttgattgactagagaacatctgttctaacacaggccatttgtaagcagaggtgaggaagtgagcaacaaaggcaagaacatcctccgtcatggaagaaaacaaccaagataataacagttaatctttgcgcttccactagccatatttaaggttagggttgctattgattaaggttgaaggtggtggatggcctgtgaagagaattttgtcaaagtcatggccgatgactgttggaacgacttgcaatttccaagaaaggagattagtacatcgagtttgacagttaacgtagacatgagagaatgagagaaaggattccatgtggagatgtggagttcatttggatcgcaggagctgtggtgacatgagtgaggtcctctagagttttgagagctggatcagtggaagtaaattccatagttgacgtgagtcaatggaaatttgatactatgtagaattcagagtatgaattttgagaagaacagagaattttagagagaattaacttgaaaaacaaagttcactttattacatccagaagtatttatagcaaatacaaagactagaaactaagaaaactaatacaagaactgttataatagacaacagaattacttaaaacaattttctttcaactcagaagctgtattgaaaaaaaagatgggtgtttcaaatagaagggatatttttaaaataaagtgataatgggcattaatttttagggtatccaaatttagtttatgtttatattttgggctaagatgcaaaatagttctaaatttagaaactaaattagtaaatgtacaaaaaatatatatttatgatttttattagctaatttattatatttgaccattttactaatattaaactaatttagtttaaaaatatatataataattaaattaggttatataatttttttagtatatcataataatatattataacaaaaatgaataaatgtattaaatcattaaatatatataa

SEQ ID NO: 163568 - DNA, 1573 bp, Cannabis sativa
ccaagagaaagacaaaccattgctttaacggaagcagcactgtgcatatttcagcgcataacaagacaaccccacctgtgaagggcgagtttggaagaaaaataataaaaaagacaaaataaaaatataaaattgacttaaaaagccgcaaaaatagcctaaatataaataaataaataaataaataaataaaaaatattttcctacaaaattcaattgtcaaaaacatatcaaacgaaaaggaaagaatgacaaaaacacacacacacactaacactagaacaattatacaatcaacaagaataatttaaccctccaaagaaaagagaaagaagggaaaaacccacttattaggtcattaaaaaggttatccctgacgtaacgcgcagcttcagggccgccatggccatcgtaaatacccacaaaagtagcgtcccggccaatctcgacttggctataatcttcaagcacgctgtttgcttgaaccacagcaaaagagaattcaccaaaggagtgctgatcgaggtctctgtaccataggagcgagtcctcagaatctcctccatcatccttcttcatacgggcatacctcagtggtttccaacacgcggacgctaggtttcccaacctcgacaacatccctcatttccctttaacactacaccgtctcgtgttattcttctcttcaatcttcttcgactctcgaaaacccaccaccaagaaagaaaacaacacagtaataacagattaaagaaaaggccaaaagggttcaagatttaatgaaaatgaaagtaacccagaagcctaaaatgggttataaaggagtagagacgctgagaacaagtgatcgaatgagcggcagagaaagaaagagtgaagaaaacgaaatgggttcaagaaagagatatttgaggaaatagagaaatttgagaagtgagagaaagtgggggagagagaaaggaaatgttcgtggagatctgttagaaaaagggacagtgttggtttgtacgtgcgatagagagagagggagagagagagtgaggattgttactttgttgcagagggagggaaggagggactagttgatggaagaaaggaagggaaaggttgacgaaagcgtgtgatcatcacttgcttcgaaaggtgaaattaccaaaataaaccataattagttatttaattacagttaagccattaattttcagatgaaaggatctgtgggaggacccccttctctatttgttccttttacatgggtcccgtatctctcttccttcccgacaaccaaaattaataaataaatcaaaaaatcaaaattaattttttatttaaattactctgtatatttttttttaagagtaattaatttttttaaaaaaaaaataattaaattttttgtctttttagctttaaaatatgttaactttattccttgaaaaaattatcagaattattaaattattaaatttaaaaattttatttaatttcgtttaattttattaatatattaattcttcgtatattaaatcgtatttttaaattttaatatatattaaattataattttaaattt

SEQ ID NO: 163569 - DNA, 1175 bp, Cannabis sativa
cattcctttaaccttattcgctcaccacttggcaccatgaaccaaactggtatttacactgttaaattcggttatctactgcaagcggcagccaagctcagcaatggtggaaaaaattttggggctgaaaattccttcgaaaatttgtatcttcttgtggagagccattcatgactttctccctgtgtctgacattcttcacactcgtcatattgcggtctccggccgatgttctctatgtaatagagcaaatgaaacaatttttcatgctctttttattgcaaacgtgcaaaaaaggtatgggattgttcagactttaatttgcaagctattatctctcagcatatgaacatcaaggaattagttttatatgtctcctctgaatggtcatccctaaaacttgaacaatttgcaataatactttggagtatttgaactgaaagaaataaagaaagacatggttccaaaacaaagccccatgatgtccttctatattttgctctctcctacatagaagaataccatgctgccaacatcaagaagactgctggtttttctacaccagtagcagcacaacatgcggctgtgtcacggaatatggattggatgaaccctccttcgggtcgcctgaaattgaacacagattcaacgattgacacaatgaataatctttctggttttggagcagtcctcaggaattgttcaagccaaattatagctgccatggctatcccctttcaaggatgtttctcaccagaaattacagaagctttagctcttatgcatagtcttcaatggatcaaggagtacattacatcgagacagattcactaactgtagttaaaggtttacattcatctcgggagcttgttattgattttcattgtttgttgcaaagcatttctcttttcgtttccaatttccctggagcctaaatctctcatgtgtacagatctgctaataatgctgtgcacctgcttgcgcggtttggtctttcagtggaatctaaatgtttatggatggaggaaatgcctcctcccctaatgcctattgtattttgaacttgttgtttttaatataatagcttttcctcaaaaaaaaaaaaaaaaaaacttagcttaaacaatgggaaatttgattttctatacttagaaaatcaaaaaatttgatttcta

SEQ ID NO: 163570 - DNA, 3063 bp, Cannabis sativa
taagggctgggcagggtaaggtcattgttttagtttctgtcactaaaatcatcagaaatgatgagtgttaagcaaaaattcaattaatgataacgagaaagaaaattatctaattgttctttcccaatgtggaggttggaagagtaagtagttttaaaggttacacaagtcattaagttgaatttagaggcaaaagttagtctaaaatattgcatttcaatctccaattactaaaaagactacttattgactttccaagcaccaaattagtctaaaatatgacgagcattactataaggcaatgctcatcacctaagatatcactattagtaatagctggtcttatatttttaatttaaattcaaatatgtatacttcgattttcacttttactagtaacaatattacatggtgctctttactattttatcaaagtaggacttttgccataagaatactacataagctcaacgtttcagattactcttattaattgtgggtgcttaaagtacaacattttaaaaggatttttttccaaaaacaatacgcccccacactttccaaaaaaataaataaatagagtatatttattgaagataaatccaaaatacctatctaccgaacttggactattgggatgtagatgtagatgtatgtaaagatagggagtactatccttaagagtaaagggtatagaggatgatgagcatgtgggggtaggtcaccaaagtcaaagtggagtaggaagaggactagggagggcatccactatcctctgagcagtgtccaattaagtaaggcttgggtgagggacctctgaaagtgatgccaaatccaagtgaagtatgttaaggacaattaattagctaacaatacaattaggaaagttagttagaattactgttacaggattttagcttaagttttttaccatttaaagctcattgtatataaacctttcgcattagactttttaatcaataagagaaacattttttttccaattctatttttatttcaatatggtatcagagctagaaaatctctaatctgttcttgatagttatcctcaagctttgtcttcacaattcttttcttctcttcgttctctgctccttcaacaatggtgggatcatcttcagcttgcagagatccaacctacaaaacctatttcgttcaagcattctctttcttccaaactcgatgaaaacaaatttttatcatggaaacatcaaatcctcactgttgttcgtggtcatcatctccaacgattctttgaaccaaactctgctcctctcaagttcaacaatgaagctgatcgaacaaccaatacaatatcataagattacataaattaggaagcacaagatcaactccttctttcatggatgttgtcctccatgaatgactagatgaacactcgcataatcaggcatgagacctctgtgactgcctaaatcgcgattcaagaattcttcactgcataaacaaattcaaagataagttaattcaagactcaactcctcagtactaagaaaaagggttctttcgttagcgattacttactgaaaataaaatcgattgtagatctactaaatttcattggacatagattctctacagttgatcatgtcgaggccattttcaatggtcttggaccagaatatgacatcttctatacctcctacaacattcacaaagaaaatttcatcattgtagagcttgaagcccttctcgtggctcaagaagcgcaaattgacaagagtataaaggatctcgacatatcctctgctgaagccaatcttgctcacaatggaagaggaggtttttcaaacaaccaaggaagctatggtggaaatccactttacttcaatggacaacaaacttagggatcatataacacctctcatgattcctatggtggatcaaataatcgtggcggcagaggacaccgtagacgtggaagatggtcgaatcaacccttggagcagcaacgacaaagacctatttgccaattgtgccagaagtcaggccatgctgctcttcaatgcttctataggtttgataagtcatttcttagacatgtatccgttaataatccaccttcaaactcctaactggagcaccattacatgtcataattgccatagctgacacagtccaagattccaattagtatcctgattcaagtgccacaaatcatctcacaccagatgctcagaacttggcaagtagctcagaatatcttggtcaagaacagctcatgattagaaatgactcaggtttgcatattaccagtattggtcattatgcatttaatttcccattgcatcataaaatatctaatacttaatatttgctaagattttcgaaaactaattataaacgataaaaactaaagaaataaataattaaaaaagaaagagtgaaaagagacaaacaatttttatgtggttggggcattaattagtcttaatccatgaatcagtattattcagttctttttcatggcaaaataaattagttttcatataatattttcatggaatcggtaagatataatttgtgtaaactattttgtgattcaatttgatctattttaacaataattataatgtacttttccatgcaaaaattaataaaataaccacttaatgtttcaataaaattgatgaaataagttaagtagtaagaaattaaaaatttattaatgtaaaaattcaaaataaaattaactatctaatattttatataattaatgtaatataatttcatttaaaaattattatagtgttgagttaattttatagaaaaactagcttttatgatatatttgaaaaaataaataaaaaacaatgcccaaagaaaagttgatattttcgcaagcctaataaaggcccataaaatttccaaccccaccattcccactgggccacaggggatccacgaactagaggaaattacgtgggtacccactttaagttaactattttaatttgagaaaattacactctatatcctttttatattgtcctcttttatttttaccattttttttaaagt

SEQ ID NO: 163571 - DNA, 2819 bp, Cannabis sativa
tgaacctagtactattgctgcaacaagcactaacaatgcttaacttcaacaaccaatctctcatcacttcaacaccttagaaaacaactattttctttcaaacttaacagtaacatcaatggcatatggaagacaatagtctccgtaattgtaaaaggccattgacttgatggatttctaaatggaaccattgtctatcgtctagagtctatcattataggaagctctatagaaatgaccagatttaccaatctaaactatgaaaacttgattatcaatgatcaattgctaatgggatggttgtataggtccatgacagaaaccatagcctttgaagtcatgggagtagcaaaaataactagtttatggcaagcgttggaacaactctatggtgcacactcaaaatccaaaatgaatgacacttgaacattgattcaactcacgtgaaaaggaaacactccaatgagtgagtatctcaggcagacgaataattagtctgatctattggttctttctggagagccctaccatgaatcacaacttattagtaatgtacttttaggttccattgtgttacagatagaagatcgaccaaagaatacatggaaagagctccaatagttgttacttagttttgatagcaagattgaaaggctttaagcattgtccactaataacaacaaaaacaccagcagccttgctgatccacaagccaacttttcccaaaaaccacatcatagacgacaaggaagaggttgaaaccattacccccaacatctaagagaaagaaaccctaacatgggaggaggaaatagaggtggttgagaaagaggcatgttcagtggtagaaggaatggctcaaagccaacctatcaggtatatggaaaatatggccaatctgtagctctttgctacaacatatttgatgaaaattacatggagacaggtccaaatggtggcgctccaaacaaaacaaaaaatccatttgcctaagttgcaagcccagagatcttagagagtggtgtctggtttgctgatagtgggcctagcaaccacattacttctgactcttcttcaatgacacaaaagcaagaatatagtggtaagaaaaatgttacagttggtaatggtactcaaatatctatttctcatcttgggaatggaatattgcaaactaatactagtcaaaatcttgtgttaaaataaatgctattagtacctgaaatttttaagaatttactaagtgtctcaaaacttacacatgataacaatgttctcattgaacttcattctgattgttgtgttgtgaagcaaaatgtaacaaggaaggttcttcttcaaggaagcttggggatggccgcagccaacccgaagcaccatgttccaagttagatcctaaagtttccaggagaatcgagtcaaataaaaacactatattttatggtgatgtcaagtctaagtccaatgtaaatcagtcaaaaacttatctatcctttgtgactaagtgtgatgtttgtcaccatccatcaccaagagtcttgagtcaagttttcaattcatgtcatgttaaactttcaaagaatatgcttgtcagtttggtaaatttcactctctgccatttaaaaattccaccagtaaagccaataatgtacttgatttaatacatagtgatttgtggggagcttcactcatcatcttcaacatttgttgtagattttacatacattttattgatgattgcacaaaaatcatatagacataggcacatggttgctcaagctcacatgcctttaaagtattggtgggaagcttttgaagcctctttctaccttattaatagacttcccacaactgtattaaacaacaaataccttttgaagccttgtagtcaaagaaacaaagttatgccttttaaaaagtttttggtgttgcttgttttccttgttgtctaaggccttagcaagctcataagttccaattcatctctaaaatgtgttaatttaagctacagtgaatctcataattgatataggtgcctaacaccaactcgaaaaatttatgtttcaagaaatgttgtgtttaatgaacttaaatttcctttcacacatggttttctaaacaaccaaaaaaactagtcattattcaatgttgctcctggaataattttctatctatctctcttccaattagtcatgtttctccctcaaatgctccatcctcgcgcactcaagaagaacaaccttcctcaccaacacattcttagtaaattcttatgaccttgctggtcctatgcactcacttgttgcttcaaccgatgtttcaactccaggaagtgagaggggaaataccccttgttcatttataaggtcctttgctacaagtcatgatgctcaacctagtttaatttaagatgatcatgaccaggatgatgatgtaattcatcctcctatttttgaacatcctcaagtcactggtcaccttataaaaactcgagcaaaggcaggtattttcaaaccaaaagtgttcatgaggtaagctaagtgtgcatcaatcttttttgagccaacaagtgtcgtagagacaattgcacatcctagatggaataatgcaatgaacaccaaagtttatgctttctaaaatttcgtattttaatatttacagtttattatttaattaaatacttatttaaatgcaaaataataaaactggcgttgaaacattttttctgtagctacaaaagacaactctgtaactccagaataaaccaaaaaaataaacagtgcagaaaagtaaacacacacaatgtttttgtacgtggt

SEQ ID NO: 163572 - DNA, 1127 bp, Cannabis sativa
tcaacaaaagggtcagcaatgagggaatttgacaccgtaataagaaagaggtattcatccatgcataaacagtggattaaaacaagatcaatgagcaaaattcggtacaaatagaacgcacataagctgatatgtctcatacctgagctgcaacagtatgtgaacgagttggaaaaagcttggtaatacaagcagtgttaaatccatgctctgagagcccaatagcagctctcaacccagcaccaccagcgcctacgaccacagcatcataagtatggtcaaccacggtgtatgaggatcgccctgtactctgccataatcgaaaaataaatcatatcaactcctactcgatcaattcaacatttttaataattataaacaattttttcctttcaaaaaaaatccaaactaaatttcaaatagcttcatcgagcacagcttgacagcattttattccctaataaattttacaacaagcaacatacgaaaaaaaaaaaaaaaaacaaatcacatcaaaataaataaagaaatttaaaaccctagtactgagaaagcgccaaagaggaaaagtattcgtaccgattctgaggagaagaatcgagaaatgtgagatcttagggtatcattgacgaccgatctcttggaagaagaagaagaagatggtactcggagaccacgagaaacgcaccgccacatctcttcggaatttgtagctgtgaagatgatcggagtcggaataagattggatttttgggcgaagcagtgtggaggcgaatttgatggaacgaaaatgaaaacccgaaaaagatagttttatttttaaaaaaagaattaatattattactcttttgtattacgatatttactcaattgccatcgtcattttgggctgttaccgttgtgtttttcgagacaatagcagggttatattcgtaattttaagtaaacatacaaatcgaatatatataaaacaaaaagaattgagattagtattgggctgaattttttaatagcaccagggtaaaactatgacactaaatttcttacttcatttcaacaaaaatgtttttggtacatttttttttttttttttttttgacgtggtgaacagagtcacacatgattaa

SEQ ID NO: 163573 - DNA, 2062 bp, Cannabis sativa
gaaataataagtttctttaaaagattacttgtttttgccttataactttttgcaaagagtttctcaatttcagcaaggaaagttgtggcatcagtgacctcctcagataccgcatccctaaaagccgcaggtatgatgcgcttgatgatcataaaactcatgcggtttgaacggtctcacttcttataaatcctcctttgctcagaggtactattgacactacaaagcaagattagttgccaaaggttgcaagattattttcacacctttgcttctattgcaaagttcaatactttaaaattacttcttgctctcacaaccatgaaaaattagtttgtaccaacttgatatcaataatgcttttcttcatgtcgatttaagtaaaactgtctatatgaccattcctaaaggcaatacacttaagggaccctaatgttgtatgtaaattaactaaaattctttatggcttaaaacaaacctcgaaaatggtacacaaagttcagtaactatctcttatctaatagttttactaatcactttcagatcacactttatccattaaaattataaaggtatttttcttgcacttttagtttatgttgatgatattgtggtcacttctaatgatgaaattgttgtttgtgcttttaaacaaccacttaactctatttttcagcttaaggaccttggcccttgatacttttcttaggtttggagattagtcatacttcaagtagcatttcgatgtctcaacgaccatttaccttacaacttttgactaaaacaggtttcttgggagcttccattgcttttacaccatggaacccaacagtaagctttcatctaatgttggaaaaccattggtagatccaaaggtttatcgtagtattaattgtaaactaatttacttaacgatgacatgccctaatttttcctttgctatagataagtaagttagattctatttactcctagagctcctcatcttattgtagctcatagaatattaaaatatcttaagggcacgtctggccaaggattattttttcattcagcatctcctactcattgatgtgcatatgctgaaactaatatgtcacatgtaaattttcaccttaaaaaattttaagatgctgatttggcttcatgtagtgatactaaatgatcaatttctgggtattgtgtcttccttagcaaatcattaatctcttggaagtccaaagagcgatttacagtctctcgttcgttggttgaaatgaaatactaagccatgacccatgcacttgtgaaattacttggctgctcatactactttaggattttggcgttaaacatgaagaaccacttatcctttactgtgataatacaactgccattcataaatttgagaaccccatcttccacgaacgaacgaaacatattgacatcgattgccatgttgtccgaaagaaagtctaagaaggtaaactaaagctcatccatgctacaacaaaatataatatagctgatatttttataaaacttttatttcctagttattttttgtctctttattgaccaaggtattttctcatgataaaatttcactttattattctggagtaagagcttcaatatttttttttagcaatctctaataaaaatgtggctcgtgtcaatgagttggttgaatcatataataatcagcagtagtgaagtgtgcccttgaataagttcaagttggagttttttttagctaaatgaagaattaccttataaatattatttatatggtcatccttctttaatttagatgttttttttaattattatttttggtaggtagttttagtttcattttttaggcttttcaattttttttagtaaatattgtgcgagctgtggtaatacttttgatcacctattatgtaagtgtgtagggttgttcttacaattgtactttatattatcataaagtaatcattaccaagtcctaacagtctgtctgggtggtgtagtcggttatcacgctagtctcacacactagaggtccccggttcgaacccgggctcagacattttct

SEQ ID NO: 163574 - DNA, 1833 bp, Cannabis sativa
  modified_base (1770)..(1806): a, c, t, g, unknown or other
atatatatatatatataacaaattcttcccacgagttataaataaagaaaagaactttctaaagtcgtgacaaaagtaaatttgtatggccaaatacgtaattataatataatattaattagcatttcaattgaaacattattgtttgttttgttaccgatgtattatagttttagtttgataacaaatctacacataggcatagctactagcctatatattctttttttttttgtttgatcatgcctatatattctttctaaacaaggaaaagtcattttttatgtgaaaaaaaaatcatttttagaataaaaatatatattattataaaaaaaattatttatttattatttattgacataaaagaaagtgaagaatatttaattacatttttatttattttacaataaaatgtaataaaagagtatgctgctattaacttaaaatttagttaacataaatgaggtactttgatatttaatgatatgtaataaattctatttagaaattaataatttttatataggcaacaaatttgtatatagttttgtagttaaaatctacataactcacaagtcactcttatttatgatttttctgattataaaatacaacttggcgtatttcctcataatcaggaaataattcaccctccctttcacaatgattttggtccctatttatagggatcagtgatggtaattatttttttttatgatcttatctaaatgatgcttcatgaagtttagacatatcccacgttttatgttgttttaacatacgagaataatacttataactgtttaattttgaatcatacactcaataaccgctacttttgatcttatctttgaacgattgttgatgaaccatctttctattcgatacttgtcctcctcacatataacgtgaacgaattggtatacatcatagagattcttctcgcaaaagaatggcccgttaaacattcttctcgtaaaaatttacctcaaattaggttttagataatttttgtataatccttataagcaaactcttttaaattgtatctcttgtgcttctcatgatgaaagcacttgtcttgcaaccaacctagcttttcttttctcactgaactcatttatatttatacgagtctctagaaggcatattttgtatgtatagtgtttctcgaggaggctgtaggtctttcatatcacttgccttctactttatggccaatgaatttgacttatctttttgactaaggcaagacttaaattctgagtcatttgagtattattcgagacgcattaaattagcacatttaattttcttgacatgcgatcctacttatttctgggttcctatacacgtgtcgtgaccatatttattacttaaaatatgggtataacagctactgtaaaagttatatatagcgatgggtattgttgactgaaaatttagtcaaccgacgcagagtcgaactaagatcgtagcttatgactgtcacgtgtggaatgataataaatgtaaagagacacaaagattttatagaggttcaaccccttttatttacgtaatgaagtttttgagggataataccaagcacttgacaaggctctctttagtattacaatgaagtttccaagtgagaagtatgaaaagagagataacttctagttatgggcaagattgcttgtgcaattcagacttagaattcaagttgtggtcttgagatcaagaagagaacgtgtccagatcccttttactgttgggttttatgccctnnnnnnnnnnnnnnnnnnnnnnnnnnnnnnnnnnnnntaatatagatcagaaataacagttaat

SEQ ID NO: 163575 - DNA, 1241 bp, Cannabis sativa
ggtaaaataatccccaacacttggttctttcgcaccagccaccttcaatgctacagggcctttcttggctgaaggacatccaagcgtagatgcattgggcgtcttctgcatcggagaaggcctatttgctcaatttgtgtttttctagtaagatttaagggcactagagtctttagggtcacccactttagccttccccttgtcctgtacaggagcagaggctctagaatttgtggggttgtccttggtgtttcctctgacatattccactgaagggtcatcatcagaatcctcctcatctagatccccaaacttgctttgaaggcagtctagaactttttccattttttgatagaatttttcttggtgggctaacttttgtttgatttcgaataactcttgggagattcttgtgactttagggtcatgctcataatagtaaccatctttgtaaaatccatcactgacggaatcgtcttctttgtactcttcctctttgtatgtctcaacattaacgtcatggccaacatggtcatgctggttgttctagccttcctcttgaccgtgcaagttggatgtaactccacctctcacatcgcttggttgggcgcgctccgacaagagggggcccatctcctccatgaccatctcacgccaccttgaagagctttcttatgaatgtttttctgagtgagaaccatggtagtaacaatggtttttgtcttgagttcaactttcaacagaagcaccaaatgtttactgagattgttggaaactaaaatattcaagagctaaagaaataataaacggcaaaaaataagagacgaagattttttacatggtctaggtgttaacaaacccttgtccatgagtcattatattagcctcattgggtgatattgatgaatctacaatattacgcatgaaaccctaactctttttccttaagttcttttttagaaagaagaagaagattagggatggtttttgtggagtttttgctatgtgtttggttggcttgccccctttgcttgaaaaggaaggtggtagtatagccttggcgatgggtatggatcgctccatgactcgcctagggtatctactcgaatcccactattatggtaaattacatgcaatgtagagctgactgttagcatatttttagcctatattctggatcgattttacgtgcatttttcactgtgttaggacggaattacgcttgttttctatgttttcag

SEQ ID NO: 163576 - DNA, 2266 bp, Cannabis sativa
tatatatatatatatgtaaatggctattactcgattttcatcttttccaccaccattgctgaaaaacattcaaaatgggtgttgaatcacttgccaacaaagctaaagaaaaatgtcacattgttaaagacggtgattcggactttgttgcacctgcttttaaatgcgattgtcaaattaagaagaaatcgaagagtaacgtgactgaaaatattttccttcctaaaattaagaaatgaaagaactaacaagatggaagtccgaaggtttgttttttgtttcatttttagtgtttcctaactttaaaattttatttttgttttgtgttcccttatgattttattctagggtttagattgtttagttgttttgatatttttgtagtttaattttttcaattttgatggctaaaaatatttctctccatgaaattagctttgtttttttgtgtgtttgtttctaattttttttttattgtttatataaattagttcataattgtcatttattttgttattttttttttgtttatgtatttttatgtttatcacaggtattagctcaatttgaaacctatgttgttggtttgatattttgtggttcttttttatagtttgttaaattctcattactgtaaagatctgttttgacatcaccctgtgatcatgacacttttttgtttgatttcatgaatgggaatgcaaactctctatgtctaaacattacatctcaagttgtatttgcttgtagtttagaagtaattaagaagcttaatgacaacctttcgttaaatgtcaaggccttgttccgttctacccaattcagtaaattcttacacatttcttcatttaaattctacccacaaattgttcataaaattgtgttaagagagttgcagtaatcaaatgttaaggaattttatgctaatatttgtgatcgttatgttcgatttagtgtcgagaagagttcacattgaatttggatttggattgtatgggggattacaacaaaaataatttttcttaggattcaaaccatattattgacacatatttttgggtgctaaacagactactcataaatctgttgagatgttatttctagttgtgtatggggaaatgatgatgctttaggtttcaaggttgttgtgttttattttatttactgttttcttcttagtaacataaagaaaaaataaattagtaggccagagattgacattattgataggtggaagatgggatgagtatttttggggtcgagaatcttttgacattacactgttttaagggtaatgttgtgttagaaattattttaccatgatctagattcactaacatgtatgttggatcataattttataatctaacattctaaatatgaaatttctaaaaatgataaataaacacataagagattaagaaatccttacagtgatagcaacaaaataatatgactccttccattaagatctctagcccatgcttcctatctgtagtagagcattatcaagatctgaacttggattctccttctcatgataattgaactacatagtcttcctccctatgctgagtattactttgatatgtgtgggcaaacactcaacaccaaggagcacaaaattttatgaagaaatccaaaaaaaaaaatcaaattaattaatagaataagaacaactttcttttttattccattttgtcaaataaagacagagtgatctgtcttgaaccaaagtccattatgttctatttataatgggataatagggtgaggtttagaaataaagaagttgataaaaaataaaatgacaattatataagccccatggctgaaatcccctttaagggcccatttgatttttatcattattttgtttccttaataaaaaatattttctatcttcaaaaatgcaattttttttattctagttatttaaatgctgactttatctatttaataattatacataattattaaataaaattactatttaaatatatttattaattaccctctaaggtctcttaattaataaataaactctaaattctcttttcttctcaaatatgccctttcttagtgttgattttgcttctagccaacaacagtgagtcaaataataaagggattatgtaatataattaaaagagaacaaaaataataaagtgaacacaagattttaaagaggttaaaccctataagtgtggtaatagcagttgggttttgtgccccaaataaaatccatttcaatataattagattt

SEQ ID NO: 163577 - DNA, 1184 bp, Cannabis sativa
ttttatggaactttagccttccctcacgaaggacgaagtttgcttcataaaaattcaacatgactttcacatgcacgttgttttcgtgcatggaagatcactgggggtatgacacgtcttcaaccctccttcctaaaagagaaggactgcatgaagtctttcacacagctagtgatgtttaacctctttgcctttttatgcaaagtcatttttcaaatttatgtacacctttagtctttctttgcaaaagccaaagttttccactacaaaattcaacatgactctctcttattgaaactgaccttagcataggataattactcatgcaaggatgcaggcccagctttccctccgataaaccaaaagcctgaaattccgcaaaagtttgtgctctcccttacgaggtccttgtcatggcaaaggacacattacaaacatagtgatggaaacactgcttggaagaaggaaccttttggagccagccatccaacttgggttcaaccttcaatcctacagttctcccccatggaagccaggagagtactaccaactttagcttagactctccaaactttcgacaattcccttccaagtaatcatggagatgaaaggcacgacctagatggttagggtaaaatacgcttctccgagtaaggattgacgaaagcaaaactacacctggacctcttcctcgaagaccaaaaaaaggtacgagttagggctcaaaaggtacacccaattgttgatgactacagtttcttacttccattttccaaggttattagcttagtgtaaatatgcaaccaaaagcaggaaacattttcaaccaagtcttcctgacgaaaacgcccttgtattctttcctcaaaagctaaattgaagtaaaaatctagagataggatgtgtattcagccaaagttcttgaaaagaaaactctacctgaattccttcttacagatctcgacagctttcgtaaaagtttagtttatcgggttgcataatttgctaaaccttcatgctggcaaggatcaaaataagaaaagtgcttaaggtctaagatagttgtgggggttactcccagaatccaaccttacacttggagtaagtcttatgttctttccaagacattggtaaagtatactagtttcaaatgtatggaatatacattggactgaaccgatatt

SEQ ID NO: 163578 - DNA, 1000 bp, Cannabis sativa
atgaaccaccaaaaactatctcttatgtaaatgagaagaagcaattggtggaacaaacgattgagtattaatggcttccaacatcttgttcagcttgtgttgggttgggacactcggttacaaattgcaataaggacaaggatggaagagtagtgtggaaaaagaaaaatgctgctggaaaggaaactcgaaaagatcctgcaaaggatcaagacgaaacagggaaagatgctgcctctttttcggttgctgctcagttaaagaggcaaaccagcaggggaaaaaaggggaggttttggagaaacaagaggagggaaacagttggattacacccaagaaaaaagtagcaaggcagaatgagattcaagctaacaaggaagtgcctaaagtaattgattctggtaacggatttgctgttcttcaagcagcagctgtagagaatttggctcccctttcgaagaaaactctagatggatgcaaataacatcttagggtggaatgtgagaggcatgaataagaaagaaaaacaaaaagctattcttgatgtgtgtaggttgaataaaatttgtttaggtgctttgttggagactaaagtgaaacatgaaaaagttcacgagatgatggtaaataactttcctaattggaatgcttattctagtgatgtgatctctggtaggattttgcttgtttggcaggataaatatgtgaaagtggagattctaaatgagtcttcccaattggtgcattgcaaagtgaaagtggatgggcaaaagatgagtttccttgttacagtagtgtatggttacaacaagatggaggagcgtaaggacctttgggaaaagcttgctagtcttggtaatcaaagtgagccttgggtgatctttggagactttaatgccatgttcagctttcaagatagatggggaggtaggcctattcaaagtagggacattgcggatgctcaagattggcttgtgttgggtcaagttgaggagtttaa

SEQ ID NO: 163579 - DNA, 2621 bp, Cannabis sativa
cgccgtctcaccagtatatatatactaaatccttatcggtattatatagttattcatgcaattaactattagatcttatctaacttaaagataataacttttaaacaatattgttgataatcgtagtaaagtattagattttatctaacttaatataatactagaatttttattttgtaggaacttatttatcattaaaaaatatttatacatacattataattactcttgctttttttaaatggcaatatttttattaatggaggttgttacttgtgggtctgtcctgataattagtacatttagatagtattaagtaccactggtacctaataacaatactcctaagattattactctattccacttaccaaatcatttatcacgggctctttggtaaaaaaattctcttaaattataagatttttgttggaataagttttagatgagtgcaaattacaatctgtttttatctttatatctcaaatcgtgttctaaaatattttttgttttaaaagaaatatataacaatagtggttatagttacaatatgatatgtaaagttttgacaaattataaataatttatagtttgtttcttatattatactttatcacacatgtttaaaaaattttaaatatacttttgatactataaattatttagaatttttcaaaaatctacaatataattttttaactataatgaacacacctataaaaaacttattaaaaaaaaatcaatatgtattttggaatacaaagatttaaaaaaaaaaaaaaattgtaattaacactccactaaatttcattaaacttcatggctaacaaaagactcttgtaatcaatctaatttaaataaaaattaatttaaaaatcaacaaatcttatattctcggtcaaggggaagctaaaaataatttataagtgatattttttttcttgagaaaatatttttatctataaatattttcagttatataaagccttaaacttctaagtcttattcttattcatgtgaattcaattcagacttattatgatctctaaaagcagccatgagttcatctgcatcatctttgaatttcaacacaaatttttccaagaacttagcctcagaacacaccaacatagtatgaaaactaggaccattcttaaacaactttttcatcttcaaaacctccaaaaccttgtacctaggaatcacccttccctccatgctaaacatcaacaacgcaggcgatcgaatcaaccttaacttgttgaattttgccgtgttcaagaagaaatcaactccaaactccaacttcttgttagatgttctaagcaaatgtggtgctcttctaaacatttccaatgattcttccttggaaaacccgagattaccaagaagctcgaatcttttctcgagcgtttgtttgcttaggcccccggctgcatggagtgcatggggaaacatggttgaaccgagcgaaactcccatgtccaacactctgcaaacaagctctctaagctcggtttcttgcataaggcaaacgcgaggctctttcttcaataacgaaacgagttgaggcccaacgacgccacaactctctaaaaaagcgcgattagccaataacctttgagggtctgcccacaaaatccatctacttcttaaaattctcatgaagtctttaccttttgcatcatttcccaaaatgtctttgagaatttcaatgcttggcactaacttcttctccaagcttcgcgccaataccgttggattcttcgaaatgaacttgcccaaatcataaccatccattcccaacttccccaaagcttggagctttggtctgagtaccttatcaacatcagaaaacaagatcttgggtgagcttagaatcaaagattgaatgtgtttttctgataagccatgttctaggagaagtttgtgagctgattgaagcttatgaggggatttaagtgatgagaaaggaactgagatagtaaaggcttgagctttagtgagtttgaatgtatgtataaggcaattgactagagataaattagagttttggattgttgggggtgaaattttagatgagaaaaaatgacagagaatacttctagttgggttgttgggggtgaaatgttccaaattgaatagtgaagaggagattaaacgagaacaagttacatgggccaccattgaaaggaaatttcaatgaacaaaactaaacacagaaaaagtttcttagaggcactttgtcaaacacttggtgtgcatgtcttcaagtgattggctttatgtttttgcagcagcatattcaccattgttacaatccaaaatctgttcacaacacataaaagttacatttaaaaatctgatacatataacaatgtagagaatatgattaaattaagggaaaaaagattattttctctaatcacattgaagaaaaccaacctatcttggaggagggtctttctactcagatttttacaatgaagagaatgagttagagtgctctatcttttaaaatgaagcagctgagtattagtggttcaagtactttttatagataacactttatcattgattagtgatattttttaaaaattattttattaaattatataata

SEQ ID NO: 163580 - DNA, 778 bp, Cannabis sativa
  modified_base (748)..(752): a, c, t, g, unknown or other
ttttacttttggagccaaggtaataatggtggaattgatttctttgagaatgttacctgtttccaagaaagaaattactgcctcacatatgtcgtctccaatcattacccaattatcttggaaaaaactactagaaaaaccatctggccctggagatttgcccactggaatactgaaaacagccacctttacctcctctttagagaattcccgagttaacaattgagactgctcaccagtaattagaggacccctggagagaatactatgctgcactttccttctgttcaacatgctagatcccaacagttgcttgtagaaagataggaatgcttcagttataagttctggctcatgaacccgatttcctgcttcattttcaatggatagaattcgattctgcctcacccgatgcttaatgcacgcatgaaacagagcagtattactatatccgttcccaatccacgccatttttgctttctggtgcagaaatgaagagtagtccttttgcactttgactaacaactccctagcttcattttctttgctatgtaattctgcattcaatggctgctggtgtatcatattttgccatgtctccagctccatctttgccttgttgactgcactttgcaggtctgaaaatccctccttgttagattctttcagcttaactttaaactgcttcatttttgtaaccacttggaacatatttcgaccctcttatttgttaggttttatgccctannnnnaactccatttcaatgtaatctatttt

SEQ ID NO: 163581 - DNA, 1566 bp, Cannabis sativa
atattgttataataatttatattttttttctgtttaagggacaatgattgcaatttcgtctaataacgagaaaaccccgtatcttaactatatttattttcaaatatacatgcacattaatttatgtccttaaatccaacttcttgttttttattcttcggttgcaggcctcgttttaatcatcaccaacaaagtgttatataaatacatatgtgtatatatataaatatacatcttaaatataaaattaaaacaattaattaaaccttttattattgcagaaatgatgacatttttaaattagagtaattttaattattattaagtaatcaataaggtgagaaagcgattgagatcgatctaaagatggaaatagaattgaatatggtgatgatgatgatgatgatgatttttgtagaaggtaatagagatacaaatgaggtgtatgatccgtgcatggatagtaaaattcaaagatcagaggggttttcatttgggattgcactctcttcaaatgaatcattcttttccaatggaacccaactttctccttgtgataatcgtctaccaatctaccatggtaaggcagctgtattcgctgtatttaggcccatggtggacgaaatctctctccttaatgtttctagctccgatttagatccggtacgtatctccttattattattattattattatttatctaagcatattttgattattcaattaaccatttgatgaacaataaaatgatagtcagtcttgtttattaatttcaagtttatttttcttcgcatgttttataataaatacccctatatatttgatatttttatcatttgtaatttatattttaaaattatatgtataattatatggccccaaacatatatctactttattattttttaaatacattttgagctttgttgttgaatagtcctttgtatgagaatgtggaaaacgaactcagcaattttggtttattaactgatgattgctatattatttatttttaaatcactatataaaatatatgttgaataactggccaattaattctaatgttctatgttctaatacagatgacacataaattatttatatgtttatatatttcccaccagaccaatttgaataattaatttcacacttttttgtgttgttttatttttgaaatattcaaatgaacactatttcatttatatatatatattaaatgtgattatgtaacgaaaattattcgtattaaagagtttttttggtttaaaattaacgattaaaactaagttaaattgattaatcaattattaaaaaaaatagtttaaatatctaaatttaatacatttattaaaatataagttaaataattatttaaaaatatcaacaaaatttaataattatctttttatatgaatcttaatttaaatttaaattagatgttattttaattaattaatcatatattataataaatttattagttatattattcaaaatatcaaactttatttatttattttattgtttaataaatagttagatatatttttttataaataatttaa

SEQ ID NO: 163582 - DNA, 2165 bp, Cannabis sativa
gtgatgggttattcgaacaaccacatagagttcttggtggagtcgtctgagagaggtgtgtggagactaaccggtttctatggggaaccagagagagttcatagacaccgatcgtggactttacttcgaaccttggcgactgattcttctcttccttggtgtgttataggagacttgaataacattgtgaggcatgaagataaacggggtggaaaaggccttatcctcagcgtctgattgacgggttccaacaagctctgaacgactgcaatttaacggatgtggaacttatgggccatccgttcacttgggagaaaagcaggggttctcgaaattggattgaggtgcgcctagaccatgctcttgtcaacaatgcctggtctcaactttttcaaggtgcttctcttctcaatctcgaaatatcatcttcggatcattgtcccatatttttagaacctgaacttaatcactgttatgcgcctaatcgtaaattcaagtttgaaaatgcttggctaaaggagcccatgtgctttaagattgtacgggattgttgggagaatgggggtgatgagactttgcctaataagttgtctcggtgtgctgataagttgagtatttggggaaaggaggtgactggaaacttcaaggttcgtatctctcgatgtaagaaagaaattcaaaaactggccaacaaaagagacccggcctctattcaacgtcacaaagaagttaaagaggagttgtttcatgttcttgatcagagagaagccttttggaagcagcgttctaaacagctttggttgaaagaaggagatcataatagtagttactttcacaaggctgccacaaataggaaacgacacaacaaaattgtcactttgaagaatgatagtggaatccgcgtaggatgggataatggacttgctcaggtgatgattgactatttctcaactctttttcaagcttctaattcatcttgccaagaagtgattgatagtgtcaatagctcggtgcctagtcttgttcatgaggagttgagaagggctgttactgaagaagaggttaaaaaggcaatttttcagatgcatccagataaaagtcctggtccagatggtatgacacctgcgttttatcagaaatgttggaacattgtaggccgtgatgttgtaaaggctgtccagagatttttttcgacaggggagtttgatccgggttgtagcaaagctaatattgtgttgatccctaaaaagaagaatccagaagatatgactcaacttaggcctattgctttgtgtaacgtggtgtacaagacaatcacaaaggtaatggtgaatcgcatgaaacctttcatggatgctattgtcgctgacactcaaagtgcttttatcccgggacgtcttatttcagacaacattctcatttcgtttgaggtgcttcattacttaaagcgaaagagaaaaggaaaagaaggcttcatggctttaaagttagacatgaataaagcttacgataggatcgaatggccttttttagaagcaatgctacggaaattggggttcgatcaatggtggatttctttgttaatgaagtgtgtaacctcagctgaatatctggtggttcatgagaacagggagatggggccgattatacattctcggggaatccgacaaggagatccgttatctccttacttgtttattctttgtgctgagggtctctcggctctgctaaccaagtatgaaagggccggtcttattcatgggtgcaaagtggctaatggagcacctcgtatttctcatattctctttgcggacgatagctatttgtattgcaaggctaccattcaaaaagctaatagaataaaagatatcctccacaagtttgaagcagcttcaggccaaaaggtgaatttttcgaaatcctccatcttctacagtaccaacactacccaaggaatttgtgatagcatatgtaggactttaggcatggctattgcggatgaaggaagcttgtacctgggtctgccaagtactctgagtagaaacaaatcagcagtgttgggttatcttaaagagtgagttcggaaaagaattgaaggttgggagatgaaatttctatcacgacctggtaaagaaattctgatcaaaacggtggctcaatctctt

SEQ ID NO: 163583 - DNA, 3215 bp, Cannabis sativa
tttggggtgtgaaaaacatgtaaaagtgactatgaatctatatcatctatatgatcaaatgatattatagcattgatgcatgcatggaatgaatatataataataataataatgtatatcaacatagagaagaaggaatttgttgttatctgctaaattataggatggatactagtcccatgcctttccgtttcactttgaagaccattttgtcttcttgctccgacgattgaagaggaacaagagctatatatacatacatatataacaatttaacaaaaagtaaaggcaatacggtaaatttgtgatgatattatattatataatataattaatgtgatgtgaagaggtggaaagctactactactaaaacgaccttgacaaaagtatcagtaagaatcttttaaccacagacagtttgacaagtatagacgacggaggaaaataattgaagctagacagttcacagctgtcccttactagttactagtttccttttaattatttactattgttggccttttttttgcaagcttacaagtcaaatttaacctctttccagctgtgtgatatgtatacttttattagaccgacttcaaaataaatgccaaaaaaatttaagtaaaaagcccaactcaaatgagggaaaaatgaaaatacatttatatggtaaaaacaaaaaaggggacaaacccagttgcttcctgctacttttatttattagataagcttcaatcctttctctagctctatccatgcagtgtatgataaataatataacacatgtttttatattatatttatatttagaaaggttgttgcaatattatgtattatgtatatagctagttacacaacaaatctttcataattttaagttgtctcgatggagtcgtggaaattttaaaaagattttggtgcatgttgagttgagcatattatatagattgagaaattaatggtggttgtttgattgactttattgatttatatttatttattttttttatgaaaagagtatatatatagggtttactttttgtgatgaaccactttaaaaagtatatatgtagactagctatagctataggtagctgtagagaagataaggtgtgaaatgtttatacgaattatattttttatatatattattctagctaaagaataaccacagcatataatagaatttcgtaaatcttaatcattctcagaattatgttgtgagattcttttgtaggtgaatatatctatgctctctaatttctcttactacacatcaataatgtcaccttctttgtcctcttttaacctttttttttttaattatttttaaataacgttctctagcatgaaatatttttgttatatactaactgaaattaattacatatatatgtatgcactaatacatttacaaataaaatacaaaaatttatagataaagataacgttgtgaatataatcaaataaatagaatatgtttatagatttttgttatagatcatatattatagactacaacatataatatatatgtttatatatacatgcacattgaaaacaaataaaataaatcttttagttacaagcatatttcaatcatattattcatgaatatatatataattggacatgtataccattaaaaatttacaatatataatattgaaagaaaaaagaaaggcaaaaattccaaaattatgaacgtggaatttctgttcatgaacgtgggtgtatataaaatatcaattcatagagtagacagaatgaaaggtcatttcaaagaattgatgatgatcaaaggggcataggtaaagatgaataataataataataattaaggatatgggtgatgggcgcagtgtatagtgtgaaagagagaaagaagagtagtagtaagggaaatgagtaaggagacatggtgcataatcttggggattttggccgagagcccagggccgcaccctggtgtcggtctcttggtctacaaaatggtctaacccttcttataaaagacaaatgccccgatttgacagctcctcaagccccttcaaaatacgtctccccccacacatactcatactcatatatatgactcgtatctctctctctctctctctatatatatataataaaaaggagctcctctaattataatctcctattacaatattttaatctatttttacaccgaaatgagattacagaatatatttttttatatttatatattcgttataattacaatattatttttgtaaatttttgaaaaatttcgaataatttatagtactaaaaataaaattcttgatatttcagtctaccatgcgtgttcaaaactttaaacatattttcgacgttacaaattatttgaaatatttgaaaaatttacagaattaatattataactataataaataccaccattcaaaatttttaaaaaatttacaaatttaataaataacgccataaaaaaagtttgaattataacattctatatttttaaatacaaaattaaataagaaattaggataaaatattaaaggaagcacaccatgtatatatggggacaccatttgtctcgtgatgtactttcacggaatgtattccgtgatacattagatgggtctcagggcacattaaatgagtgtcagggtacgttactatttttaaccttaattaaccctagatcaatctcatctttcaaatcaaataactcatttatctaacggctgccgtacatcacgacatacattccgtacaaatataataacggaacaaaatcatctccctatatatataaatacaatacaaggctcgtataatcttactatcgctctctctctccgtgtctcacccaagtacacagtactatactaccaaatccacccctatctctgtgtttgtctcctaactctgccaactccaaacatcaaagctgtatcccaatctaaacaaatggcacagatatgatgacgtgggagctaccttattgttttttaacattcaaaatttggcaattaatttttttttcttttcttaaaataagataattatctatgtgtatgaaataatattatcgtgacattcttattagaatcatacgattcacagctagcacagaccctagcaagctataatagtacgtatatataaattatataaggtatatatataatatacctgaccacttggggctagctcaagtggccata

SEQ ID NO: 163584 - DNA, 1945 bp, Cannabis sativa
ttataaagtgcattaaagataataaagacctgagttcagcctgtgcttctgttaatttagcagcagcagcaagtaactcggcagatggcatggcggggccaataatcctgccacaaatttcatatgattttaggcaatgtagatgaaggggacacgtaaacatacagatttaaggaaaatgaaaaatggaatttcattcacctccgtttaggaccaaaagaatcatctgctgggcatgccatgttgttatcatttgtctccagcttgctatcaacacccagagctggatttgtgtcatccaatgatacagattgaccagcttcttcagttttaggttccatagaactgagaagtaggggtgcaatgacctccaaagtgggacgaacatttgaaggaagtgtaaagactttatcactattttccttgagacttaaagaaagaaacagcttctttaagtgcttaaccagagatctttcggatacaccatttatgtcaacagcttgtccattatcgatcatttccaaaagctaaatcacatacaatgttagcaattaatcagctactattactataccttattattgcatagaatgggaccagaacagtcttgtcatggaacaataaactacttctgcaaagaaaatataatcagacattacctgttttaaatcgttcacaacattaggaaactctttcaacaactcttgcaatgcaacctggggttgaacccgactttgttctggttctgaatcgccatcacttgaagaagacccatgctcagagtcatcatcactatcagaatcataatccctatacttcttcttatcctccttccccaatttccttctctttctctctctatctcttctctctctacgtctcttccttttctcctccttttccctcctctttctctctcttcttgaactgccatcgtttcgatgacggtgccggcgctgactactcttagaggatcgtttagagtagtcagagcttccctcagagagtgaggattcatcgctagattcctctacttgtttcttcttcttcttgcttgtactgcccatttcaaaccactcctatctctagaccttacaattgggtaaatacaagaaaagagaagttcagcccaggttctactatgtctattaggctttatctaaggtctcaactctcggctccaataataaagcaattaaactaagcaaagcattaatgtcgattggggctgcccaacagacctgaattccagatataatgaagcaatactcgatatttttcaaaacccagatcaaagttctgccctaaattcataatcttgattcataaatgaataaaatcaaacaaaaggagtaagagatagtttggcatacttgttgtgtcgtttaatttcgaaaaagtgacaagagccaaaccctttaacgttaagaggtctctccctcctacccgttcatggattctggctttagcagcacacgcagtgatgaaaccccggaatcaaatttctgaaactatagcttcgaacacggaacagggaaaatgtgagaatataaaattacttccttaaataatctttccttttatttttctcactcatcaaaccacatgccgaaattgtggccaaagcaaattttattgagtattgtgtggtataaatagtttaatttttgttagtaataatatttaagttatatttttaaaattatgtaaatattaatggttaaatattaagtaaattgctacgtgataatctctaattgatctagtcatgaatttttattatttttttaggaaataatttatatgtaccaatatgaaaataaaaagtgaataatgatttgacatttaggtagcgtttgattagaggtaatgaaatagaatggaatggaaaggaaacaattttcattccatttctttgtttggttacattttaaagtattggaat

SEQ ID NO: 163585 - DNA, 1011 bp, Cannabis sativa
tccgatcttccaaaaatttcaaataataataatttgccatgtcaataagaatttattgtgttttccaaatgggcttagcatattcatggcttcaagcatattagtacgttatgtctatttcattatgaactgatattaataccatacaatattaattatataattatatactaaataacactaggtgaacaacgtttaattatgttaatccatctaaaatattctaacaataccatgaaaagtaaacatcttcttacaaaagagtgtgtcatacactactaagtgcagcgtctgcatgctataatatggcgaatgagggggtgatggtagcggcagtaaacagtggattatggaacatcaaagcggtgtgtggaaaacgttacagaattagatgcgtggggccagcaaatcccggtgtgcccagaccatgtaccggaaaaagtgttgtggttatggttactaactattgtccgggctgtgacggctttgacctttctcgcgaggccttttccaccattgctaacactgttgctggaaaaattaacattgcctatactccgtacgtaataatatttatatatatattctcattttttaaactatatattattattataaagtgttacttaccaagttatttttatgtctgacttttcagggtttgatcatgcatgcatgattacgtactataatcaatcactatataaatatatatatatatagtacgtgtatgtaagtactaattaagtgagatcgatcgatggattgctagaagtgtcagtgatcaatggtaatgccttttcaatttcctaaattattatcgtttgagtaaggagcatttaggctttgtaataatgatttcggacatttttataaaatatatattattattaatgtttgtaaacaagttgttagagcagtaacaatgtccaagaaatacaaattaaaactaaaactaatcataaaactaaaacttgaacttaattgaaataagacaaaaaaaacttaact

SEQ ID NO: 163586 - DNA, 1282 bp, Cannabis sativa
accgaacataactgtcaaaaataaacagttaatacagttggagttcatagtacatatggacaagtattagtaggcacacctaaactaacatacagttattcaaaatttatgcttttcttctgcagcaacttccagaacaattcattcggagttatcttgaaccaaaaacacagcaagtaacactgaaagtggggaccaaacagtggactgtgactcttttaaattgcagttctgggttcagtttctgtgcaggatggtccaaatttctggctgccaactccctatgcacaggggatgcttgtgtttttgaggtactgaaacggaagccagcaaaactaagagtgacaattttcagaaatgatgatgtttagttactgaattatgtacatctttttttttcttcttcttcatactaattggtattttagtttgtcatgaaatgttgggatttggtattttagtattgttctgtgattttggtatatgtggttagggtagactattaaaactttgacttgtgctaattatattttatgatgcttaactattaaatttggtaatggtgtaacatatatggagttgtcgatcaacatagttacgttctttttatcactcttttttttacaccatgataaaatttgtgttatatactatgacttagatattattgtagaactctttaaagtcgtgggatttttaatttgttaacttttcgaaaggaagccaaagaaattgaaaattttctttggtaatcttgaatttaggcactaaaagttaagtttagttcataattctctaacctataatcatcatcaaaggacactaatctaatagatagcaaaaaatgatcacaagtcaatgtcattgctagaaattagaaagtagataatgatcaaattttgaaactcaacaagcattatttccttaacaaaattcactatgattgtggcttgaacattatgccaaatacatctcattcattttcaaacttacaacacttaatttgttctgaaaggcatttcttagatgatcacaaacaatggagactgagagggtataaagtttggggtatttattttgtttcttttgaaataatgggcaagattttgttgatgtacaataacagaacatggtaagagatcatttaagccaaagacattgaaaaattccctttggtaatggggtagtcttagagaaatgtagtggttagtcttggctggtaggagtgtttataaaatatccaattcaatctaatttgtacgatctaatttaatctaattcg

SEQ ID NO: 163587 - DNA, 2117 bp, Cannabis sativa
  modified_base (2024)..(2031): a, c, t, g, unknown or other
tgatcttgtgtttgaagaactcttttatatacaaacatatatgtatgtgtatgaaattacctgcgattctgaaaccaaactttgatctgttttggttcaatattagagagaataggacactccctaatgagttgctgtcttcttaaagagctaggctttggacattccgagtagaccctctccaaggcctcaacctgctccggtgtatacctcacgtacttactattatccatttgcttataacaattatttgttggtgaatccttgtgcatcacaagagccatctaacgatacaataccaccccttatacaaaaccagagctaaactacaacccccacaagaaaaaagaacagaatcagtaaaaacaacaaaaaaaaaaccagtaaagtttaagtctttctagacaaattaaataaaaaaataaagagagatttttttttttacttagaaagtttgagttatcaactgttcttcttcttcgtttgtattgttcttcaatatattctcacggggtaggctctcttcaccaagagagcctccacactccttcatcagcttgctcttgattcaagttttctctctctctgaagcacacacacaaaagctctctctctaaatatctggcttttctctcttaaaacccaagtgaaaaatgaatgaaaggagcaaagttgtaagtttttgaaacagtgaaagagggggagaagggttttatgtaaagtctctctagttgatggtctttatctcagacgccaatctcgagaatttttctataacaccaacccacagaaagagaaagaaagagaaacaaacaaagaaagaaagaatgcttgtgtaaatatatgtttctttgtttgtggctttgtatattgtgacagagaaagaaatcaaaaaaaaaagaaaaatagaaaatgaaaaaagccaggtggccaatgctaatccattactcctctcctacccttgtcttgccttttttttttctgggcttttctttttcccaaagattaatctgaaaaagtttgcacttttatataaatagcacaagggatacacatactgatatgatatgatataatataatataatataatattctgtctctgtttatataactgtgtgatgtgaaaaatgaaagagaaagaattaaaggaaaaggagtaataaataggaagaggctgctgctgctgtgttactgggctactgttgctgctgatatgagccactctgttagacagacatatcagaggagacgttttttgacgattcaattcttcttttgtttttttaatttttctctttctttcatcacatatataaataaatatatagaaaaataatagacaagagagtgtactactgtacagcttctcactccataatggttacaacagtaatagtaagtattattttgtattgatgcacatagtatggagaggaggacttatggtgtggaccatttgcatcatcatcatcatcatcatcatacataacataaccatcattgatgtaattggtcatacatactcatacatactattagtattatacgtgtaaagaagggattgtagtgtatatacatacatacattttagacagaatttgtgcatgggaatcgtgaaggccgagaagaaatcgacaaaaagtaaggctgtgtaatattacaaatgttttgcttttattatggctcgttaacaaatgcacggttttggtttgacccgaacccgaatccaaacttaaatccggatccattttttcttaacacaatgtctatcctcttttaaggctttgaaaggaattagtagtgtgcaacactattttaggtgtcttaatttctattagtttaattaaatatgggtgttatataaattaatataataatttttaaaaaatattactaattaattaaaagaatactatttttaaataatattaagcactactaatatttaataacatactcattgttttttagaaaaaagataaaacacaatagttaagaataaaggtaaataccattttggannnnnnnntttgcaaaagttacagattagactctatgttttattaaatgacaaaatagaccctgtattttttaaaatagtaaaaataggaccct

SEQ ID NO: 163588 - DNA, 782 bp, Cannabis sativa
ccccgcccagctatgaacatacaaaacacgtgttacactgctaagttccatgccacactatgcaaaaattgagataacatttatcccccaagtctatatgggagttgttggccgcatagggacttctgaagtctgcatattgctcaaatgggtaacacgtgttttagtgcacatgatgtactagaagtgtcattttccctacccgaggcgcatatttatcttttagtttcttcaaatctcaacatttaatgcttattcaaaaactgataaatgggaaaatgtgttttgactgttacatacccccattcctttaatgattacacctttggcattttttgggggaaagcccaattttaattgtataccgagactaccccttagtgggcctataagaagaactttgtaattcatttagaactatcactagttcttcaatctttgaatcttagaaaaggagaaattgttcttcaggccacgagagcttcctttttagcccagacttttcctgcaaagaaaaacaattctcgacatcacagtgagtaagttatttcctattgaactttttcttgattttcttttccctgctttcgcatgcctggtattagtggaatatatatatatgcatttttctgttgcttgattctagattttcttcaagattatcattgaaaagaaaaataaatacgtgtagggaaagagtgtagatctcggtggtcgccgtatcattaaaaaaaaacaaaattttcagtgcaaaaacaactgcggccaattctaaatcatga

SEQ ID NO: 163589 - DNA, 1026 bp, Cannabis sativa
accggcaaagagcctatttcttctgctgccccaaaaacgctgccactgagtctgaagagaaaatgaggagaaaatggttttgggttttgggttttgggttttagggataattgattttgtatgcgacagtattattgcagcaagatttgtatatgggcttgtgctgtgtgagaacgatgagaagaagaagataagagaagtagttttaaccttttaatttaggtttttttaacttcgaattaaacctgacctttacctttgtgaaagttttaaaacgacattttaggcagtgtcgtttgattctcgttgttctgtaactgatggtactaccagactaccggtacagctctgcctctgctcaaatatttttttccccaaacatgtctgttattttttccccagtctggaattataatcaacttaccaataacttgtcaatttatagacagactaactgtactcaattaactgtactcattatattatacctctataatatgaatgtatgtataggctaggtagctacacttttcagaactaattttagagcactcacatcaaatatcaaatgctttatttgtttctaaaatatttaaaaaaaaaaaacaaaaaattttgattgatgtattttaaagaaattaatgtatagtgtaatataaaaatttaaaataaaatagaaaatataattttagtatgtatgttgaaaaataaagtagataaattaatgagagtgctctagttgtaattagtggaagaaaacccaggatgaagtagtagttttgggaggcatgggcaatctcaaaatatgcaggttttctctgaggaataattcataaattttatgtactattctattatctttccagataataattatgtgagaatctcccacaaaacaacaatcagccagccataacataagctcagggccggccttgaaaatatatgggcccaagacggattaaattttggggcccttaaaaatatatataaaaaaaaatcaaaaaactagtgttatgggatttg

SEQ ID NO: 163590 - DNA, 1544 bp, Cannabis sativa
tatatgtaatttcataatattgtttctactccaattttgtataggtataataagttaatgtatatatgattattatactgctacataaactttgtagcctataatgtaattaatattactggctaacaactctgttcaccaaatccaacccgccatttaattatacacatatacttcttgtatatatatacatatagatgaccctattaattactagacatgcatataatatatatctaagtgtacacagcccaaaaaataaaaggcgtcctttaacttaggcccactgatatttggacaatgaacatatatatactacagtattatattttattgtgcccatgactatatagtatatatagatccaaaagaaactgaaaataccctacaaagcctagttagcccccttttcttataaagtctttctttttggaaagatgaaaccaagacaaaaatttttatatatatatatatagagagagagagagcattgttataacttataaaatcctatattaaattacttacaccatggccacgtccgattctccacatatatatttatataagatcctagtaagttctacttatatgttatgttataggggttcaaatctcatgagataattaatcaaataaagatgaaagaaaaaaaaaacatataactgtatttactatatacatgcaaagcaaggaggaaagatatttatatttctatatatgaaatccgcacaaagttattaaattatataccagatgtgaccagattataaatattctctacatatatatatttatttaagatcctagtaataagttctctctgtatattatattaaaggggttcaaatctcatgagataatcagtcaaagagagatgaagaaaaaaaaaaggaacatgcaaagcaaggaggaaagatttatatatattataaacaaaaaaagaaaaaaaaaaaactatataattaattataaaactcacagaaaatgaatttagagctctactctcttccttagtggttccccaagatcagcagtagcttgtgaagttttctctttggcagcctcatacttatccttagcctcttcggtcattttctctttggctaacctataacaatctttctcattttctttagcttcatcataattcaatcttactttctctttttcattcttattattattataataactttgatcatgatgatcctcatcaatattaattacttcctcaccatgatcatgggggccaataatatttaactctttagcattataggctttgtccaaaacttcattattattattattgttgttgttgttattggtaactaccaagtaattactaacaatactcttcttagcttgtttataagcatttcttgcactttctatgccaaattctaaggcttcaaacattttatgtttggcatcatcataagtccaatcagctccctcaccattttcgctcttgtctaaaataattaggacaattattaaaaaaaaaaaaaacaaattactacagagaaatatatatatat

SEQ ID NO: 163591 - DNA, 4526 bp, Cannabis sativa
  modified_base (2678)..(2680): a, c, t, g, unknown or other
  modified_base (2763)..(2766): a, c, t, g, unknown or other
  modified_base (3119)..(3119): a, c, t, g, unknown or other
  modified_base (4040)..(4043): a, c, t, g, unknown or other
ggcataaaacccaacaaatctatatctgtattctatatgttttctacttagattaataatattagtttcctccagtggagtaggtaaattttcgaaccacgtaattttgtcagtttattattttaccgctttgatatatatttatcactatctttcgctatttattgcttacacgcacaataaattagtatcaaagccaaatatagtgatattatatatcaaattgaagctctcgacgagatgaattcaacacctcaagattcgcctcaatcaaaggtccgacgcacctccagtagccgccagagtgttgttaccagctatcgagttaactcagtcaaacaactattttttgatcgagtcagcccattttttacctgttttcaactgagttggacctatttctaactatttggatcgttctaaattcaactgcggcattcgtttttcaaaataaggtattgaaatttgaaaaacattgttttaagtcataagctcaaaagttctattatttgtttgcaattatggctgacgacaaagatcttgaaaagatacacaagatgacgtaagaagttctggcgagtcaagaggttctatgagaagaactatgttatcaaatgcaaagttttaggtcgagaaatttgatggtaccaataacttcggtatgtggcaatgtgaagtatcagatctattgtttcgagaaggatctaatattgccttgagtctaggccagaagattatttcgatgaagattgaaattttttcaatcgtcaagcttttggcacaatctgactttttctgagaaaagatcagaagtactttgacatgaaagagaacgtagctgcaattctttataaaaagctagaggacaagtacatgacaaaaagtgtagaaatttgactctacttgaagaagaaacttttttgtttctagttcaagaaaggtacccctatgattgaacatttagataattttaacaaaatttagatgttaaagttagtgatgaagataaaacattgttgttgttgaattcattacatgaaagttatgaacatttaaccacaactctgttatatggtaaagatgaggttaattgatatttctaatgttttggtaaacaatgagtattggaagaaggatctaacatgatcataaagactcaatgcaaaaagcattggctaccacctgaggtagatcgaacaataagaaatcaagtggatcgaataatagggggcgatccagatcaaagtctagagaagagtcatcaagaagaaagcttgcaagagacgagtttgcctattgtcatcagaaagggtattggaagaaagattgtccaaacaaggacaagtcaaattcaaatgttgcacagaaggccgacatcgaagaagattcagcctttttagtttcatcattagatatgtatgcaaacaaatagatcctgaattctggatgttgctatcatatatgtctaaacatacattggttctcgagttttgaagaacttgatggaggagttgtcctaatggaaatcaacaatgcatgtcagataaaaaggattggaacactacgtttgaaataaactttggtacaatcagaagacttacgaaaaatcttatttctttaggtgttcttgattctgatggttacaagataacattggaagatggaaacttgaaagttgtatgaggtgcattcgtagcgatggaaggtactcaaaaggaaaatttatacttcctagacgggagtactgttactagaagagtagctatctctagcagttttaaggaaaagacatctgattcttctcacctttggcacacgcgcttaggccatgctggagagaaagctttgcaaggattagtgaagcaaggtctactgaaaggtgcttagaccaaacattttgatttatgcgagcattgtgtgctgggaaaacagataagggtcaagtttggcattgttgttcatcgtactaagggaactatagattatatccacacatacgtctagggaccttccaagaatacttaacttggaggtaaaatatggtttgtgacttttattgatgatttctctagatatgtttgggtatacacaatgcgacacaaagatgaagttactgttgagattttatgccataaataaaactcatttcgatagtcttatttgtaatcaatagaaaattagaagtcatttaagttaacatgttattttcatgattatggtttaatgtacagtttctgataaattcagaaaatatagttattcacaattacagtgatgtcatcacagtgaaaagtaattgtatttatatacttcaaagttttagtcccataatttatcagtgcactagatttacattgacgtgataatcagcgataaagtttacttacacttggataagtggtgtgtcttttctagggcattggcaaagtatactagaattagatgtatggagtatacatccgactggaccgatattgaacttggataagatatcataaacttagtgttatatctttctaagtcaatatcacttagttaatcttagatcaatagatcttattcgtgagatggttaggttctgacttaactatattatttgtgttctttgacttgtttgttaaagttgacaaaatagattggcccaatacttacatcttgggaacatggtagtataattnnntgggagcgctaatcatagatacaaaatctatagcctctataataacatagaagtgaaatgataatttcctttgagcttggctnnnnagagataaatggaagagctcttacttcagtaattattttaatttactgaaaattcatttatagaaagctaactgttttaacaataaaatactgtaaagggtagaatggtaaatttgtccctactcgatgtaaattatctatagaggatctttgattatttaaattaaaacaatagataattaatagtgtatccatatttgaaacatatagagcattctatgtaattaggagtgtaatttcgaatctacagtaggccgggaataattaataagttaggaaatttacttggtaaacttcaaatctaattattggaagcttgactatataggtccatggtccccgcactagttganataatattggcttgtagactcagttaaatggttttaattaaccaattataattctaaattagacatcttatttatgaatttttactaagtaagggcttaattgagaaaaaatagaggatttaatgtttatttgttaattaagagactttataaggtctaattaataaattaattaaatagtaattttatttgataattaattctaattattaaattaatgtatttgacatttataggagtaaaattaaaatatgacatttgtgaaagaaaagataagttgttaaataaatggcaaaattgaaacatgtggggcccacacataatcggccacttaagggtttatttagctattgttttatcgtttttaattccttataatttaaattctaaccctaaaaggaatcctataaatagataatgataggctcttattttcataacctacattagactactttgtcagataaagagcttctcttagatttcgaattcctctctctttcttcttcaaatttttgagtcctatagtgagttgagtgattgtccacacaatttaagtcaatactcaatcacagtgtataagattatgaagaattacatcacctgagaagatccaagtttagatctttgcaatactctgtgatagaaaggaacaagggttagagatttgaacaaaaggagccattatattctgctgccaccaatttaaggttttctacaaatttatttgtttatttcattgttttaagaaattcatatttaggatgttagattatagattatgttgacctcgcttttagccaacaacagtgagtcttgataataagcgataaaggatataattcagatataatatgaaaagataaataaagaacacaaggtttttaaagaggttcggccccgagcagttcggtaatagcnnnntccccttgatttgtattgacttacgaacaaataatacagtgtttcctctcgtatgctcttaccatgaaatctctgagtatgctctcttagatctctgtcaagtaattctttcgacccctttttcagtgagaatggatcactatttatagggctacatgcttgagggaaggtttcccttttacttacaatatctataattggtaagaatacatattacatatttacaatacacaaattgtgggatttggacagctagccatatctctgtgatacgatcctagatttatagggattgatcttgtgcttcacaatgaaaattcttaaattgctaagtggtggtgtgctgcttggattgttcgctgctcggctgggaggacctcgtccgtgcaggtataggttgtcttctgctcggaacatctcttttgggcaggtatggagaatcaagtctacgtgtcaccagcatgtgatgccacgtcagagtgc

SEQ ID NO: 163592 - DNA, 1181 bp, Cannabis sativa
aaaaaatatttccgtaatgtttgcgaattatggcgtaggtacattcaaagtaaaaaatgtatttagtactaggaggagtctaggattgagtggggtctcttttattgccgacctacctacctacttgaataaataatatatatttttaacaaattcttaagtttctatgagaaaaatggataacgatcatcaaatttgttgtattcttctttgttcttttttcacagtcgatattcaatttaattttgattttcttactgttattttgccatgactgctttgtgtgtcttttttattgtaattagatttacagttaagttgtttttggtataattgcaaaaataaatgtggtattaaatttagtttaggttaaaagtacattaagctgaagtaagaccaggcatgcatctttggtatgctagttctactaatattaactaggagcgtctccaaatttgcgtgacaattacaattaagctgtaaaaaaaaaatttaaagctgtaacactatttactcttgctctcgatatgctactgcatttaaagcagtgttcatcatccctttccaaaacctgatgatcaccacaaatcaatagcaacttttatccagcaccaccccaaatttgaataacttgtctttgatcgagtttggaggcttctccaaacagccagccacggtatgaatctatgccgaggcacacgcaacctgttccaaatatgattatgccatctgtcactattacccgggaggcataagcttggagctcacagttttaatgctaaactttcatcgtagtctatccagagtatatatagctgtatatatctcttttaatctctctttcactaccacaactttcttccaatgctaacttgtattacttgagcgttagttccatcaatcttcattctttaagttatctacttaacctgaatgtaatcttttttagaagccattgcctttaccaatagcctcgtgagattccactcttttatgctcttgaaacccagccccggcccatttttatagtcttgcagatgtgattccaatagctaaatagtctgtgttagatttttatttgggtttatattaatttttattggttttattaaaatttggattgattggatagttctttgttgtgttaggccatattgttagtgatcaatagttaatgggct

SEQ ID NO: 163593 - DNA, 752 bp, Cannabis sativa
agaaaagtcggctttgagaaaagtatttataagtacataataggaggagaggaaaggaaaaaaaggaacataagtagagcagtttctatttatagggaaagaagtgatacaagtttcccaattgcatatccaactgcaaagaagtaagtaaaccggaaatagccggtcagacagcacgaggaaattgcctacgtggacaaaacgacacagttgctaccttactttgaccttatattatattttgatttgaagtttttactggccactgccaaaaccaatagccagctttcatttgtttggatttcttattatccatatgcttttattttatttacaaaattaataataataataattgataaacgcgtttcattgttgaaagttgggaacttacgtgattttcagagttatttaattgttaattgttaatgtgggtaggtgaggtgaataatgaatagtttcataattagggttgcattgcaacattaccattagcctcctttttaactccttctcccttactcctacctaaagctaaccctattttacataaatgaaccaaccatttctttctcaatattgccctctatacttgacatattcctttttcttttatttttttttataaagggatattccctgtattgataacccattacccattatgggccagtttgacacagctgtgctgtgggaaaaaacagctgtagttgtgctgtgagaaaaagtagctgtagcaaaactgtggaaaa

SEQ ID NO: 163594 - DNA, 684 bp, Cannabis sativa
attgggtcggatcagatccgattcaaaaaaaaaattaagcaggacggggcagatctgatccaaaatccaataaatatctgaatgtttcggatcagaggtaatctgtgtggtcggagctccaacccgctccaattaaatggatctttttgacatgtctaagaaaaattagttatatgagataaaataggaaataggataagtagtagaatactaaaagcatagttcttaagatgagtaagacaagtgatagactgacaagactttgatgtggtgggaagaggaatactctcccgtgttgaatcatcaacagtcgatgcaaaagaaggaacctgaggcacgtcactagaagtagcattaggatgagagaaagaattatcaatagatgcacgagaatgtgtatgttgaatgggaaatatatgccgataaaaattaacaatgggaagtatatgctcataaaaatgaacatctccagagtgaaaaattcaattagtttcaagatcaaataagatcaagtgaggtataagtttttatatcagtaaggtaatcaatgaatacacaagcctgggatctcagaataacaatcttggttttcttcttcacttttgaaatgtgactaaattcaataggaaaatttgattttctatatttagaaaatcttaaattttttttcctaaatacatactt

SEQ ID NO: 163595 - DNA, 927 bp, Cannabis sativa
ttcgccagcgtgaccgccgagccgactcgcggttagatatcatgcgcctaagctttcgctcgtccaccgagtaaactgctcggctcgaaccctctgaaccggagttggtccccggttgaagcagggaccagagctcctctatttcaccggcttcaaaaaccggaccgtattggcactgggccgcttcttctgagaggaacattatggctggctaatgtctaaatggctagggctcactcactcaatcgcttactaaaatcgtaactaaaaagtgaaccggagggaagaagggaagagaaaagggaaggaacgaagcgtggcgggtcgctatttatagttgaattggagcaaccctagggcccagccaagcagaagattttggaaaaggtaggggtagtttggtccaacaataatagtattatgtgaatgcttgcactatattatctataataaaataaatacttttatctttttttttagaaaaaatatatatatatatatattataggcttttgcattacgtgcagctttttatgtcggagaggtgcaatttggtaattgggatgggtgggtctgtaactagctttctctctttattttttcttctacaaaaggagtgatagagaaaatgtggggtccttgacctgatttggttaacttaatcacgaagaatcaaacatgattgtattaaacaacaaatatatcactggaaaagaaacctcccaaccaaattaatattaataattacacttaaaacattattaattgcgcatatatagaatacacaagaatgatacaatatgcaatgcgttaaccgtagaactcagggtatgttttgaaaatcaatttatctattgttataaaataatatagaataatataaaggttaattagtaatttttcttcccgaattttgacatgtactaa

SEQ ID NO: 163596 - DNA, 1185 bp, Cannabis sativa
tatagaaaatcaaatttcccgagatatattagtttggttatgcatagtctgttatatgagttagttatagtggttgttttactgttttgttctaactaactcagctgctactagctggagtttgttgtattatacttctttcatcattaataaagattcaattctctctttactcatatggtatatatcaaacgcataaaaactttttcttctatatatttttgttttttttttctatcattgataatcgccatagtaagaactcgagctattagatctagaaattctggccaaattccttgccaaatactttcttcacacttccagatgctccatcaatagatccattgatcattcctctagtttctactgtcactggagaaaacaccaatcagaaccatctccctcttcatcgtcctgctcatgaggacaattctagtccttattactaagttctgatgatcatcctggttttgcgatttgattcatttggattattattccaaagtttcaataaggtgtacgtagtggtggtaagaagaaggagaagaagaagaagaagaaggaggtcaagggaagggttattatatcttgttgaatgttgtattgatcaattttggcattttcggattgaagtggggttttgactatttcagggaaaatgcacagagaagaaaagggaaaaaaaaaataataataattaaaaaaaaagtgagagaaaagagattaattattttttaaaattttaattttagaatttattaaatttttttattttttataatatttaaatagtttatattacctgataatgaaattttactacgaataaattttaatttaacaaactaaaataaaagttaaaagagtttaactttaattattttaaaaataaaaagttgatagtgccaaattttaaaattcaaagaattcagccgcaactacatttgatcaaagcaacgtgtgatcaactaggacaacattatgcatattaacaatgcgcataagagaaaatttgaacaatgcaaaatatttagagccttagaggagaggatctaacagtggtaatttttgttttttcttggtaaatgatctaatagtggggtactataaaattttttactttagcaataataaaatgtgtgactaaattaaaaaatattgggacttttttatttttacact

SEQ ID NO: 163597 - DNA, 2125 bp, Cannabis sativa
tttgtctatgtataattggtttttgagatacttgtttgatattcaattaagatgcttaatttaattgtgtatattccaattgcatgaatattattaatcttggtttatgcaaggatatatactgtttcgttatataaaatatttattacttttgattttcgtaattggttttcatttattgtgtaatgtaattttcataagtgcatctgatatgatccttttctcacttaatggtaacattataacatttatatatcttttggattgatgagcattgtgtaataacttgatcaaactataaatgtagattatcaattatatgccaaacttaatgactcatgtttgatctgtatttcagttccgtttaatttgttgttgattcgtttctttagtctaatattgagctatttcattttgaatttatgcataggtatcagcatggaagatgtcatgtcgagcattgttttaaatggagggttgaatgtgataccggaagcagctaattccaatggcagcgtgcattcgctcactccaagcaagcgtgcaaagactggttcctcggcaaaatacaaagggacggtgaagcagcaaaatgggcactggggtgcccagatatacgctaatcaccagcgcatttggcttgggactttcaagttggaggaggatgctgctatggcctatgacagtgcggcaatcaggctgcggtgcggggattcacacaggaactttccttggactaaagctactgttgaagagccaaagttccaaagtcattacaccacagaaaatttgctaaacatgatcaaagatggctcttatcaagccaaattcgaagactttctgaggaatacttgcttagaaaattctgagaaagctgcttctctcggcttattaggtaatgctaacataggtggattgttgtttaagcaacttcttttccaaaaggagctcacaccgagcgatgtaggcaagctgaacaggcttgtgattcccaagaaatacgccatcaagtatttgcctcatatttctgaagaggactcagaggagaaggaaagtctcggtgatgggacggttgatgacatggaggtggtgttccatgaccattcaatgaggtcatggaagtttcggtattgttactggaggagcagccagagctatgtcttcactaggggttggagtcggtttgtcaaggaaaaaaagctcaaggcaaatgacaccattgccttctacttgtgtgagcagagaaatgttttgaatgagaaggatgcttttgctatgatcgaagtggttgaagataacgacagattattgatcaacggtgcagcgaaacattcctgtcttcgattgaatttcgacaagtgttgtaaacaagttgaagttgacaaggaaggggatggcgaagtggccatggaagaagtcggcaatgaaattccgaaggcggctgctgctgctgctgctgccaattcaggttttaggctatttggagtgcaaatagtatgatctgctgattgaagtttttcttagcactttttgggcacatatctaagctagttagttctaattttagttagttttaagttgagaattcggattttgaggctatattatctagtaattaaggggtaatattttgttatctgctattctaataatcttgtttttgttcatatttggcttgtagtcttaattgcactacaattttgagcagccaattatgcatatataattatatatacagggctctagtctacttgttaatgttagtggcagaccaacataaaaaggagttgtttttttctattattattaattgttaatgttgtaactatttgtcgtcctattataagtagtaccgttcacaaaatatctgatttaatttaatctacaaaatatggacatctacatttgtgagaattagattgaaaaatttaaatacttgtgcggattggatattgtttaacctcaaaaaaataacattttttttgagataaattatatatatattttttaaaaatgagaatataaaatatatattgatttctaataatattaatttttatttgcatatacacataaatttaaggaataattatataaggcactattttttgtaaaatatttatat

SEQ ID NO: 163598 - DNA, 3633 bp, Cannabis sativa
  modified_base (3487)..(3502): a, c, t, g, unknown or other
cataggctcaatttattcattaattaactggtggagaaaaaagaaagctgttcttttcttctgacaacaattgttcaaaaaaccccaaataaaaccagccatgataagctaaaatagaattgcaatgatgataataagctaaactctcttgtataggaaatttcacatgcccaaaaaggcattgaattggtaatacatatagtaggggaaatcatccattaaattcatcccccttcgtcataattctttacattattactaataaaaagtcttgatcatacaccatatatcatagcaattacgcccatctcttcacataattggacattattattgggtccaattccaatccaataagcaacttctatggaccacagcaacaagtggtccaacttccttcgtcggtagtagatagatatcttgtacccatcacttattaactccaaaacgtaattacataaaacccttctatatcttcaccaaaagaatatgaagtagcaactaagaattttcagtaattgtgtacaagcaaaaataatataaaaaaaaataatgaattccacatttagtttcccttctggtctttccgaaccgtaacaaccagtaactgaatgtccataaaacttctacccaaattttctgacacaaaatgaatgttgggaaattaaatttactgcatagaattttacccatggttggtttttgcttcattaccacttgaatccccactcctcttgctccttaaaccttctgaagacaccgtcaatggcaatatcaaaagcatcttttacggtctccaaaccctcttggggttcggcatataaaaatttggggatgaattcaatgactttttccctcattttactgacctcctctttactgtacttttcgaggacttgtcttaccgaagctgtaccattttttaccgcattacggtcaatgtaaaccgagtaactcccgggttcgcttggtaaaaaccactcgtactgaaaataagcggttcgtttccagaaaaaaacggggattgaaccggccaccatgcagtcgaaaattgacctgcgggtgaagctatcacccctcggctgaaggcaaaaatccgagtcaagaaacccttcgagaatcgcagacgtgccgttcgagcaacgcgaaccggcgcagttcacgactcggcacgcgtccgactcgttcctgcagtgactcagcaacagccctcgaaaatcgttcctgattgcgcctcttgtcgccccggcaaaggagaaaagagtggtcctgttacggttccggacgaagctctgccattcgacgacgtcggagtctgatctggggtggaatccagtggggtaaggcacaccgatgtcgaaatagtcccacgggtttcgctcaatcaaaagccgggtgatgttacgcatccctggcaagtaaatgcagctcgagccccagtctttatccttggaccgcctgaaatcccacgtgatccgacccatcgtcatgaaatgatcccagccgttggatcgttgataatacggctgatgatggagccacttcagcatcacctcgcaatggtgatcacggtccttggcagtgctggtattggaccaaagatatttccccaccgcgagaccaacgtaaaacggtatgtaaaacgccgtagccgattcgggctccatgacccgacatttatggttcatgatccgattatggaaaactacttccgaaacaaactgatcagtccagtaccacgccgggaccagattctccggcacgagcccagataacgcggtggctcgttggccaaacccttggttcgacaaagcatcgcacctcgagctccatggattcaagttatcgcaactggcaagaatctccctgttcaaagccccaggcaagtcgtagacgaagacccgaccagaacagcattggtccgttttctcaatggcgattgggaccgaagcagcggcgtcgaacggaggggcaaagtggtggcgaggaaagggaagggaacgaagagtgaggagaagaattacctggagagagagaattgcgaggaggaggcatgttctgggatggttagaaggtaggagaaccgagttgagtgagttagatttaagcgataacaattccgggggtttattgtgctttttattgctggagagagtttcaggagtgggaaggcccgagtgggaaagcatcagatagagagaaagaagtggatggttgggaactttttccggtggttgtgaccggaaaaaatggaggtggattttagggttgtggtgactatttagttgttcgatagagagagaggggaagaaaaggagtgcgttggtggcgtttgtttgggtttaaactaaagtgctgagttttttttttattcaagctatatattgggaaagaaatatacaagaaaatagaagagtgaggaaaggacacgtgtgtttaatcagcagctacagcagacaccgacacaggattgtattatgatttattaactggcacgtggctgtcccttccgcgttgtttcaattttatttttttgatagattttgtttcaaattttagtagtcttttgtactcttttttttgtttcctataattttttgttgagagagtttttttttcctataatttgatagaaattcaatttgaaaaaaaaaagcaagcaaataagtgagagagaaagaaaaagtaatataaactaaaatagtataaaactataaattagacatttttgaaaaaaaaaaaatgaaaaaaattaatgaaatctaaataaaaagtaaaatctaccaaaggattttttttatgtatctacagtaagtacatattaattacaatacaatataaattagtagaatacaatatatataacggctttatttattttttattttttaaaaaagaatacaataataaatacaaaattaaaataattaaatagtcatattaatatcgatagtcgtttctatatatatttataattatatattaatgcaatactactaattataagacctactatatatattatactagtaaagaacactcgtttttcactgcagatatttaaaaaattttaaattatttatataaaataaattatagtttttatttattaacaaccaaataataaattgtatcaaattttaatttaatttttcatataattttgtatgaaaaattatgtatgtacaaataaaccgatccaattcgtatttaccaaatctcattattataatggaagctagacacgacctgtataatatgatgttaggcttgacccctcaaattgttataaaaattgctaaagttttatagaaaacttatcatataatttcaaaatcgttctcatcaccgtatatcacttgtagtcaacattacattcaagagtgttattatcatatctcacctgtataccatgatgataggcttgacccctaatatatttgttgtatataaaatatatgattcaaaattaataataataataatnnnnnnnnnnnnnnnnataataataataataatatagtgtttcttttaaataataataataagggatattggcgtctaagccacctgaactttacgatttgtaacatttaaccacaaaaatcgaatttttggcaactaaactaccta

SEQ ID NO: 163599 - DNA, 1063 bp, Cannabis sativa
aagccactgctggacaaattggtgagcccgtttcaatccgcctttttgcctgggagatggatagcggagcgttctgttcttgcctctgaggctttacactctttgcaaaagattagaggcaaacggggattcatggctgtcaaaaccgatatgcacaaggcatatgatcgcatcgaatggagcttcctccatcgggttcttaaagccaatggattcaatgatcatttttgctgcatgatcttgcattgtgtgtcgtcggcaactttctcagttctcttgaatggggcgccattgaagtcgtttgctcctaaacgaggtcttcgctagggcgatcctctgtcgccttacctgttcatactttgcagcgaggtgctttcgaaattgattcttaaagcggaaggtagaaagcaattaacgggtatcaaagtgggtaagtctgctcagcctatttcccatttgttttatgctgatgatgccatttttttctgtaaggctgctgcccctgaagctagaattctcggccaatgtatagaaaaatacgaagaatggtcggggcaaaaagtgagtcgtaggaaaagtgggctggtgttctctccgaaagttaaggctgaggacaaatctatcattcatgggattctaaatatgcaacttcttgacaagaaggagaggtatttggggaatcccttcttctattcggctaagggaagagatgacttcaaatacattaaagagaagctcctgaatcgcctggaggggtggaaagcgaaacagctatcgtttgcgggaaggcaaactctgatcagtacggtacttaacagtattccttgttatgctatggcaacaatgaaaatcccagcaaccatttgctctgaaatggatagtatagtggctcaattttggtggaaaggtggttcgaatcacgggcatcggtaccttgctatgaagagatggggtgactgctgccaaccgaaacgccacggagggctgggttttagaagattcaaagattttaacatggccctttcggcgaagttagcatggcagctgttagagggggagcaga

SEQ ID NO: 163600 - DNA, 2026 bp, Cannabis sativa
gtgtgtgtgtgtgtgtgtgtgtagacacattattcctgacattttggctccagctcattttgatatatttacatattgtaattaatattcctttggggtttaggtgaaaaatcttctcacagttcgggcagagacagagactccagtaagtgctgtctccattcggagaattcctaggtgtgcccttttctcctcatcatcactcatgttttaatatctttcaaaagtctgaccttctcatgcttgaatttaccagggtcccagcagacatgccactgtatgatattcttaacgagtttcagaaaggaagtagtcatatggctgctgttgtgaaggttaaaggaatgagcaaacgccctcaccctgattttgatggagagaaaattgaggaagacatggtcacaaatgcaaaatctcttctgacaactcccttgcttaaaaataaaatgtacagcgataaatcagtaagtgttgttgttgacattgagaaagctccaagatccttgccaaacaaacaaacctttcaacaaaatggttttacaacaaatgggttgccacccttatcagaagatattgaagatggagaagtcatcggaataatcaccctggaagatgtttttgaagaacttttacaagtaatctatgctttcaccataacaataacaataacaataatggcttctaagagtttaccctgtttttcaatataatttgtctttaaatgttgttgcacatttatgatacttgtcaattgtgcatggtttctgctgattttcttcccaaatgcaggaagaaattgtagacgagacagatgtatacatagacgtgcataaaaggtaaactgagatctgttttctcaattctcactatctttttctcaacttgctaaacgattaaccaacttaaaaaactggtcttaacatcttcagaatacgtgtggcggctgctgctgctgctgcttcgtttgtggcacgagctccatcaaatcgcagactggttggtcccaaacctgctgtaagttaacttctttcctgttcattccatgtcgattgtctgagaaccttaagttggatgacgagagcaataacctacatgacaatataactaatgtatatatatatttgcaaatggtgtgttaaataaatccatctcgtattgtcaattcttgaatatccatttctcatttatcacactacaagggaaaacataacttcaaaatattactaatttttcctcacaattgtgcaactccaatgaaactaaaatggcctctgaacatatctcaattatccttttagggagttcaaagtaagccagggcaagccccgagaaaatctgcggacgatgatccccctatcattaggattgcaagggaatccaatgactcttctgcgggtgacaagagatgactccaaacccagatggtaaattagagagtcatgtcagcctctctcattgtcttgttgccaccaaattatggtttttgttaactaaaagctctgaccacttgtaagttgtattatgggttgtgtagattttagtgcgtacatattctcaatatgtgggtatagtatgttcattaatagttttttttttttttcttcaagtctagaaccacttgtttggtatgtaacaagtatcttaaatttaaacgagtagtgatgcttagcttcattctgtgcattacttttcacgtcacgttccttgtcatttttgagacctaaaatatgaagagcaaatattatgtaaaaatattgttggttttcactattactttcaattaaattaattaagggtaaatactattttggatcttgtgttttacaaaagttatcaatttaactttctgttttgttaaataacaaaatggactttgtattttttaaaatagtacaaataggattttgaactgactttttatcaaaacaaatttaataataatataatctaaaagtgttataataaaactgtttacattttttgtatttgttgttcgtgttaagaattatcttcaagttagttatat

SEQ ID NO: 163601 - DNA, 1090 bp, Cannabis sativa
caaatgttaaaataaagaaatggggtactattaaacccgcccaaccttcaaatgacatttacaagcagaaacattaacaccccagattcatatttgcagacaaggtaaaaaaactccatatttcaacatttaatatttatacagaatgaaaatctgggcacaacttaaagcccttctaagaaatttaagagcaattccatgacaagagaaatcttccagaaatccacgaacaccaaaacaaacaacaaaattagatgccctttttcaaaaaatcaccctaaataacattcaagtaaaaaagaaaagaaaaaagcaacaaatacagcgaagtaatcagtaatacaaaaaacagatgtaccaacagaacttaccatccatgcagccgtttgtggaggttgatggtgtactcccgtgaaaccacctcctccttcctgcccttggtcttctcaaccattttcgtgctccttgtctttcaaactacctgcaatcagtcacagaatcgttaaaaaataatacccacaacctagatccaaaattgtcagctcaattcctgagacactttcagtattctagttatcgaagaaaagagtaacccaatttggatgcaaacggaggatcaacaagagaaagagagagagcaagaaacaaaccttagcgggtatggaggctgaagaaagaaagcagccctggaagtttcaacttaaaaagaaacaaaaccctagtttctacacggtaagcaatgctatataatttcttttattattattattattattaattattattattattattttaccagaatgctataaaaaataaataaataaataaatgaaataattaattaattctttttcaaaaaaaaaataattaattaatcactcatttcccattactaaaaaaaaactcaaaatatttattaaaaaaaaattgcgtcataacctccttaagtagccaagtatttgcaattaaccctcaattctaaaattttggtggtgaaacctcataaactcgtgttttattagcaatttaacattttcatccatttttagctgttaactgctaaggtggaatgtctacgtggacacag

SEQ ID NO: 163602 - DNA, 2312 bp, Cannabis sativa
gaattactaggtttcgagttgaaaaccgaaaaaaaaaatgaattaacggaggaaaagattttgtcgcatgaaggaaaagattttgtttcgttcttttctatctatattaagttttaaaacttaatatatatatatataacttaactgatagatttttttaaaatgtaattattattaataataataatataatataaaaaatattaataaacattttattattaatagttatcttatcattttttagccattaaaaaatctttaattttaaggtatttggtcaactccgagtatcccaaaatacccagatattcctaaaatcgacttatcttaataattctattaatattactaactaaaattgttttaccatttttgacctccaattgggtctacaggatcgccaaacataaaatatttttatttcacaaataacttacattatatccacatatcttaattaaatctccataattaataaattacgttatttatccacttccagcaaaatttattatttatgctaaattatgttagcaagatcataatcctactcattattacctaattaattcataatatataataaatcttaattattcataattaagtttccgagatattacatcgatcccacaaggactataactaaatactaattaattgaattcctagctctatctggcaaacaaaaatatattagtgattataattaaatattaaaatgaaaataaataaacaaagagaaaattaatgatgattagaaatttaaggcaattaatttcaattgcatcaacttactatggtaaaatacaatctagttttcttcaatttcatgtgatagctaattattaagtcaatttatattctttttaggacatatagactctaaatcatatggcaaagtcttacacttctgtgataaatttcacatataattttcattaaacaaagaaccacatgtatggtcagtgtagcaattaagatttttttttaatgcaaattataaaacaaatagaactaattgaaactaaactcattaaaacacttataaagactatagcataatcaatactaactttcaagtttttcttaatcataaaacaaatagttggtgatcgaataattataagcattaaacacaaatgaaatagattcacatataaaattaagaaaaaaaaaattagaattgcattaaaccatagaaaaatacaaacaatatccattaaaaactataattaggagtttagctcctcattgtctttctaaacaattgcataaaactacttaaaaacttaaaatcaaagatagaataaagaaactctttgaagatcaatagttgtagcctccaagcttgcttcctatctctatttttgtcctcccaaatgtccaaatccaaaagcctccttttgaatttttaattattgtttgaaaaccctattgggcctgaaattgggtagggccacaccatgcacttttcagtgccgcagcctgtatctcgaaacctccatcttcaataccgacttaacaaaggcggcccacgacatgcactatccagtgcagcgacccgggtataaaattctcagacaactttcttctatgtcgtggcatggtcttcaacaatgccatggttggccttttgcctcaaattctaatgctcgttgtccatttttttccaaaggagagctctgtcattgaattttcatgccatggcattaccccaacatcttcaattctccagtttcaaaggctgtgatttcactaaaacttcccaattagttcagaaactcttcttttggcaagctagcaatacaattgcaattaaatcttcatttttgcaccatttttcttcaactcattcattttcattgttattcacaaaacctaaaaatattaccaaactaaagcataaaatagaacgaaatgaaactaaactcgttaaatcacttataaacaagactcaaaaataacataaactaatgcctaacaaatttctccaaatataacctttactcgtcctcaagtaaagattgactcaaactaaagacgaacaatttaagccttagtatttactcacaccgcactgtcactttttacaagactcaactgttttgaggccatattttcaatccaactgctccatttaccaactataacactcaaattggaaacatgaatataactcaaaaatgacaatcaacaatttgaaatgaccatacatgctcaacaaaatccaaaaaattccacaaactaatttttaatatgctcgcactatttaactttctccactaatgtcaacaacatatgctttg

SEQ ID NO: 163603 - DNA, 2407 bp, Cannabis sativa
tttgtttatctgctttgaaggttgatgaaaatatggaagcaatggagcaacttgctactgctacaaaagatttaccgtgtgaaggaaatcaagcctataaacagactaatgtaagatggagcaaacgtatactattaaatttatccattatattcaagtgggacaaattttaaattcagtctaaatatagttagtttagaaaataaaaaattaacggctgcactcacttgactgtgagtggctttgcccctgcttccatttagattttttcagcctatctctttattggttctcttgatgagtcttgcaatctttaagaggtagagaatctaacatactactatggaatctacacatacttatattataacttgtgtttgaaattatttgcattgtgaaccaaagttgctggatcaggcatgctgtatatgcaactgttggttcattctagtcccacaagttgagtcgagctagttttaatcagcctctaaccctgtttttcttttaactagcagctttcaaatgctatcgtagagtatactagcctagatgctataataagatcagctgctgtcagcatgagatgtattcctgctgaattcgtaccaacccctccaagaacatcaaaaagtgacgactgtgatacgggggaaaaggttgccgagctttccacaaaatttgctcgaaatgaaaggataactattcctgctgaattcgtattaagccctccaagaacattaaaaagtgacgactgtgatatggaggaaaaggttgctgagctttccccgaaacttgctcgaaatgaaaggataaacattccacccagcaagtatgtttcttcggatttgctgtcaaggattgtagtgaacggaagagacagtgtactacctgtgactaacactgaaaagttggccgtggctttaaataactctacagtgaaaaatccaatcatgaccaagctgaacaatgtaggagaaacagaaatcgaaaaatctcagaaggctattgttgtatttgacaactctgtttcagacttgagtggaaaacaccaaagtcaatcggcaatgaggaaacttcaatcaaattcgcaaatcatcagagaaactatgtctgcattcccttccgcaacagaaagcagcagtttgaaagcatttccacttaaaagacgaaaatgtgagcctgatgacaacaatgttagattagtgcagctaatgggtggtaagcgggtaaagaagatgggacagcgcgaaaattatgccaaagaccataacgcctctgtagctatcatattaccaatttcacagtcacaagagagtaaaaagacttcaaatttgccacgtagttcaatttcaaacaagcctgcaagtgacagcggttctgttgacaacgatcccaatgccatggctttgagccttttggccgagttgtcttctggtagacgtgtactggacggtatgaaaatacaggaactgaagaccatcgccaaatttttagatctcactaaacttagtaagcttaagaaatcagagctggttgaaagaatatctgccaaacgaaaagagcgtcaattttgaaggtagtttgtacagttgttttgtttttcatctcactatttcgggttactgttgatctccttgaccgtgtctcatgtcccagggcgctctttctaacttttatcactgtccatagcatcattccttttaacctcccacaaaatctaagagagagaaagaaacaagtatatgaaaaagaaacaagtatagaaaagaagctagcttttagatttagtcttagttttacatgaaatgcttttataatggtactagggggctttattgcagcgatgacaaagaaagaaccacacaaagctattcatattttttttttgagcaattgtggccatttcaactggcatagaatgttgggaaaattgcatttaacctttttgtatatagaacttggtggattttgaatccaatatgatgaatacataggatttgaccttatgaattgttttttcagtatagaaaattgtaaacacgtattacagtttatttctctccacgcccatgttttgcttatagtgcatgcatttgttcattctttgtattttgtctttgcaagtacatcaatatgatttattaccactattgttattttgcactttatagtgaatgtacgtgtactaataatcgtatgatacaaaatattttagagcattgtttttaggtataggtactagtggtatctagtactactatgaagtgacacattagcggtaggggtgcccattgagtggagtttttcagattttcgagtcgagtgttgaaaattatatacgcaagtatacgcagtcaaacaagtaataaagtgataagtaagatcgtctccacagggattgcaaaca

SEQ ID NO: 163604 - DNA, 748 bp, Cannabis sativa
aaaaaaaaaaaaaaaagaaactctattattgcttacagaaaactttcgatcatcaaacaacattggatcgttccaatctccaccattcaagctattcaaaaatgtcacttgaagctactaaagcagatcaccatttaaatttcattcgaagctattgagacaaaactttaactgtgagattcagtcaatcgtttctcacgaaataaacttttgaacagaaagcaacaaggtttcctttaatttcatacaaaacataatcaaaagaaacatataagtagatcgacctaaaatagaaaagaaaaaaataaaaaaaaaattaaaaagaaatctagccttatacacaccatcaagacaatctttactaccttccacaccatcaacaagcacctgataggaaaaatttataacgcgagtatttgtctcgtttcaagtatacaaacactattatcaagtatcaataattatatttttttttttactttctatttagcaaacaaaaattgaagaaatattattaaaaccaggaaaacaatttaattatctgtaaaattaagtaagcaaacaaagattagaacattaattttgtctaacttgtaaatctattcatcttactaatccattctacaatttataactctaattttaatagcgggttataactaaaacgaatcatattctttttcaagatatatgatacaatttggtaattgtatcgaattgcactcttcgagtcagtgccaaactccaa

SEQ ID NO: 163605 - DNA, 6250 bp, Cannabis sativa
  modified_base (6211)..(6224): a, c, t, g, unknown or other
gtgggagcgctaatcatagatgcggaatttatagcttatataatgacatagaggtgaaatgatgatttcctttgagcttcgcttaatagagataaatagaagagcttttatttcggtaataatattagtttactaaaatatcatttataggaagctaaatgtttaaagaataaaataagtagatcatcctaaatcctgagttatcacaaactcttgttcatgttattaatttctttgattcactcaattgagtttctcagagaagataattcttacaacttatatttcgggaatctaataatgtgaatggctgggaacatgatatacaattatggaatcctgactttcctaatggatcgaatgttagttccctttaagtgttaattttagaattggaatgttgtgcccaaatttaaatgaaatctaaattatacttccactagtgaattaatggtactaaaggatatagaaaaaattagaagggtaaaatagtaatttgaccaaaactaattacgaaccaacacatggagggataatcactggaattgattatatcaatggacactgtaataaaactcagtaaatataattttataattactaagagttcaattctatatttttagtggagtaatcatagaattaataaacaataattatttggttgatgagactcaatagataaactactttattggatattagaattatggtccaaggtcctcgaattgccaccttaaaacaatgtcaagagtcgggataaagagtagtataatgatgttcagaaaaatcttttttgaattagcaaaatagtaattatttattttgtaataaataaataatttttcaaattaattaaataggtaagacaaaatttgtcaagacaatatctgttgagaaaaaaattatcaggataaaagacaccatccttgtcctaaacaataaggtaggcgcctaccatgtagcttgtccctatggagtttgtatttttgggttaattaattctattaggtatacatctaatttaaaagttggttatagttatttcaaagttgttgagatattctctcataaatatcagtaagtgaattcagttatagatatttctttatttaaataattaaatatgatttaattaaaagaattaactactataaataaaagcatgatttggaaatcagtggatgcttttccacatcaatttttaaaattatcagagaaaataaaatagttttctctctcaactgttcttgctcatgtgttgagaactcaagaacaacattatacactttatcctaatagctcaaactattccttgtgtacggtggaataatttggaagacactggtatgagttcaattgtattatcctcatcatctggattaagaatacaacatacaagaagttttgaagatatcgtgatagtcttccagaggtatttgttctaaagatattatatattattttgatttgatgtacatacatctggagatccaatagaaaatggcacaatgataattagataatatgaaactcttccgctgcgtacctgatttagtaccataaaaccaacacggatatcattgactaaaggcatgccacaacacaaattcaagtatcataaatatgggattcagttatccctaatgcaggttttggttgtacaactaaaattattcaatgaaactctaattttgatattttctattatttatgtgcacattaattttatctaagaaaattatagtaagaggaccagaataaacataaagtttaggatttgttcgctaaagtacattgccacataaattacattattatataatgaatatatcgtaatacatggaagataatacacatcatatgatgatgacatatcgctataattcatatgtttattatgtaatgaggaacattgggtttaagtggtaaatctaaataatgaacaagtaggaaaatattagaatattttctatattaggtataaaatcaatttactgattttaacgtgtatgagggacaatgaatattttatattcatcgaatttagaaataattaattggttgatatctatatatgatcagattatgatttaccaaatattttataacttgatataattttttaaattagttgtcaaaatattctgacaattaatgtggcagaaactttgatagacacctatataaatataggtctcagtcttcgagctcactactcattctataaaaacagtaaatccatctaaagagagaagagggagcttggaagctcgattacccacactaatatgtttccttttcttttgcagatccaaagctagtgtgagaatgaagctcaaagaatcaatagctagaggtatttcggtcctttcatcacatatatgattttgatatgtttacggtttattctgcttttcatatcaatcgtatatgcttcatttttcatatctaaataatctaacggtggtggaagctactggtttctacgatggctggtctagggttggtgaaggtggtgggtaataatggctggtgtttgccatttccatcaaggttgcaaatcgagtgagctagggaaaaagagtgtgagggaggaggcataggtggagaagatgagagttaggaattttagggtttcttttacttttattttcatttattgggtctttttatttttacattttaaagtagatttttttttttgtatttttacaaaaatttacatagcaactaactatgcaacctaaattcacatatcaataacctccggagcaatctaaaccataaaaaatggaaaaaaaaattaaaaaatattatatggagtgattactccttatttatttagtgaaaaatagaaaaaaaaatattaattttaaaatttaaaataattttcaaaataattttcaaaataatttgtataatgtttaagcaattaaattatgttggtcaattaaactgtactatgtatattgtgtccatgaagatagtgtaatgtgtattcataaataatccaacatatcacttaacactagaaaattaaaaagaaaaaaaataacaaaatgttaacatgatatatatttctcgctaaaaataaattttcggggttaatttaattgttgataaaagttattgtggtttggcgcgatttactcattaaattatgaaaaatttacattttagaccattcaaaataactaaatttcaaaaatattgtagtttatttaatacctaatatatacttctttctaaaataattatttttttcaatataacttctcaatctatgtttgcaatgatgatatcatcattgtccatgtccatcacattttaattcatgaacaattatcaacaattacatgaaataaataaataaataaaagagaaaaaacatatctttgttgctacttaataattgtcaccaatgacggaccacgttctataaatagacacataaaactttgaaaaataaataaataaagattagttatcctttcaatattttgtattttttaaaatacttatatggaaatatggagaaataaatttttttttttttgccactattttttttttttttttgctttttcaaattttattctaatagagtgtattggaaaaaatttattttttataacaaaaattttaaaatattagaagtttataaaatgggtatatatatagcttgtaaatgattttttttttcttattagtcatcttttgtacttggggtatgatattttggtttgagagagtttatgggtatttagggttttctttaggtgattggtttattttgcatgtatgagtatagacatagtataaatatatatgtcaaataaacttatgagcaagaaatttcatgtaaggaatttcattatatttaacaagtgcatatattattatctaggttgactatgtaagacatgctacggtcatgtaatttgtatacatccagatttgatgtctagacttcaaaaaatatagactaattagtttgttattttatagtacacatggtgtttgaaacaaaatattaattgttgttccaatatacgaaaaataaactaagaggtttattggtgtctatcattatgtttgattatagtttactctatattgaaaaatataaaatgttattccaacaaacagattctagtagatttattgaaatatataatggtaggctatatgaaatgaaatgaattgttgttccaatatacgaaaagaaaaataaaaatttgtttcaatatgccaaaataaactcatagatatattagcatatacgatagtatagactatacgaaaaggctaccatgtaaacaaagaatgaaaatttgtttcaatatgccaaaataaactactcactttttttttccatgtatatgagtataggtatagtatagttatatatgccaaataaacatatgagcaaggtattttatgtgagcaagatatctcatcatattcaaatttttgataagtgcatatattgttatccaggtttactatgtaagtctgtaagacatgttacagttatgtactttatatacaaccagatttgatgtctcggcctgaaaaaaaaaacgaactgttgtttcaatatacaaaaaatagactaataggtttattggtgtgtatcattatgtttgattatagtttactctatattgaaaaaattaatctcttgttccaacaaacagaaactaatacgtttattgacatatataatggtaggctatataaaatgaaatgaattgctgttccaatatacaaaaagaaaaatgaaaatttattttgacataccaaaataaactaatagatttgttagcaaatatgatggtaggctaaacgaaaactttaagcaaagaattaaaatttgtttcaatatgccaaaataaactaataaatttatttgacatatgaatatagacatatttgattataggatttttggtatgatcatcatctttttatttaaagttgattagtttatcaaaagtaaccaattagtatcttatcgaatcataactaattggtccagaaaatagcgtatttataatgatttcaaagttatttgtaactttattctttatttaactaatcaaaatgcatataataacttacatttaaaaaatattggtgacttaaatatttatgatatatattattttaaaatactgtttactaagatggtaggttactgaatgacaatttatcatttttaaaaataaacttaaaagttacttaaatgtattaatttaattcaaataattaatcgattatttaagtgcatatgtataagttttaaagggaaacaaaatgtattatcaaattatataatgtagaagtgatactttttttatgaaaaagttacttcttgatttattatcaacatcataagtaaccaaaaggttctttttgaaacgcaaaaaaattgaaaaataaaagaatttcgggaaaaatgtttccctctactctgctctctccctccatggcgaggaagaagaaggtaggtcggaaaccagtcacgcgcatccctttagaagaagtcttctttggaatcacaagggaggtggaggcggacgatgattcacgttcgacggagggcttgcagttgatagctgagatggtcaatgctcatgacctaattgaaatagaggactcaaatccttcacctaggagtcgatcccaaagctgggctgaagaagttgatgaagagcatccgaaggtggaagagcaccagcaatccccaaaatcgcctcaaaattctgggagagtctttcgaaggaaaagacattgaagagggatcaaaagcctctattcatggagccaatgatcagagatgggttgaaaatagcacaggtggatctggatgaagtctgagaagaagaactatgctggaaatcagcagttatctataaggtattgggtgctaatccaccaattaccatttttgaaagatttgttaaaagggtttggggtcatcttggtattgctcaggtttcaaaactgtgtatgggccttatcatggtgcgatttaacgatgaagcatcacgagatcaagttgtggaagtgggagtggttcaattccgtcgaaagtcagtcattgttcgaccatgggctgcggatcttaacacagtgaatttggttcgcacagttcctttgtggattagattacatgacctaggtgttggaaatattttaccannnnnnnnnnnnnntaccatgtatgtttcattaacatcct

SEQ ID NO: 163606 - DNA, 956 bp, Cannabis sativa
aggacacactaaaaaaggagggtcctagattctagattgatactattattattattataaggcttcaaattttgatgtttaacattttaattcaattaatatttataaaatttctcaaacaaaatgagattagtattatgtgttaggctataaagaaatccctaaataaggtggtgtggaaagacaaatctttttttttttgatttaagcgtttatatattacatcagcataatttgagactcaaacccaggaccttcaatacacacgcaccccctatggccacttgagctagcctcgagtggttagaacaaaaaaaaaaacaaatcttctattactactcatgtttctgctattaaagtacattccaccgcaattaaagtacatcaaacaaagttaaaagtacatcatagaatgattttgtttttaatcatcaaagtataacaggtgatgagtctggttgatcccatttaaaaaaaatatcatcttgatcatctttttgatttacatcatgatatgcatgtactccatcatttctcactctccaaatgcatgttggagggcatctattttcatctctttttgcatcaaaaatattaaaagtttttgatccacctttccatgtaaaacgacaataaaacaaagtagttccatagatattaattctaaatttccacctaaaactttgattctcacttaaatcatgagaccctaaatcatcgtctttagatttgcaatgaaccgtaagtaaagtaccattgtctaatttgttgtagatttcaacagttgttttctctaaagaaacttctcccaaaatttgtgttgacattttggtatcttcactctttgccatggtgataaatattaataatattaatgatgaaatcatcatcaaccacaaacacaaagtttgtttttgatgaatcataattttttgttttttttggttttttttttt

SEQ ID NO: 163607 - DNA, 1270 bp, Cannabis sativa
  modified_base (1211)..(1228): a, c, t, g, unknown or other
ttgaggtgaagttggcactagtgggaaaataactcggttagtgagattggcactacaacaatccaccggtggagttgatagtctttggaagaaacctattgtgagagatttgggaaaaaattggtaaaaaattccccaattgtaagggttagtcaagcccgttaacttggctcgatagttgaactcaaagctaggtccataattttgaagaccaaggacgtaggtagcttagttctgtcgaaccttgtaaaaatagagagtttgcaatttctatccctaaaatctttacatttcaagtttgcgattttatttatacttgtgattatatttgttattacattaaacttgaatatttacatgaattatctttgagatttttaaaattttgaagttagtttaaatttccaatttactcgcctcttgaaaacctatcttaggctaacatattatagcttcattacttatttctaaaaaagaaaaaaaatattataaaactaaaatatgtgattaaaattaagtgactaaaattataattatattgggattatgcacacgttttcaaatattcaaaattttaaaactttaaacattattttttttaaaaaaaaaaattaaaaattttataagttttttctttttcattttttttttaattttgtaaaattttaatattattgcttttgatacatcttgctatcattttagaacaatttattttgcttaaaatttttacataatattttcttttacaataatgtaattatatctagtacatgtatacatctggatttgttctgtcctaaattagtatctactcaattatatttcatagccattttcttatgaaataattgaaaaagatttgttagaaaatgatttaatccacgctatttttaatggtggagaaaatgttaggttagaaaaaaaaaaaaaaaaaaaattaaaagaaaacttaggggacccactaaatttgttctacccaattagactataaattttcaattttattattagagtacttataaaattgaaaaagataatttcagtaataatacttaatttttttattggtgtactttaatatttgatatttttttttacaacaatagtacaaaaagttaatattttagggtgattctacaatacatctccttaaaagagaagtattgatgcgcccttaacttattttgacatccagaagaattttttannnnnnnnnnnnnnnnnntattcatgtacgttatacctatttaagatatcttacaaaatt

SEQ ID NO: 163608 - DNA, 1919 bp, Cannabis sativa
tccgatccaatccgtacatttttgagatcgtttgaccgaaaaattaaaataaaatcagatgaaaaagattgcagcatcacaattaactttaagaatacttatattttgttttatccaccgcttaaaatacacaaaagtaggaactgttagagcatgttcattcaaccttgtaacttaagtactcaaatattgatatatatttaagaaaataaatgttaaaggcaccaccacctactagatatcttatattactattggtatattaactattgggtctcatataatttaatttaatatttattatagaatatctctaagcaattattttataaggtgatatctctaaatggtgctagcaccactggtgatttagagcattttcaatggtgaagtttggagagaatatttggtgatatggaaaaatgcttggaaggagctaatcattagagaattattggggtagagaaagcttaatattttttttttgttggttctctctgagagagtgaccctggtccctggggccttcacctagtgtgtatcatgctgggtttttcttggtgtgaaggaccctggtagtgattctcagggagctttttttggtcctaacaggtctttgattattgtgtctgttgttgtaggaaatgtttttcatgtttgttgtattttcttcttaaggttttttttttctttcttctggttgtgagtttcgaggtgtagtattatgggtgacgaacttaaacatcttacaacactagcggatgggctaaatgttgatgaggatgagatttgggattcaaatgaggagactgctcaaaagttcaaagaatgatcgatggtaggaagagttttagctagaagaaattttactgctaactttttcaaatcagtttttccaggaaatggaaaaaagaagttggttggtcgatggaaattattgccaaagagaagggatgcacagtggtgggcttatcttttgaagataaggtgttggcggaaaaaacttacaagaaatccacttgtattttcatggtggtatcttgataagtgaaaaatggccagccagagggagatgaaaagatgtgaacttgaatacgattgaggtttggatcaaaatgaaaggtttttctccaaatgatttaaccattaataatgtgaaacacattggaagcatggcaggagaagtcactgaggtggtttggctgaacacaaatgagagatgcggttagagtaaagatcaaatttcctacaaacaaagctattttgtgggaagatatattcccagtgaaggcaaacagatctagatactgttcaagtttgaaaatcttcctattcttttctatagttgtggatgcttcggacatgagaaaaatgattgtgggaggaatgtagctaaagtgaaacatgagatgggtgatatggttcttctgtatgggaactggctcaaggaagatactagattatctagttgttttaatttgttgaagttaacgtcggtggtggactcaggaagagaacaacaacttgtcggaacagtccagagctaatggtgactggagaagtgggaaaaaccagtgatgtatggaaggtacggaaatggaaaaggcgcatgggggagagcaattggcaggttcaggagttagtgcagaaaaagttggtaagtcccaaaggtgtttcatacaaaaggaacatgttgggataagccaaacacttggaaagccaatgtcatatttattagaaaaaggtgatcagaaaatgagtgggaaaggggaaggcacagaagtagtggtgagtcagcaagaagtaggggtgagcatagaatccagaaaactgaaaaaatcgttcaaatcgatctactgaacaccgttagaactgaaaccgacgaaaccgaaaaccgaaaaaaccgctaacggttaaaa

SEQ ID NO: 163609 - DNA, 1479 bp, Cannabis sativa
atttctagtttaatttgactaaaaaggctaaaatttgaagatgttatgcatgtgtttaatttgaagaagtgatgataattcttgtttgatgttctttgataaaatcatgttggaattaggagtgtgtgtgtaatttgtttagatgaacatgaacttaaattttgggttttatttttaggttctttccttgctaattttatattatagtttttggtatattaggtaaagaatttcttaatggtctttgttgagttaagtatgaatttcttttggtttttcttttagaaatgatggcataagttgtgtgatttgtactccattagggtgtatatgctagcttgtgtttgtggaagtgaatatttacctagaaagccttattttgatgctatgaattgatctaattgagttatatgaattttttgtgttttagtatatgctgaaatgtggtaaaatggcattttttagatctttaagcacagtcgtcgcgaacaaattatggttgtcgtgactaggctcgaacccagaacagggatagcccctacccaacgtctagttgcggtgagccttaatatggttgcgacattaattggtcgcaactagatggcagcgacagttccattttgctattttgttttgggcataatttttgactccgaactctattttggacgttttatatatatcattggaaagctcattttgagctctattattttgtccaatgttagagtcctaaatgtaaagatttatgaaatatgatttgagattaaccttattatgtgaaaattcaaagatttgtgactagaaaaacagacacttggtcaagattgcctatggattagaatttatcctcatgtgttggaaatcatgtaagacaatgaattatgcacatagagtatagtgtgttggcacaattatatacaattaattagatgaaagcatgaattaggattttaccctaagttatatataatgtgtaagttagggttattaccctaaatatgtattggcaaaaatatacgataatgtattaagtgaataaatgctaaaggttatgcgattaaggcatggcttgtgaataactgataaaggttatattatatggatatttagattcaaatttgtgctaggattaataccctaaagtttatatatgagcatgtactaaatgaactatgtggatttatgtcaagagttatgtgtataagacatagttgggttaggcttgataaacaccatgaagatgaatacatgtgaaagcataatgtatgaattatgcatatatgataagagttgtgcaatcaaggtataactaggttagacttgataactaaaactgagataaaccctatgaaggccttatatgtgagcgttgttaggattttatgccctaaataaaactcaattttattgtaatcttatttactttcaataaagatcagaaatcatatcttaaccttgtcatatactttgttcaca

SEQ ID NO: 163610 - DNA, 2416 bp, Cannabis sativa
gcaaggcttttgattgagtggaatggttttttattcaagcagtcatgactaagatgggttttgattccaaatgggtaaatctggttatgaaatgtgtttcttcagcaactctcactttcaatattaatggggcaattaaaggttcggttgttcctaagcgaggccttcgccaaggagatcccatttcctcatacttgttccttatttgttctgaaggactttcggctttattgaagaatgaagaatctcttggtaatcttaaaggtttatccattgctagaggggctccttttgtttcgcatctcttatttgcggatgatagcttgctgttttgccaagcaactgatgcttcttgtcatgcgattcaacgtgttcttgattactaccatagagcttcaggtcaactcctcaacacagataagactgttatgtctttttcacccactgttacttctgtcaataaagatcaatttcatcatgttttgggtatgtcaatctgtgagctgcatgacaaatatctagggttaccttcatatgctgggaaggataaaaaggagttgtttagtggtataaaagatcgtatttggaagttaatgaatcaatggcatgcgaagcttttttctattggcggcagggaagtgcttttaaaagctgttgtgcaatccattcccacttatgctatgagttgttttagtctcccgaaaaaattctgtaatcaacttgaatcttgatggccaatttttggtggggatcaagtgctaataactctaagattcattggaagaaatggaaattcatgtgttcttcaaaagctgatggaggtatgggcttccggtcttttattcactttaatcaggctcttttagcaaaacaagcctggaggatttttgaaaacccttcttcgctcatagctagagttctcaaagcaagatacttcaagaatggtgagtttcttttggctgctaaaggtactttgccttctcttacttggcaaagtatctgtgatggtaaggaattattaaacaaggggctgcgttggaaaattggtttgggtaacatggttagatgtggttttgatccttagcttccgggaaatactacattcactccatacacttatagtggggatcctatgttcacagtatcccattatatttctgcagataggaaatgggacactaggatattgggaacccattttggtgctattgatattgaaagaattctatccatccctcttagtagccttcctcgagaggatatgctcatttggcatcactcagatacaggagtttatagcgtgaaatcgggccatcatcttgcagcaagtttggaaactttggattcacactcaccctcatcatcaaatcgtcaatggtggaatagattttggtccctccgttttcctaaaaaggttaaaatttttgcttggcgatttattaatgatgctctccctactgctgtgaatcttggtcatcgtaacatttcatcttctactgcttgtgctctttgcagatgtgcctgggattctgttggtcatactatttttagatgtcatcgggctaaggctgtgtggaacaagctcaattttcaagtgtctatggtgaatattggcaatcttaagggtcatgatattttttctcaccttgctgcagtgcataatgattaagatttggagaggattatttgccttatgtggtgcatatggtctgagcgtaacaaagaaactcaccgttcaaaagctaaaccggctgatgtgatatgctctttctcagcaacttacctagaacaatatcacaaagctaatgctcctggtacagctttaaaccaaccagataacagccctcataacagttctgatactcatccctttgctaatcgtatcaaggctaagtggcagcctcctggtgctggtttttacaagttaaatacggatgcaacttatgataatgagggcaaaattgtgggggttggtgcacttatccgagaccattctggttctgtcatagctggtttctcaaagcctcttcaaggatgttactcggcaaaagaaatggaggtcgtggcactatatcacagtctgcagtgggcacatgaccatcaaatccaccttcataatattgaaactgattccttattggtggctaatgctgtcaacaatatgtcctctactaaatgttttactcatttttatgatttagtggatgatattaattatcttttatccttctttcctcgagcaaaagtatctcatgttaaaagagatgctaatgaagaagctcatgctttagctaagtttgctcttcgattggatgaagatttttcttggttgggggaaattccctccccaatcttctctgttgttattaatgacttaccttattaataatagcagttttttctcaaaaaaaaaaaa

SEQ ID NO: 163611 - DNA, 3166 bp, Cannabis sativa
  modified_base (2873)..(2873): a, c, t, g, unknown or other
  modified_base (3035)..(3035): a, c, t, g, unknown or other
aaaaaaaaaaaaaaacctaacaaaagacaaaatttcttaaaaaagaaaattaggagaaaaggagtttaccaaagctaaaggaaaaaacaaaaggtctcacaaacaaagaaaaaaacatttcgtgctttcctaataaaaataatttctcatttcattaaaagtaaagttgtaattcttatttcggcattattagaacaaagacgagagagaggaaaattgttttatttattattgatctaaatgaaatggattatattattgaagcattaaatcgacaatgaaatgaaataacagaattaaaaaaaaaaaaagaataattgaaataacaaacataagttgaaataaagcctaactaaataaccggttttaacatgccccttcaagttggagtgtaaaattttcttacacccatcttcgatataatgtcgtggaatgggaggggttgagaggtttggtgaggacgtcagccaagttcgttttagaagaaacatgattcatcttgatgctgccattgtttattttttcccaaactatgtgacgatcgatttcaacatattttgttctctcgtggtagacaagattttcaacaatatgaattgctgctatgttgtcacaaaataggagagatggtgtcttattgttaacgtggaagtccttgatgatggtctggagctaagtgagttcacatgtggaatttgccatagccctctaatcagcttcagttgaggatcgtgaaaccgtgggctgtttcttagatttccatgagatgagggactgatcaaggaatacaaaatagcatgtgatcgatcttcttgtgtctgagcaagttccccaatcagcatcagcaaatgcttgtagttgagttggggaagagcaagctttgtaagagaatagacactgtgctggtgatgtttttcggtactatagaatgcgataggtagcaagaaggtgaggttgtcgaggagcttggagaaactggctgagtttgttgactgaaaaattatgttaggtcttgtaatggtgagatagattaatttgcaaattaagcttcgatattgagttgggttttgcagcaaattaccagtttcattatttaattttatgtttggtttcataggtgtggtgacaggtttggaaccaaggtgtcctgtatcttgaaggagctgcagtgtgaatggtctttgagttactgatgtacctttgttgcagtgagtaatttataggccaaggaataagtgtaagtctctgaggtctttaaggttgaagtgagcatcgagagtggagataaaagtagttaatgctgcagcattgttagtagcaatgatgatatcatcaacataaatgagtaaagaaataagcacctgtgattgttgtctagtaaacagggtatggtcgtttttggattggataaatccatgttgaagtaaagtggtgctaagtttagtatacaactgccttgaagcttattttaagccatacaagcttttgtttaatttgcaaacaacatttttaggtctcactccttttggggtgtaaccttggggtagtttcacataaacatcctcatgtaattctccatgaaggaaagcattgtttatgtcaatgtgatgtaggtgccaattgtttatggcagcaagggcaaaaagaagtttaagtgtattaaatttttccacaggggcataggtgtcatagtagtcaatacctagtttttgtatgtagcccttggctaccaatctggctttacatcttttgaccgagccatcgcaattatacttgattttgtatatccatttgttgtctatggcattctgtccatctggtaaagtaactactatccatgtgtggttttttttctaaggcatctatttcaacatccattgttgtgttccatactttctgtttgcaggcttgagcacgagaagtaaaaactgagatttttactgttgctagaacaacagctctaaacgtgggtgttaacctgctgtaagatagaaagttggtgagaggatgagctgtgctattggttgattaaacgaaatcacagttgtaatctaataaatgtacaagtttttgtattagtctaccagatttggaagccatgggaggctgttgttgttgacaaacatctgaagtattaggattagagatattggtgtctacaacagtagaagaaataggatcagtagtcgcataatattgaaaaaagttattagtgctagttgttgtattttctgcttgagtggaaaaatggtttcataaaaagaaacatctcttgaatgaaagatacgattgatttgcaagtctagtaaggtgtatgctttcatattttcaggatatcctatgaaaatgcaagcccatgctcgaggagcaagtttgtggtcagaggtgacataggatgcatatgccatacaaccaaaatttcttacgtgagtgtaatgtggttttttgagatgcagtaatttatatgatgtcttatctttgagagttacagatggtgtacgattaagtaaataaacatagtagtaaccatgtaactccaataagaaagagggagatcggattgtaatgctagagcttgagccacattgagaatatgttggcgcttgcgttcaacaactgcgttttgttgaggtctacctacacatgaattgtgatgtgtagttccattgatgttgtaaaagttagtgagtgtcaattatttggcattgtcacttctcacaactttgatattacttttgtattttgaatattgacaaaagtaaagaagtattgtacgatttttggggcattagacttggcccatagcaagtaaatctaggtgtatagtgaatggtcatcgacaatagttagtgttgtcgagcaaaattcgcaanaccaaatgtatgtaatattattaatgacaagaagaaaattacttgaagaacaattgcgagtattcaacctagaacggggagtactcgaactggggatatgaaatgcttaacaaaaaactggaaacaacaataagacaaaagattatagtggttcagtcagancacggtctgcttagtccactgtaagaagagttttcgtatgtctcatttcacggtggatcacccctttatatacaaagaaggtgtccaattagttatacaaagattgcattcattgtcaatccgtttacaca

SEQ ID NO: 163612 - DNA, 3781 bp, Cannabis sativa
  modified_base (3710)..(3733): a, c, t, g, unknown or other
ataatcacaactgatgtcgtttaccatttctctttccaaaatgcatctgtatgaaaagagctaaatttctttctcaacttgcaaaataaacaaacaaaaatttgaacaactggcacacctcttcgaaaggacctaccaagcaaaatataataaataaactaatatttaaaaaaaaaaaaactacaaaattagctttttcccagcactatataatagcttccttaattgatagctatgaaaaagcaaaatttccacaagcaaactgtgatttctcttgatatatacaaagacgtatatataagcatagacctagataattaattttaacaagtaagcttgttctttattagagtgcatatatttcttcctttttttccttcaatttttttataaaagagagaaataatgttaccagaagactgtgtttcgacgattttgtcattcacttctcctttagacgtgtgccgatcctctgcggtgtcgtccacgtttagttctgctgcagaatctgatgtggtttgggagagatttttaccctcggattatcaccaactgctcttaagattggtcaaaactactactaattctgatttttacacaaagaaagagctttactttcatctctgtaatcctcttctcctagatggaggcacaaaggtaataatatataaatagtaattataaacccacatgacatttccaattccttttaatttttttttttttgtaaggcaattccttaatatttaatttttcatcatgttccaattttattatcagagcttcaaaatagagaaatcatctggcaaaaagtcttatctactctctgcaagagagctactcataacatggggtgatgaaccaatgtattggagctggaaacatgtaaaagaatcaaggtttgttggtactatattttgaatttctctatataaatatatttgataaaaattctattaataatggataaggtgttttatttttgtttttttgttcagatttgctgaggtggttgagctcagaacaatctcgtggcttgagattcatgggaagattagaaccaaaatgctgtctagtaacacaacctactcagcttatctagtgatgaacatttccaaccgtgcgtatggactcgacacggcaccgtttgagatatctgttaatgtaggaaaccgacaagtgtcttatggcacagtttgtgtcagtggatatgacaagaataagatgcaagaaaaaatcatgaagcagacattgaaaacgacaccgtttgtggaggagaaaaagaacgtgattattagtgaaagaaacgacggttgggtggagattaaactaggagagttcttcacaggtgaaaatgatgatgaggaagtgaagatgagtctaactgagacaaagggttatcatttgaaagcagggctagttattgaaggtattgaagttaggcccaatattaagcattaacaaaagatattgttgttgattatttcttcttttgatattgattctttcattgtttttttattgtaatgtttcaaaatgagatgtaattaaataaatatatatacgtacctcgaagaagattttcttgaaataaataccatgttgtttgtttggttgcttgatcttatgttcaaattcaaggttcactttcattcaaatgttttagtactaagatatatgggtgatggataaagaaacgttgaattaattaattggaacagatattcctcttaatttcttcacattatttccatttttagaagagtttttcatcaattatatatgtgctcattttttcactttatggcgtcattcataccagacattggaaaagttcatcatatcgtagcgcggtgggtgggtgggtgggaaaatcaaccatattgctattacattaggatttactagggtactgctaattttttggctgtacgtatatccaactttttagtttgacatttggcagtggaacattatgcacacggggaagaggaggttggctaagcattaggtgcacatcgggtgggttttccatgttatccagttttcgggtttaggtttttcgagttcggattttgaaatcttgggacagaacctacatgtatgaagaccgggttttcgagtttcgagtcctggtgggttaggttcaggtgggttgggtcgggttttgagttaggctagactttttttttaagaaaaagaaaacaatttgttaccaagaaattagaattgagtgtattttttaaagagttttttatggctaaatcttcccaagtgttctgttacttacatttaaccctccaagaattttagcggtaaaaccctccaaaatactgaactagtagtaaatttaaggtgtcattcagttaactgtcattatgagctgtttatgtgtacactcttgtacacatgatacgtttatattggtgcaactaatattattatttaaaaattatttccaaaatttattttaaaattagataaaattataaaaaaataaaaataaaatatttaccaaaataaaaaatattataaattttgaaatattttttatatttttaaaataataatattaggtgtatcaatataaatttgacacatgtaaaaaagtatacctataagcagtctatattgacagttaactgtaaaaaatgggtgacaccttaaatttgcaagcagttcaatagagggtttttccatctaaatttgagcttagagaattaagtgcaagtgaagtgatagttgagagagtttagccgcaaaaaactattttttaaatttaacatgtttgttcaatggtatatttatacatcatataattagagacaattaacagattttgtttggtaaatttgatacgaaagtatacgtaatcaagataaataatataatgataaataaagtatcgtttcctcgagcattgattatcaattacaaatcaattaattattttattttatttgatgaattgtttgataaaagctaaatgaaacaaaacaaaataatattaaaatttaaagaaaaataacaatgataaagacaagaattattatgatctccaatcatcctttattttatttcataatgtaattactctatttttgttcttcttattcaattaataagttgagttaagaagtttataatctggttaagacttataaacataagtgaaaacttcttctatttctatggtaagtttaataacaaatattgcattaagcataacaactaataaaatcatacaaacaacctaagtactttcatcttaaatcaatttgcatccatatcaactagagcatattcaaatctcaacttttagaattttgatttgaattcatatataacaattaaagttgaccagtcaataattgcaaaattagaacatattgtatggaattaaataaagagaagaagaaaaaaaattgtataatcacattaatttataaaataaactcaaatggttaacgtaataattcttaaaagaacttagctactaaaagacaatctaaaataaaagaaatttaactaaagacataaaagatagagataaaggagaaagaacattgtttggagtcctccaccggtgccttctgctccttgctctccttccacacttagaattcctctcaattttcgaatgctgctcatcacaggggcggagctactccttagattggagtggccatggtgttggaatttattttacnnnnnnnnnnnnnnnnnnnnnnnntatgttgtttaaacaccctaaataagaactttctaaaacgataaatta

SEQ ID NO: 163613 - DNA, 3981 bp, Cannabis sativa
ttttcctatccaaagacagaaaaccctaaacaaataattttgcactctctttctagtttttttatgtgttaattacaaccttctcttataatctcttaattaatgtttacatttgaaatcacatggcgtaatattttttttcataacgatattcgttatagttacagtatcattcctgtaaatatttgaaattttttgaatagtttacaatgtcaaaaataaagttcttaatattctagtttatgacacgcgttcaaaaaatttcaaacgtattttcaacacagtaaattatgagattttttttttaaaaatctccaagaataatataagtataacaaatactattatgaaaaaaaattcgacatgtatttttcgaacacgaaaattaactaaaaaattataataaaagtttaataacactcctctttctatatatacacatgttactttagccaagtcttaaaattggatatatttttcttttggacatattgctaaaatgtagtgaatgaagaggagggaaaaaaaaaagtagcaacctagccttgcatattttaaataatgctttttattatgacttgtgctagacctactcacctacattagttaagttatgtaatttttaccaatatatataaaagtctttcaaaaaaagaaaaataaaagaaagagtagagaaggaagtaaggagagaaagacattattgggttttttttatttatttatttatatatggttttggttgaaatttgatggagcactcaaactcaaccgataaaaggcaaaaaggcaaaaggtgggagtgattttgaatttgggagacaaaatctttgattttgtgaagattgtctatgtggtggtcttttttctttctttctttcttttatttattttttgaaatttaataataaacttaagatttttaaaatttcaaaatttctttttcctctttttgtttctctactttaaggttggtagagtacagatggtatagtagatgcatgctagtagtgatgatgatttcatgagagagaaagagaaatgtgttttcaaagggaaacagcttgccaccaaagaccaaaatccatatatgaagagtgagtttggtccccacaccaataattgtagaataatattatgggctttacttaagtttgcccaacttaaaaaaatttaaaaataaactttcttttttgacttagtctctttctctttctctttctctctctctctctaaaaatctcccattctttttcttttctcatagtagaagctgttcatcattaaataaaatcacatgactatttcaattttggaccaaaatacccttttcagtaaaaatttcttattcttcttcttcttctcttggttacttacagctgtattaattcaaaggaaagaaaggaccatacgagcttgtgggtcccttttctctcaaagagattttctttgtagaagttgaaaattacttcccatgcagtgacgagtgactcttcactctagtgctactgaaacacatgaaactcagctttattttctaccatttagctcgtaaaagtaaatagtaaaaaaaaagttattgttcttcataggcaatttacgaagcatcgtgacatgggttgatgtacaacagataaagaaaaaaaaagagagagaaaataagctttgttttttgttcttgaaattgtattttaaaaaatgaaaaaataaaaaaaatagtttttaaaatttccaaaatacaagtcacgttttattgatgttttctaaaaataatttttatttttatatgtattttttaaaagcacttcaatacttttagactcttatatgaataagactcgacctgactcggacttatatccgaacttagacttggatcccaaatcttggccttggacccagatctggatcccgacaacgaacccaaaccccgaatctagacccttacctgaccgcataccctagttttgtatccaaatcaaggctcaaagcccgatgttggacctataactttggactcaaatcctagcgctgtaccctgaaccctggccttggccctagaccccaaacccaaaccctagccctagacttggactcgtactctggccccgaccttagacgcggacccctaaccccgaccttgaagagagagaaagtggtgagagataaaataaagagagaaagtgatgacaaagaaaataacgtaaagatagtgtgagaaaataataagagaaaaaattatgtgtgaaaataatgagagaaaataatgagagaaagtgatgtgatagaaaataataagaaaaataatgtgagataatgtggagaaaaataaaaacaataaaaaaattcttgtttttttttttttttttgctttttttaaaaaaaatagcaaaccgctcctaaatgttgataagaaccttttaggctctaaaattgttaattttttttttcataattagaggatgttattttttttttttttggtaattttagtgtttttttatcttttttaaattattcgagttttggaagaaaattgatttttatgagtaaaaattaatagatttagtatttttaaggctaggtgatgttagcggatgaaatgacgcgccaaaataacattttcttagagtttcataagtccatgaagagtcaaaaacccgtggagtgtcgttgcaacgaaggttgaaggttcgccgcagcaagcaaaaagaaaaaaaaaatgggttgttgtcgtggccacaagaaggcttcgtcgcgttaaggactctgttgccgaagcgaagggtcctgctcatcgcggcgaggaggcgaggaaaaattcgaattttatcttttttttagtgagatattttcaagcattataaataagacttctaaagtacgaattttagaattttttagctacgaaattgagagagaaactcaaagagagagcaaggaaaagacggagattgcgactttgagtgttcttcattatagtttttttttttctccttaaactcttactattaattatggttttcattataatatctagttccgggtaatttctttttagttaagagttatttcaaaacttaagacatgaatttttaatttctatgatgaatgttaatttctagtttctattatatcaaactgtttctatttttctatgtttaatgtcatgattattattttaatcttgtttatatgatcactaaactaagttttactttaacctattactattttaggattactattcacctaatagtcaaaaatgtgtcagcaattctccaaaagaatatcttcctccaaagtataacgatcttagaacttttattattctttgctctatcgacaatacaaggattaagcggtgtatgttagatttgggggcctccattaatgttatgcctttttatgtactcattctcgagctcccatgatctcgttttgataatttcaaggtttttgaacttaaggacgatgtctcattctgtgtttttgactattttggattcattgattgaatcagattttgggatttgagtaattgatggcaacatcccaagttgattatcaacctaggcgcttggccctatttctaggggctcagatttgtagttttctccccaagttggcttgaatcttaattattcacgatgacagaaaatatactccaaatactttttggtgaacttgattagaaacaacctaggttgataatatgtcaacctgggtgctgggtcccaattctggctatgggctttactcaagtggaaggaattgactacactgaaatcttctcacctgtaaattacaatatatatggtactaggggtgtgcataaatcgatccaatccaataacaactgaccgatccaatcaaaaccgaccgccaaacattggatattcaattgtgatcggatcggattggatgttatttttgaatatccaattggatcggatcggatgttggatggagtgtctaaaa

SEQ ID NO: 163614 - DNA, 931 bp, Cannabis sativa
tttttttttttttttatttgtttggattcgcattctgtattgaattttgtgaaactatgaaacaaagaaaggggttacgattgggttaacaatttttttttctttttttctgaaagactcttcaaaatgttgtttgagaaatatagttcagattattgaataaaattagtagtgaaaaatcaagacaaaaaccacacaaactcattcgcggaataatagaaaaaaagaattttacttatacggaatatataaggtccggatttagtcctgttataacaaaacacggattgttaccatagttgtacagtcctgtattgaagtattgcattaatcaaagggttaaggttaagtttggtgagatttgtaaagtataagggtattatgtaggctaaaaaattataatccgttggatttttacaatatatgccaagtcgttaggataattttttaaatcacaagctatactttgtgataaaattttggtaattggctataaattgctttggtgtaatgaaatctgtaaaatatatatataaatcttgtgttttgtcacacaatgtttatgggtgagtaatttgtgtgatttatattaaatctagtaactactaaaccataatctcatatataatttttataaagaatattagcgagaatactactaaaaatttatcgtttgctacacttaattctacaaattaaaattttgagagtgcaaccctttaaactctagtttcttttgctttttactattatgttagtgaacatatattaaatcagtattctttatatgcaccttaacatacacatgccatgtttttattagtatacattcttataattacttaaagggaaaaaaacagaaaaatattaaaaaagggaaaaaaaattacaaaaatactttgagccggcccattaaacatttatacagtcc

SEQ ID NO: 163615 - DNA, 1210 bp, Cannabis sativa
tttgggttttctccccccccccccccccaaaaaaaaaaggatagttaataatcattaaaaaagtgcaatcatcacgcctattggtatacgacaacacacaataactgttagtgcgccaattgaggtctaagtctcaaggttgcatttaatgtcccagatactgaagagacaatcgaatcttcattcaatcacgccagatcaagagttgaacgaagaccagacacgtgtcacccatccgaccagctcagtggccaaataagtctacatgcgagtaggaagttccccatgcagacttgggggaaaatgttatcccactgtacaaggtgacgtggcatacacctgggtgacacatggaaaagacgcggtgacctggacgaatagttcatcctgggatatgtcttccatggtaatttaccacttgaaactaatcaatctatagaaggagtcaagaatgtccggacagagtatgtaacaccatttgatcaacatctagtgtgtaattaattcgcacgcactgaccatagattgtgagttaaatatctttagggatatacctcatgaatccacaagcttggaaatcatgatcatatccctaatttcatggcatagatttgcattgacaaaaatataagaggaaagccacctagtttcctattttgctttatttgtttaagtaaatagattttctattttaattcttattagttttgggaaaccaatttgatgtaatttttctttataaaagtggagtcatttgactatttagggacacaagaaaaatgagagggagaaaagaatcatagatttaagagagatcaaaaacttcttgtttctcttctcacaagttaatacaagtaaaaagagaggggactattaccaccatcacgaaactgaacctctataaaaactttgatatttctcttctctttatctttatcattattgttattaattatttttaatcgttttaatttaactcattatagttcactaaaaacactgtcaacaaaatatatattattattatatataagaaaaatatgatttaaaataaaattaaacatttcttttttaatacaaattttttcttcatttgaatttatcatttgttattttatttatttaaatatattattggagacatataataacaataatttattttattttattattaattatacataaaaaaaagggaaaaaaacaaaaa

SEQ ID NO: 163616 - DNA, 1438 bp, Cannabis sativa
tctaaaagaatggcattgtgttttaattacgtatatacatatatttactccttttgagagtgactgccttataatgccatagtattgtaattttgtcaaataaatttatctcattattttattcttattagtgagaggaatagtttagttttaattatgatgatccacctgtctcataattgcttttgaggctcagaagattattgattaatataagttatgaattcctctttccaaaaatgaaaaacaaaataatatacttataaaccactttaacaatttctcatttatattattcaaaataaatggttaaaattatttattctttattttacactaggtataatgcaaccgaggggcattgtataataaaagataaaatagattaatatttaattatttaagttcttaatattaatactgtaagaaaatcataaaataaatagttttaataagtttattaataaatgagtgtcataatataaaattataaatcatgaaatggtgttatttttttttaattatgtatttatttgttgaatatatataataccacacttactaatttgttagaattttaatgtctcactttttcaataactttgaacatttttaatatattaccaaacataacatatataaacatctaaatatgaaataaaaataaaatgatgatgttagaatttaaatatgaataactcaaagtatgattgatattgtgttttgttttcaaaataatatttcaaaaaatgaatctattttttttttaagttttcaaaacacaaaacgtatttggttgatgttttctaaaattaatttttagattttatttatttaatttttttttttaaaaaaaaatacttcaatactttgagagctcgataggaactaaaactcaacctgaccccaactagtgactttaatttggccacgacctcaaggctgaccctgacccctacccctactcggaacccaaccctaactctagactcgaaccctaaaactggcctcagaccttagacctcaaccaagatcaaggttttgattcagacccggactccgatccagagtctagacccagacacaaaactggacttggacatggactccaaacccagacataaatccaaacctgacctcagatcctggacctcgaccttgacctgaaaaaatgatatgaaagatactaagtgaggagagtaaaaagagaaagtgaggagagaaaaaaataatgtaagataaagtaaaaaataatattgatgagaaattaattattttttaaaataaaaattcttattttttataactttgttttttgaaaattattctcaaaaacatggtcaaatgttgactagttgttctaaaaaataattctatacttttaaaaagggtaaatattattttagaccctgtcttttgtaaaagttactaattggac

SEQ ID NO: 163617 - DNA, 623 bp, Cannabis sativa
ttttttttttttttgaattattatctttttcttttaattaggttaactagatgttttttttgttaggagatttgtttttaaagtttacgttcattatcttttgtattattattatttaaagattatctaaattttttaatacgtaacttatgttatattaaaaagataattttcaatcaaaaaaattatataattacatttgtattataaatgtttaaatataaattaaaaataatcctagtagaattagtattctctttttttttttataaatatacaagattacataattaaattctataaattctcattttcatcaagcaagctttatactgcaaaacaatcatacaatcgtgagttcattaaattcatgtgctgcatactacttttattagcattcttataattttttccttcatctcactttgtaatggtagacctactactactacttacgtagtccaagattttaatcccaataataacaaatctatcatcaattatagttatgatagttgtagaggtaaaaatttgcttaatatttgtgatatttttgagaagtctaatatgcaagttagacgagcccataaataatggatccaacaatattgggcccaataaga

SEQ ID NO: 163618 - DNA, 1435 bp, Cannabis sativa
gagtcctttctgggtatcgacatagcaattgctttagttttctgttccccaactatttagagttaggtgggaaatgggggatcccagtttttatttttgatagaaaaggtaaccatgataacttttgaaaatgatgaaattgaaaactcaatcatcttatttcatgtgcagctcatagaatcgagagtttctactctccagtcagctgttaaagtgtcaagcgtcttggacgttctttattccggggtaagtgtgatcgataaagtatgtaatggcttcacttagaaagcttttagttttataactcattggagctttttcctgaacaggttctagacgaggaacaagatgaaggtgaaatgaacgtgccatttatttacgaggacagagatgaaagcgaagaggagtctgaagacgccatggaaaccgacgatgacgacaacagtgacaacgcgaacagcgacaatgacgaggaggctcttgaaggagcgtttggtgatcttagtgatcttgaaggcatgagcgagtagctgaagctttgagtttcttttcaatgtatttgtaggaacccctttaatatactaaaattaattaaaattttgcctatctgagcttgaatattcctataattgaatgaaaattttgccccatgtgtttcaacttccatgttcaattgtgaaatttttgtatatatattcatcatttacatgttaaagagttgtttcataaattgcctattatataaatttacttctcgtctttttcaaaagtatcgtttaattttttaaactcactatatgtttcacgctcgaaatctccacgtagtagaggattagaatttggattgttggattaatttgatagaataatgtgtgaatatattagtttattagcttgagtcaaaataaaaaagaaaaattagtgaaatagttaatcatatcatacatgtaaagtctccaggaatcaaagacccctcgcttctcactcgcatctcttcatcaaaaatagccttaatacatggaaggtcaaattatcatagaaagaaaaggatttaggctaagaactcaaggatcttccataattcgaagtagggctatacaacaaaatttgtaaaccacccaaatcgaaaaatctgcccaaactaaattgaaaaaaccgataaaaattacaacccgaaataactcgaaaaaatgttaattggatgggttgaaaataaatctaacccgcctaataaaaccgaccaactcgattttagattttaattttctttttcaaacttttttagtttttattatatataaaataaataattaaataattaaatgtataataatataaaattaaatactttattgtattgtacttggtggaggtgatataaaaaaatttggctcatttggacaggttaatccatacagatttttttttttttttt

SEQ ID NO: 163619 - DNA, 1256 bp, Cannabis sativa
  modified_base (1215)..(1231): a, c, t, g, unknown or other
tttttttttttttataaaatgtatgttttgttgtttttctagtttgagtagtttgtttttattcattattccattttatttttatttatatttgagacatctatttttgtaatttttttagtgaattttttagttacaatgattttcttggtgactttttcggtgacgatgatttttttggagactttttcggtaacaataatttttctagtgattttttcagcaccgaagacttttccagggctagtgacttttccgacaaaatttaatttccactttttataaaaatatggcataaaaaagcccatataaatataaaaatatatatatatataaccccgtggtattatttatttatgccataaaaaagtaaactcttatcattttttcatatattgtataatttctacttttttataatatttattaaagtaaaataagtaagacctaatattaatgttgaaatttcaaaaaaaaaaaaagcttaaaaaaaattaaagaatcgtgttaaaaacacactacaatagatgcttctttcttcattttaaagttttcttaaaatttactatttatgtcttaatcggattagtcgcgtaaattcagtttaattaggcaggttgactttattttcaatgtggtcaatatatagattggacaggttatatgccccctcaacttaaatcttgatctgtcactaggtattttttttttataatgattgtatatagtttgcaaattgatatatacatgtttttctttttgaattagtccgaacaagatctctttcaccacacattcgtgtggtgtagtagtagggattgtttttagtgatgttttttttgtttgggtcaagagttcgaaatccaccccaatccctcatgagtgagattaaagaactacttgatctttgttggaggtggtgccatctgagtgataggaacacttaaagtgactatcaataacccaattaaagtaagctgatgtataaaacccttataattgacacgtgatccccaaattatgagaatgactaaaaggatagagaataaatttgtaccacataatccccttctttttagattaataaaaaagaaagaacgggacctcttccttatattatgtatgttcatgggtaatacaaactaaggattatttcacaaatacaaaaaaaaaaattataaaaatacggtttcatggaattttaaatatttttannnnnnnnnnnnnnnnntttacagaaaatacggtcttttatg

SEQ ID NO: 163620 - DNA, 1767 bp, Cannabis sativa
  modified_base (1716)..(1726): a, c, t, g, unknown or other
tttccaatatgggggattagaaattgaagtggttctacgcgtttaagatgcaaggggtcaggattgactttaattgctgacctcgtacgtcacatatttttatacttagcatttatttttattgcttttatagactctaatttctattttctttttgcagatagacgagcttgatctgtattgaacccaactcgtctagaaatcactgaagttttaagtggccttcccgtgcaagatcatgactggcgtctgctgtgtaccatcgcaaagttgcgagaacacacgcttatcccaaaggacgctaaacttcagcgataaccagtgtataaggagccttttgagaagtaaaaggaaagaatagataagcgtctatctgaacagacttcaagaccgacattaaataatgtaatctagtgtgttgaatacttgttttacctttttaaattttaacttgtggttcttctcgtagatatgactttcttgaagcaatctcctgttttcaactgcaaacgtaaggttagtcctgcgacgccaacgcctgtgattccccagaagaggaagagtgacaccgttcctatgcaggcagctgattcatcaaagaagtagcacaagtcactcaggacaagggaaagaaagtggtgatcgatcccgctgtcaaggctcgcgacttccttggctcttcaggataagttcgtgagcgatgagtccgtttccaaagtggaggggattcctaccgaggatttgctgcctcattctgccgaacttgccctgaaattcatgacagtgttttcacatgcctttgttgcaggttctaaggatctcaatcttctaaagaaacataactcagttcttcaagagagtctgaagaaagtgaaattagaagaggttgctaataaggagatcgaagatcttggaaaagacaagggtcaggtggatgaaaatgtcataactctagaggcacgagtcgctgaacttacccgtgatcttgagactgaaaaagagatcaggaagaaacataccaccctgaccaagatgcctgattttgatttcgcagtgttcggagtggaggcggttgaaatgatcgatgcatttcgcatcatgtcacctatggagactcaaggattaggtagaaatgttttccatgacgatgccgaaaatgcgaatattgctgaagttccagagggtacaagcatagtcatggacgatcccagcactcctatcgcttagtctttttcttttattttattgaacttccttttgagcgatacatgggtactcgcattttgtatttcaaacagcttattttactatgttattcgaacaatatatcttgtcgaggatacttcttttgttatgtatttctttatcactaaattgacgtgcatttttagttaaagctgattttatccttgcataattctttgtcgatctgttcacaacttggtgtgatgaatgtttctaagtataaatatgcgaaaatactatcactttaaaatttttagaaattccaaaatttgagatttcattaaataatcaatagtacaatatcgatggttatgcctctatacttagtacatttatgaagtaaattaactaagtatatatatacatgcgagtactattgataataataatttaaactttctccattccaagcttgatgaagaattgagccgtcgagattagataatcggtaagtgttgggttttatgcccnnnnnnnnnnncatttcatataatcagatttactcattaataaagatcagaa

SEQ ID NO: 163621 - DNA, 831 bp, Cannabis sativa
tttttttttttttttgataagggaaaaaaaatacttttgccgacacattttagaatggcgctagctagtgtaggacgttttttttcagatgctacttatatttgccgacatattttttgttgacgaaaaatactcgtaccgacactgttctcaaacaacatactaataacattactcaaattcatattcaattgcttttttgatcagtgcatttataaatcgggaaaaatacactatgttggcgcggatactaaatgcgccaacaaaaatatattttttttttctctttcttggtgcatatgagcatttttgccaaaacaaaaaaaaatatatatttgtaaaagatcagtttcatgtaatatatttatatataacaatggaactcaaatgaacttttcatgatgattttgtgtgaaatatagtttattcctgtggtacccatataaattttcatatatgatcattatttgaatttataggtctagcatgaaaatgacatttctcttctaaattaatatcttaaatataatacaaattttttataagaaaaactttttcaaaaaatgttaatataattagtggtctcacccaattaaattaagtcaaagtctatattaaactaattccaagattaatatatatttttaatgttcatatatgcatgctgatgtacaagatgatgaaataaccatttagtaaacgaaacgaactaaagtaatgaattatttagcccatatatgcttgtaaggtgaaaattgggttaatttcacaaatgcacacaaacaacaaaaaataacaaaaatacagttttatggaattttaaacattttt

SEQ ID NO: 163622 - DNA, 1059 bp, Cannabis sativa
tgaaaagagggggaaccccccccccctcttatgttgtcctcatgtactaactctgttacaaatatatcatttctaccttctgccaaatttccaacaccaggaacagcagtttcttcgacattaagggcctgaaaagcattgtgaatctcggttacagcagccacttcttgaggtttctccttactgcttgttgtcttcccttttgagaccttagtaaaaccatcagcatcagtttccatggtctttctactatcttttttgaccacccattgctgctttgcagggccatcttttttacaatcagttgcagcgtgtccaatgccaaaacagtgcgaacaactgatcgatttctattcatacttgacaccaaccgaagtggtgtagccaaattcattttcaaattcaatcaaatccgggagttgctgatccatgaaaacctccactaaaactctaggataggtcagcctttctctttcctttgtgacagagtcctcaattagaggcttccctatttgccccacaatcttaaagagagacctttggccccaatatttcagctctaactccttaagttgtacccaaattggaacacatttcacatcctcttttttaaaattgacattaggatcccaaggtttcataatgacaggtctacggttaaagaaaatatatcccccattgagaacttgatctctgaactccaaggaatgaaacctgatgagaaatattccataggttaacaatttaactcgatcaaccttgtcttgccatattctttttgcaaagccctcaagaacgtgcaatggaggattaactccaagaacatagcacacaattgagggcttccaaaataacacctcctcttcaatatcatctaaagttatcttcactttgccattaccctactctgaatccctaaaggaactctccagatttctcatcacagaatttgatcgcaagataggaggaagtgatatttaattaaatagaaaattaatatttgagttgattttcatcatgatacttaaatatttgaagttttcttaatatttaattaaa

SEQ ID NO: 163623 - DNA, 989 bp, Cannabis sativa
tcaagctagacctccaatatgtcagtatacattatattcatcttttggaagaagtatccgattacaaaccttctttcccctgtaacaaagcatttcaaaatattcgggttcgggtgtcacttgagtggccgctcgggcgggtactctagcgggtaacgaatactccttttgtactactaggtttcgatcaggtgtcaccgacacgatacaattatgatgtttttattaatatgtattacaaactaaatgtaaaactaaaccctagctaactaaatcaattactttgtattatgtgtttacactttttatgtgattcggtaaaaatgtaattgaaaaaaatatagtatataaaaatctctatataatttcggatacacatattttttgtaataattaatttttctttggaaataaatacttaacagaatggatacaattattataaatcttctaatgttagatgaagctaattattccatcctcacatggtatgagattgataaaattaatacacaacatatatagtatttaacactaaaatattaattgagtactgtagatacatatggttatactatttattcacaaaataataatatggtatatatatgacacacatatatatggcaattatccacattaatatgaaagagttggtgttcatatataacaataaataaaactaaaacttgaggcaaaatattcataactgaattgaatgaaattaataactcaattaagctcaccaaaataattaaatggaaattaattataatttgataactcataatgctcatcaatatgatcgatgtgcgagaccatctacagttcaatatatatatagtactgtatgcatgaacaaaagactactaatttcgaacgtaataatatgaagtgagacatcgattgagagtgaggccaccttattaattgaaaaaaagatcaaaattaacaaccgaaatatatatcaagaaaagattaatggagag

SEQ ID NO: 163624 - DNA, 1260 bp, Cannabis sativa
acttttgggataataattaacagtcgtgtttacgggttatttgaggccgttgggtttttgaagaggttggtttgttctaacgtggcaagaatgagtggctgagtaacttccccatactttatcatgtgaagatatgggaatagcatactatggtctctaaacacatcataactaaaataaaaatttgtggcataaatatctattttattaagtttattgctactaaatacccaaaatctaaaaattgtggtaaaagtactcaaaacctcatttagtgttatttccgttagtactcattttgatagttctgtttagtactcaagaatgccacgtgaattctcaattggtcaaattcacaaattataaaaattattaaaataaaatataaataattattttttaaggaaataaaataaaatatttattttgtttcttctttccctctccccagtctcttctctttcccttccctctttcccaatatctgaccagcccccctaatatcagttggtggactcttggagttgcatagagaaaacataaagtttagtaatggcagaagtctgaccaggtaagcactttgagttcgtcaaataaaaaagattcactgtcctcctctccggcggtctagacacgacccccacccaccatgactcttttgctctgggctagccgacggtgatgcctccctcctttatatgtgttttgatgtctccacctttggtggtccatagtttagtggtggtggactcgatcacatcttattctcagttcaacaattgtaaagactttaacttcgatcactaacccaatagaaaatattaaatccaacagtgttggagcttccttcttcttgctctaatcttcgattgagcttcctttcagcccagtctcataaattcggagcagatctcgaacaccatgtgaacagtgccgatctgaggcgatcggcggttgactctccatggatgctgattgaggtgattgagggagtagagcgagagggaaaggcttgggcagggggatttaggggtgaggaaagttggtagtggcctctgtttgggtcgtcgatggccagagagagcgcattaggtgggctagtcagatattgggaaagagggaaaggaaaggaaagagaagagactgaggagagagaaagaagaaaaaaaaatattttattttatttccttaaagaacaattatttatattttattttaataatttttataatttgtgaatttgaccaattgagaattcac

SEQ ID NO: 163625 - DNA, 1883 bp, Cannabis sativa
atatttaccaagctggtatcaatgcaagcaatgcacaactaatccttaaatgcaaccaaaataatacactagggtagggaatggtagaagttcaactttcaatcaatcacattagaaaaacttagagaacatatcccattataaagacttagtttatgtaaatcaaacagctgatactaattcataaactaatgggcacttacctagtgacatactcacaccaaaaaccttgaattactttaaagaaatactaccattatagtaatcaattcctacgcctatcacaatcacatttacagttttcagcacaactgaccgtgcactgtggttggcaccaaaactaacacataaacaaattcgctcatgcaaatcaaagctgagtttaggaccattttccatcaactcattccaaacttaaggtacggaaattatatttaattagcatccacaggaggacacacttaacagccattaaaatctgctaatacttaactaatctatccggctatcaaaatgtacctaaaaatgggactataaacagcatgacataagaaatatcacaacattatcatctactctagcaaatggccaatgagaaagttgagcataaaaatcccacaagtccatgtagcgcagttcctaaaactatcaacaagaggaaacatttcaaatggtagcagctaaaagaagacccaatttcgtcaaacctgccacaagcaatacaatgaagacggctgagctttccattctccaagtagttcttcctctggttagcattttcgttaatcaccttggcaaatcgaagaaacgacttcttcagctcactctggtcaacttcaagatgcttatgcgtcccttgattaccaccactaccagaaccttgcctgaaacctaaattattatcatgaccccgaacatccctcgtatgtttgttagaattcgaatcttcgccattgttgtcggcagatttgttgccgcgatggctaggacccgccgaaaaaccattggaattcccatacggcatgtactgctgctgatgctgccttcgtttagcgaaatcatccataagatccttctctttctctttatccttatcttcctcttccgagtatttcctcttcagtgacccttcaccgggtccaccgcgcccatcaagcccaagcgaattccagtaatcttggttccggttataccctcctccaccgggacttatctgtccgccgtgtgggaaacgccggtccatccctcccatttcataacccggacccggtggaccgaacctccccatagggaactcttgataatcgggagggagagcgaagtaggaccgtacactcccatcagcaagagcgatcgagcgtcgttcaagcatgtgaaaaccgtatgccggcggcggaggtgggccaagcgcggcggggtcggggaacgggaattgatgagatccaggagaagggaccgcaggagggttgccgggacgggacggaggcgtgtccttcgttgtgggcttaggttgggccgcggtaggagttgggccgggcttgggagacgagtcgattttaggttttgggggtttggaatcggtggctggagatttggtggcggtcgtcgttttgggtttggcattggaattgttgttggtatttgaaggaggaggatcccatcgggacttgcggtggttggcggaggatgcggttgaagcaatagatggcttgtgggaggagcccttgccgtggtttcctccggccatcgttcgtaacaaatttcactgctagggttttcaattatatattttacttacaaatctatataagggaattgaggtagcatctcatcaattttttctcatttttggtggttttttcatttttaagcaggtttttttt

SEQ ID NO: 163626 - DNA, 3218 bp, Cannabis sativa
aaaagcaagatccaaattaacagtacttatcttatcaattaagggagttgtttaaatttaaatcatcatcccagcatagctagaccccaattggcaaacaaattaaaaatgcctaattcacactttctaaagatcttgttagcacccatattaattaattataattatacatataataacacagtcatcaattcgtaaacgacaacacttgcggctgctagtggatcggcgttgagaaaacggcgtcgtattgatacagtcatcaattccgtaaaggacaatacttgcggtgctccatggccgcgcggcgttgagaaaaacgacgtcgtattgataattctttgtcgtttaagctagcctattcctctggctctggcctgagactgcctcaccatagtgacgtagtccccgacggcgattgcaccaaacggattgatctcggcgttaccatttctttcactaaaagctgcacggagccttcccacgacgccgtcgaggttgccccaaaattccttattcgggcaggggcaggtctccggtggatgaagctgcccgtagaattgacaggtgtcatcatgaattttggtctcgccgaactgatcgaggtaacggaggaatttcagcacgtgggatacacggcattgggagatcgtgatcggtggatcgttatggttcctcaagtactgcccgaaattatcccagtccctttctttcagcaaatcgtattggagtctccggcgtcgctgttggtggtggtagttgctttgtgaaacgaagctatttgagctactatatgcggtggtgcttttagtgttgcctcggctactgttactgtttgagctacgattccggcttactacggcggcggcagcggctgctacggcggcagacatggctgatttggcaagtgaaagagaggaaaagaaagagagaagaagaagatgagagctaggtgtcgagctgtgaagagatattaaagcaaaatggaggagagagacaaaggagggacccatgtaagaaaaagccaggtctcaaacgtcacgtcttctttatatcatcattaatctctttatttattttttaatattatagaaaagacaatgacctaaattcgccacttattatttaataattataattattagtggttgtgataaaaaagaaaaaaacactagttaaatccattaaattattggtgaatgtgattgattatgatgagcaacgaatgggatatatctatgttattttgttttgatatgtagaatagacaaactgtaaaaatatatttaatatgtgtgtgtgtgatatcgaactgtaaaagaaaacctaacctaaaattagtggatctcagcttggatgagcttgcaaatagggaaagcttttacgcgtagaaatctcaacatttttgttttcgtagtagacaagaaaatgaactaaaaagcacgacacaggtttggaagttttgacaaaggacggaaggtacacacacaacatatattgaataataaacaaattaatatataaaaaattacaactatctttaattgtttatttcttttttatgagtctttatttcaacatttttataagtctttgatttttattatgtcttcaaaacatttaataatcacaatgtctttacaaaataaattagtattcacttgtgtttttaaagagattgccccatgtaacttcaatacatgctccgactaccactcctgaagagtattggagtttccctttcccaagatatatatagcactctatttatagaatgagtcgatttttgttttagaaatttaattacataaataacttagaatataaattaacaaaaggtttagattataattaattaattaaaagtttttaaataatataaactttatttattaaataattatgttttattgttagcctttttgttattaattacatataaagttttttccaaaaagtttatattataattaaactagtaaacaacggatatataaaatattttaaattatatataaaaataaaaaatttttacaccaaaaatataaaataccaactttattacatatataccacaacacggttaaagtaacatttttacatttactctttactttattacacatataccacatgcacagttccccaatgcatcagacatgtgcaactcccctatcactcatcaatcaacaattaatcactttcctttcttctttttttttttcttttgatttatcatttttttttcagtttttttttttaaaaaaataactagtaacctccattgctaaattccatatccacgatctcacatctatttttcctctcatttttgttcttcaaaattttttcaactcccactaacccaatcccataaccgttttccctctttctttttgtttcgcaatccgtatataaacatggctgtgacccgttcttcatcatctccttcccctattcaaaagaaaagctctaaaataggtttgaaatcattagctaataaggccaagggtaaacgacctattattgaggaggatgttacgagaattgattagttattactttgtgttcatcatctgttttactgcactctaatgactggtttattaattgtaaaaggttgtacggattctgttatatatgtttcctttggctccaacactagggccacatgtcactctgtaatttgcccttgtattctctttttcagaatataaatagaaaatgttggacttcagcctctttgagctgagaattgttttcaatcctctttcgtgtatataatttaacttggtatcagagcacaatcggcccgtgccaatgtctgctcattctcagactcctcagggaacaaccactgctacagcaggtgctgcaagctcaccggtacccatcacacagtcaacttatacccaacccttcaatactctaaaccagcctttccctctgaaactagatcgaaagaattatgttctttggaaagcaatggtctccactgttattaggggacatcgtctcgacaggtttgttaatggcagtcgtccatgcccggttgaacttattgctgcaccaacaacaacaaaaggagaacctggttttggtctcaccattaatccagagtacgagaactggatagtcagtgatcagttgctaatgggctggttgtacagctccacgactgaagggatagcaactgaagttgtaacgccctaatgcta

SEQ ID NO: 163627 - DNA, 2068 bp, Cannabis sativa
ataatagcaagtagcttattggtatggattcaagacagggttggctggggcctaggatttggaatccccaccttgcttattggcattgctattgcaagtctgttctcgggcacgcttgtatacagattacagagagcaggaggaagccctttaacaagaatatgccaagtttttgttgcagcattctataagaggagactggatgtgccagaggatagtggcgtcctttatgaaacgcaagacaaaagctcgattatcaaagggagtcgcaaactggagcatagcgatgaactgaggtgatcatctttctaatctccctggttttaactactattctttcttacctactaataatataatttacaggtgcctagacaaggctgctttggtctcagaaatggagactgaaagtggggattactctaatccctggagactttgcactgtcacacaagttgaggaactgaagattttgagccgaatgcttccaatttgcgcaactggaattatcttttcagctgtttttgcccaaatgccaaccttgtttgtagaacaaggaaagatgatggataaaactctggggtcattctcaattccagctgcctctctttcacttttcaaccacattagtgtcattatcttggtaccaatctatgacagactgattgtccctatagcaaggaagtacacaggtaaagaaagaggcttctcacagttgcaacgaatgggaataggccttttcatttcgattctctgcatgtctgcagctgccatagtagaaattaagcgactagaacttgcgagagagctcgggttagtttacaaggatgttgttgtgcctgtcagcatattttggcaagttcctcagtatttcttgctgggttctgcagaggtgtttactttcattgggcaacacgagttcttctacgagcaagcaccagatgccatgaggagtttatgcagtgcattttctctgctaacaaattctttagggaactatctttgctcattggttttgaccattgtgacttacatgacaacacaaggtggtaagcctggatggattcctgataatctgaatgaagggcaccttgattacttcttctggcttttggctggacttagtttcttaaacatgttggtgtacattgtttttgcaagaaaatataaggagaagaaaacttcttgattgtgggggatgagattcataaggcattgtttgtataattcattagtagaaggtttaatgtatattgtgaaagtaaaattcattagagggccaatactcaataggggcacatacaattgttgagaaacattatgcataatgtgattatatatattttagaaaatttaagtttgggttctctttctctatgtcaaaaactcaaaatagtaattttcaaaaatattcattttagttttttaagggactataacttataacttatgtaagtcacacctaaaataggcatttttagcataaaagataaaattagagacataattgaaacaattgtaaaagaaatagcaaaagcctacatctattaaaaatgatataaaaacccactataagagcacatctccaatgagatgcaaataagtgagtaaatgtaaagtatagttcactttgttaaaaatttactttaatagtgtaccaaatttattatgatgcaaatatctcacataacaaatagtaatctaaatttggatgacaatataacatgatgcaaaatttgcatcacaataaatattatgattttatatttgttgttatactatttttaatattttgtcattaaagtttagttagcatgctcatttacattaaataacttgcataattattattaattttattattaaattttatatttatgttttttgattattattattttagatttttaataaattattaaataagcattaaatgacattaaattttgtatcaaatgtactgtattttataaaataacaatggaacaccaaatagaataactaaaaataatagtggaataataaaaaaaaaaaaaaacttaacgtatttttgaagaaaaataagtat

SEQ ID NO: 163628 - DNA, 782 bp, Cannabis sativa
taaaaatcgaactgcaataaactcaaaatcaataaaaattattactattcaacaatgaattgggtcttaatccatttttatgtgcatgcattataaaaataaataatcatcgttagacaatacttattacctttattaattatatataatatgcattttacttttcaaatttggacttcactattcacacaataataatatcccaacttgtagttcttattacctacctgcccaatattgcaaaaataatttttcatatgatgacttaattgatcaagttcaatcttataatcattaatttattttattcaatgaaaatataagagggtccatttctatatatatatatataggtctctatgaaagaccaaattatattattatagatagcgtttgactattttacaattaataatacaaattaaatattcttttagcaatgttaggttgatggaacctcttactatattcaaagtataaattcaatattaaatcgcaaaatttgactatattttgaaaatattcctttgaaattttgttgggacccaattaattataattttttataaaataaaataaaataaatataacgattgaggtatatgcttcatgccattttaattagtgggaattggaagtgatgtcaaggtcattaattagctgtaaaattattggtaaaataataatcccaaaccgccaattactatttcactatttatataaaatatctatttaaaaaaatgaaaaaatttcttctaatttcactatttatataaaatatc

SEQ ID NO: 163629 - DNA, 1102 bp, Cannabis sativa
ttattatataaaaaaaaaaatagtagcttgattatttgttttacacatataaagaatgaaaactaagactaaggtgtgttgacgtaaattgagtgttctcattacttaaagttccagtttaaattaaagtattcacattcttatgagcagtgatgataaagtgaacgtaaatacgaatgtatctcatctgttcaatctaaaaagcattatatagtttcaattaaagtcattagaaagaagaatacatgcttacaatatttaaatcaaaggcatcatacatatacaataatacaagatcagttagaaaaccaaaatctgaggtttcctttgcagtagatcctcagccaaaatcagttattatattatatggaatgcattattaaataatacaatcatccttatgagtaattgtcacacatagaagacaaaaaagtgttagaatattctggaggttatatacaaaagaactccctcccactatgtattctatctcttatggtgtacctatacccccagccacactctaacataatttagccatttcaactaaattttagagcctactcataaaattcaagtaacatgtaattcaataaaaacttgacctttattttctctgtttcttgacataatataaaaactgaaaaactctgcatagcataataaacataactaatccaaaacttttactaacctgaaatttgacatacctccctaataagttaaaagatttagtcactattataagttttttttatcacttgttcatctataaataacaatccaaactaacaattttagccatttcaaccagatttcatactctactcatgagaattcaaatcatctgcagttcaataaaagaaatgaactttatttcttctgtttcttgacataaaaaatccaaaactttttctaacctgaaagtcactaaaatttgacataacctccctttccatagctaatgaagccaaagacagcaaatctctctgtcacgttatcattaatatcaaacacaaaacaacttctcaccacaacaacaacaaaacagacctaatcgacactaatttacataataaaatcataaatacataaattaaaa

SEQ ID NO: 163630 - DNA, 2561 bp, Cannabis sativa
  modified_base (656)..(673): a, c, t, g, unknown or other
tattgagagaaaacagttaaaatgacttagagaaattgataagctaacttaaagccctaatataaactctaaagcatcttttattgtaatacaaaaatcaaagtcaacattaactagagaaaagaaaactatcatatgagagataataggagcattgccagaaattatgagactataaagtaaaccaatttgctcttttaacttaagggccatgaagataaattttcacaacataacaaaataagatagggagataaaaaattactgtatctaacaccctcgagtagaaacaattcacctaataagctaaagctagttatttatacaaaaactagaaatagatgctaaatatttcacagctaaagaagcaaaatttgggaggaaatttaggtaaagtgtaacacccttgtaagttataacctagtgagggttagttcgattcacatacttagatggtatggtcataatatttatattattatattatgacataattgaacataattgctttaagtgaattatgtgtgcataacactatttaaaagacaccctaaaattttgtaaagacatctcattttaataattttattttatataaaattatatctttaattgtattaagtttttttaactttttttcttccaattcatattcnnnnnnnnnnnnnnnnnnaaataaaaataaattattttttaaataatatgaccataaaataaaataaaatataattcatgatatagaaaaaaatatatataataataaaatcaaaataactattgaaattaacataaaataatgtgaggaatttttttttaaaaaattatcaaaaataatttttaaaaattatttaagttacttttttttttaataataaagtgcacttatcattttatgggatgcacatagaacttcccttaattatattgtgaatgcattattatgttatatattgtaaatttcaacaacaaattataaattcaaaataaaatcttcaaatggtaataacaaaaaaatatcaatttatgaaattctcgactttttttagaattaagtgaaattttataatttaactaggattagtggaatcattattgataagtgttttacctaaagtttaacaagggtgacatatgtggcacatgacacacgagattaaactgatgaaaaatatataaagtcacttgatacaacaatacaaccccaataaaacaaggaaatgcattgatcctcagattgagatacgtatggggtaaacgaggcctctcactacaagaaaatatgcgccggcaaaagtacactaaatgcaccagtaaagttaagttttgccggtgcagtatcgcaaaagtacactaaatgcgccggcaaagcttaccggcaaagctaagctttgtgggaatcttagtcggtaaaagattttttaccggcgcgtagacttaatgcgccggcaaaactctgttttaccggcgagaaatcaccccggtgaaaaagaagcgccggtgttaaaaaatacccttatccgctatgaacctgctttgataaccttttgccggtgcaatagtgcgccgacaaaattgttggcgccaatctgaggattggcgtcaacagttttgggccactttttaccggcacaggaattttccctccaattttttttagccttttgccggcgcatgccggtaaaagaagaaatgcgccccaaaaatgaaatcaaaggcggcaaattctcgcgcctaatggtgttacgttgtgccggcatattttatttgactacgccggcattgctatgttttgctggcgcacaaatgcaccggcaaaagtaaacccaaaataaaattgagattccagaattttctttgtgtcgacaacttttgctggcgcatgtgacgaaatgcgctggcaacttttcttgtagtgtctacacccttgagttaggttggtcgagccccctaagggtggattaggtagccacctgcttgagggtgggttagacgatcacctcctccctcctgagggtaattcatccaccctagggtgggtggattcgttcggatgactaattcttcactccctacattcttgtggtcctggtatcataccttacttttatttgaacatggatagtgcaatgcttgctccaagtaccaaagtttgtttcatgtgctctatgtttgtctacggtcatcacttaaacccgtacatctataagtattaaggtgcaacaatactaagactatatgctaccaagcttcatcataagaagcaaaggggaacgtcccgaggatacaatcccagagtgggtgtatcccaccctagggtcggtcgactggaccacccatcctaggatcggtcgaccataatgtaccatatgggtgcacacccaaacaactcgttacatccaacactcttgagcatcgctcaatcctggacgaagctcaaaagtggttacaaacccacaaaaataagggctttttttcataattgtacaacaaaaacaaaataattacaaaaaatgtgcaaaaaaaaattatttgaaaaacttatacattttgaaaatttatta

SEQ ID NO: 163631 - DNA, 2774 bp, Cannabis sativa
ccccccccccaaagaatacttttccaagtgaaggaaaaattgtaacgttaggagcatgcaagaaatcagagtttttaaaataacgggctttaagaatagaatgaagaagggaatcaggatcagtccaaattctccaggcttgcttggctagaagagcttggttgtgaaaatagagagttttaaaacccaaccctccaaaaaacttagagactgagatggcagaccaacttttccaatgaatctttttagtctgggaggaaccccaccaaaatttagaaataagactctgaattttgagacagatagattttgggattttaaaacatgacatagcgaatgagggactggcttggacaacagccttgataagagtttctttaccaactctggaaaaaagcttatcattccaagtgttaatacgggaggaaacattttggagaagatagtgaaaaactgaattggtaactctgcccacacaatgaggaacacccaggtacttactaacaaaaccttcccctgcaagatgcagagaagtacgaaagctatgcttagcatcaggggaagtattaggagagaaaagaatggaagatttatctctattaaccaactgacccgtggcttgatgatagaggagaaggatagcattaagagattcgctcgagcgaggagaaacaggagaaaacaacatactatcatctgcaaacagaagatgagatagagaatgagcccctctacaaattttaatacccgagaaattaccgttaacttcatgaaaacggatagcagccgaaaggccctcagcaaccaagaggaaaaggtacggagaaagaggatccccttggcgaattccacgagtagaatgaaaagggtcggagagtttaccattgagagataagcgataggtgattgtggagagacacttcatgataagagagatgaaggaaggcggaaaaccaacatgggcaagcataagatgaatgaatttccattcaactctgtcaaaagccttttccatgtcaagcttgatggcagcccaacccagcttaccagagcgcctagagtgaatagcgtgaatgatttcatttgctatcaggatattatcaatgatttgacgacccttgagaaaggcgctttggtttttgctaataatcgagggaaggacatttttgatacgattagcaagaaccttggaaatgcatttgtacaaagtgttacaaagacttataggcctaaaatcacagacaagttttggatttttctttttaggtataagaaccaaaatagtctcattgatcaaagaaatgtcaccctgatgattcagaatatggagcatagcacgacagaaatccgagccaaagatagaccaatttttctgataaaaaagaggattaagaccatcagggcccagggccttatctccagagagactgaataaagcatgtttgatctcaacctcagtaaattttccatcaaggaaagtcgattgctccgaggaaagcttgggactgatctcttgaagaatggaattgatagccacatcacagaccccctgagaactgaaaaattggtgtaaaagttaaggaattgggaaatgattgtaggagagtcatgagtaatcgagccatcaggaagggtgatatgtcgaatgaaattattcttccttcgaatagaagctttttggtgaaaaaaatttgtgttcttgtctcccgcacgaagctaatcaactctggctcgctgcttccagtagacttcatccttaagaagtaatccatctaactcggattgaagatgagcggcaagagttaaagattgggaactaggctggtgatcatttaagactcggtgaagctgagcttgtgttctagaaatttggagttggagaggatactgagacttgctccaagatttaagattggagagacaggtcgattgcttgtgcagaaaacattgaagcgggggagagacagaggaaggagaaggagtccacgaggaatggagaagattgagaaacgagggatcagtgagccagtggttttccacatgaaaacgagatgatttacgattatgaagactgatatcatccaatataactttgagaaccctgtggtgggatccgtaaaaacccaaatgaaagagagaggcatgaagaaagagattttgccaaagaggattggtggtacaccaatccagacactctaaaatttggccatgcctccacgtaaatttaggccctgaatgatgaagtggggtatgatcaaacttataaagaaatgaatgaaaatgatgcatagcatgaggcggaggggaaatagtcgagttcctatcaccaacagagagatagtcattaaaatcacctatgaccaaccaaggcaaaaggggagcagtgtcaaaaagacagttaaggagagtccaagtaacatttttttggtcaaaataaggtgagccataatacccagaaaagtgccagttcatatcattaaaattatttataatacaatcaacatggttaagggagtaagagataacagtaacatcaatacaattgttccaaaaaagcaaaagaccccctaaaccctgcctaggcacttctagaacattatcaaaatgaagtttgttcttgaggtgcactccacggccagcaggcagcttcgtctccataacaaaaaacaaaattggctagtgttgcttaaccaggagggagagattacggaatgctcaagaactccctaaacctcgagcattccaactgtagagactcatttatctcggcgggg

SEQ ID NO: 163632 - DNA, 933 bp, Cannabis sativa
aaactccattctttttcctagctcctggattcgtaagtttgtttttcctttttttttttcttttttttttttgctgaataattttgttttgcttttatttattacttttatggaaatacataatgaaatgctcccaaaactttgtgacatggaattttattcttattaacaggttgggggatggtggagtccatatttgttcacagctacaatagcctcaacaaaatatttctttaatcatgttttaaggaaaaatactctaacaaaagcttgcagaaacatctctcgccattatgatcgatagcttctcctttgtccaatcactcaaggtctcccttcgtgtccctcgcctccctcagtatattttttttcgagctataaatctctccctctgtctttgattttttcaggaggactatgtttgaaggtcgtcgtggatctcgctattcaaagtcgtctgtggtttacggtggcagagttcgttgatctcgtcattcgaatgccgacagctctgggttcttggtctaaggtggcgggtttcgtggatctcaacattcgaactccgatgattttaggctcattgtctatggtggctgtagggttctgcttgtaatttcttttttcaaatttcaattttatttctggatgtgttcatagctattttttactttgtttttaattatcctaaatttttagtgttgtattgaacaatacttgttatattgatttaaaataatatttttttgttcaatatactttatttatttttattttttttctgtaaaataatttttgattattgaatgtaaatgtatatatacattttttaagtttttttttttatatctatttcaaaaaaaaaaaaagttgttttatatgaaaattaaaataaaacaaatctgatatatgtaagtatattaattattaaaataa

SEQ ID NO: 163633 - DNA, 1846 bp, Cannabis sativa
ttgttgttgttgtaattgttggggctgaagttgaaattggtgttgctgattttggttgggtatcattccttccatggctgccatgagtatcagaaccgaatagagctgcactgaacgtagccccaattcttccacatttaactttttcttttttaaaacaaaattctatgtgttaaatttttctttttaataaataatgcaattttattaaaaacagttaaaataataacttgcaattcaatcaatatatttttttttcattagagaattaaaaaagagctaaataatcatttgacaaacaaaaaataaaattacattaaaatgattgtatcatcaaaattaaccttaaaacagtttcatttaccgcttagaatatacaaacaagctaaataatcaaccgttaattcctaaattgtttgaataaaaaactaaaaataaaatcacattaaaaagattatatcatcaaagttaatcttaagaacacatatattcagtttcaacagtaaaaattattgcaacatgttcatttaacctcatagtttgaacacttaactattgtgcaagatgcataattacactactaataactcattcaatcgaagaaaacttattattatcaaccattaatagcaatttgatggcgaagtattgaaaaacatagaagaatcaacaacgaaacaaaacaaaattatgtcacacaaaactaaaacactcaaaatcatatattcatattaaaaagacaagattagaacattcaaaactatgtcacagagacaagactaattgcaatagcaaaaaccaaattacaatagtaaaatataaccctgaccgagccatacatatgctcaaagaaagtaaggatggaaatttgggctattttcactggccgggtcgggcccgcccaacgggatgactttggcccgattatttcggggttttatcggactttaggcccgacccggtacatatcctttctggtcgggcatcacccggcccgattcgaaatatttaaaaaaaaacctaaaaccctaaaaaattcattccaaatttcttgacttctatgctctctgactgattcagacagtcagaccacacccctcgccttctaccctggcaacgacacattacagctgactctcatctccgacgacgactgacagccacctctgctctctgctctggttagttttcttgcttgtagtcttcatggaactcttcaactattacaaaacaccacctcctaccttcgcatagaaaaaatttatgatgggtctgcaagtgttaccttcgctccaagaaccttcagatattaaacaattaagactcaaggaacttcagttatgaattgatgtgtctgtctttgttggttctgctttccatttattaatcactgttttagtattttttttttcttttatcaagttttcatttctccttaatcaattttcattcgactatgccatcttctgaaattttcatctgggtcatttttattttaatagaattgcaagatttacttatctttgatttattttagtaaataacttactttgattttaatctcagtggacgaattggcaatcaaagagctattgctacggtatgctgatccaaatttaacaccaaaagatctcctggtgtgtgctcactcactgctttgctgttggtggagtatgatatgatccactgactttgtgctaacatctgtatataaatgcatctccacaaaaagacaacaaaaaagacttgtttttgtctttttgtgaattttttttttttacaatttattttaggggatttatatttgcaccccataaaattataaatacaccccattattaaaaaa

SEQ ID NO: 163634 - DNA, 1447 bp, Cannabis sativa
catctctaataacctgttaaaaaatagtgatatttttacattttttttttaaaaaagaatgatatattttatttcaaaattaatacatgttaaaagttataataaatttagcataagatattatacttgtcaaatttgacacaataataaatataatttttttaattacaattttgttattggtcattaatataagattttaatacacatttcataattaaaatattaatattagttattttttgtatttctgtattaatgacacgtgcacttctaaggcacaatactagtcaagatgggctcattcttaggcctaatcaacttaacaaatcaacccacaaaaggagtcagcctacaactctgaattcgaatgtaagtccaccttatagatgcgacaagtttggactgttgtggtcttggaaagactatcctaccccgaagctgaaaggtccatcaggacaaatccgaataccctcttgaggtaatccagaatgggcaattgaagagacatccaaaagcctccgaataccatcctacgtggcatcctccagacataggatcccattgtgtcaaaggtttatcccctatgtcagacctagaaagtgcacgcactatcaaaataaaactacatttttgtccaacgctatattcctaaacattatcaataccaacttggttgtgcacgatagctatcatcaccaaattgtccccactcgtacagatgatcattatctcatcaatttggcctcatccaattggcctaaagttaatatatattatatgttaccttattagttggcctagttgacacctttaagccctattgagtttgggttcacccatacctgactctaacctataaatagaacattatcccttcatgcaaagggttggaaaatcatttctcagatcaaaggctaagaattaaggttcttaagctagggcaagaacacttgtgtaaaaatactttgaagtttttctagcttaataatattgattcgtgtactaaggctcattgatgccttaaccatgtaaaaattcttgattcttcttctttaatttatttctttcttaagcttatttatgttataatatgtttgcaaaaatctcggtaaacatcttggtactttgattgaggtcttgaagaaagttttgccagagttgtcatccataacaatggttgcaacccaaaaagcaacggtcaaaccatctattcaagacggttaagataattccaccaacgatgatgagaaccatctcccctaaaaaaaacggtcagacaagtgtcatgggggatggggaagcgtcttaggtaggcatctacccacggtgaggggaccagcaccgagaagaatgcgttgatgatggtcaaattgatgatgatgagcaacaaggtcatccagataaccctaaggatgaccacaataaatgttgggaattattttac

SEQ ID NO: 163635 - DNA, 2129 bp, Cannabis sativa
  modified_base (1774)..(1774): a, c, t, g, unknown or other
attaattataataagagcaatactgaagagaaacagtctgtacacatttaaataattaaaaaaatgaagcatttttacatgaattcactagatttacacctccttcaatcatgataattgattgtttaaccaaatgataggtttggccaaatcaaagaccacaaacacaagattgtgaagtatcatttgacaaaaccaattcgagaaaattacactttgtactcattttatatttttattttaattttttacctttattttattattttttaatttatacctattttataaggactctaatttttataagttatatgaaattatatttaatactttgattataaaagagattatatattaattaaaattattttacaattatattaagttaatgtgtaataaaaaaaagtaattcttaacttatcctaaaactattcttagtaaatttagacaacacattcataataacatattatgaatagtacataaaatatctacaaaacaaaaacaaaataataaaagatgaattagaattctagtaatgatattaataaaattaataaaaaaaaaattctcaatatttagaaaggaaaaaaattgtcactccaatatattttattgaaaattaaacttgcaaagtctttgtaatcataagcccacaacaaaaaccaacctacaaaataataataatcataaaattttattaccacgcaatagacaaggtaaataatagtaaagcaatctaaattataatttatgaaaataacaagggtaaatgatggtgcaattatagggataggagctcttattcgcgatcatgatggtgcagttatagcaggttattctaagccaattcgtggcagctattctccaaagaaaatggaggctgctgctatgttttctagtgtgcaatgggccatggagcaacatctgccgattcactacatagagacggattctcttttcgttgccaatgctgtcaacaacttatcttctattatatttgtaactcattttcaagacttggtagatgatattaattatcttttatctttctttcttagagcaaagtatctcatgttaaaagagatgttaataaagtggttcatagtttagctaaatttgctcttcgattggatgaaaatatttcttggttggggaaaattccctccccaattgttattatggattcccacttttaaggataaccgttttttcttaaaaaaaaataaaataaataacgacataagtatttatatttgtgagtttgtaagcgatataaactcaataatttttgttagcggcataagtactcaaatatttacaaaactgaatttttttctagtttcgtcaatatagacatcgttattgttttaaacatgacacatataaaacttagattttagatcattaggtctggattgaaacatttaattcaaaatcttcttttaataaattcaaaatggagtccatattgataaaaatggaggaaaattataattttaaaaaaattgatacttatacccctaaaaaagtaattgggtttatgtcattaacaaactcaaaagtttgagtacttatactgatatttgcccaaataataaataaaagacttggattttattttactttttaatctttttaaggaaaagactcattcggtatgccgtataagggtcgtattgtatcaaataataaataatactatgtttggataaaacaatgtattatattaattattacaactaaattttttaatacaatgtatgttgtnttatttaatacataacaaattatccgtattagattgtattataatatttacaaaagattcggggtcaacaccaatctccgacctagtcccggacccgggacccgaacccaaacccggacttggacccaggacccagacccaaacctggaccccgaaccccgactcggacccgagacccagaccaggacccgaccctggaccccgaactcggacctgaaacccggacccagacctaggacccgaacccgaacccgaacccgtacccatacccggattcgcaacccggggcccggactcgaacccgacttgtagttggtgttggggtcgagtgtattgaaaatatattatctttaca

SEQ ID NO: 163636 - DNA, 826 bp, Cannabis sativa
aattgaatataataatataatgaccactcaaccatacatatttaaataatcaataaaattatatacagttaaattttatcatctagtataatatattaatacaataataaacagtattaattttcaatcgaattcacgtaaaatataagactatatatatttatatggctgtatcgtgttataaaattttgaatgatcgagttaattattatgtatataatgtgtaaatatatatataggagtcaataataataacatacattaaaatttaaaagtgaccatgtaactgtaattcttgatttaatagctatagtttatcaacttttttaattttttctgttaactttaacacagaaatttttatttaaaaataatttattaaattattatattattgattcaattatttgttaaatttttctaaatattatttaaaattctgttaactttttctaaataaatggtattcatagattattttcacacaaatatggcattataaataggctaattctcctttaaaacaattatatcaatagccttattatactttgggtggtactatacagacaccatttatcatttttcatctataataaatatatatacataatcaaacaatttaaatataataataaagattaaataaattgttacaactttgtgaaattttataagaaaaataaataaataaataaagtgtgtgaatgaatggagtcccatctaaaaatactttattagaagtgtatataatatatatccaagtttggaacttgggttgggggccgaatggatacccagatttgtgcgcatgggtgaggactca

SEQ ID NO: 163637 - DNA, 1988 bp, Cannabis sativa
gagagagagagagaaataagtgagggggagagggggtgatctgcgcctgggattcttgtggttattgggttttggtgtgttccagagaagacgcaaatcgaaagatcaagaaaaaagaaagaaaaaaaagtattttttttcttttgtaaatatcttttttaaatgttaacacgtggatcaataataaaatctgttatgtacatttgtgtgcacatcagtaatacacattgccatttaatagtatcattctaacaaaagtgcaaaaaccaaaaaaaaaattgagagcttgaaagcttttgccgtcaaaaaataaatttattagattaaatgtcacaaatcgtatagtttatgtcgttttactgctaatatccctaaatataattgctctagttctaaagactattggttatataaaaatacataacgaattgtcttaaaaaattactatgataaaatttgaaattccagacagttttacatcatcgggtaaaaaatttctgatggtctataaaattgccgtctataagagcatcgtcctgaataatcggtagaataggtgttaggtcctttttggcaatttagttgtcaaaatattttttaattaatgtgtattttattaagcatttaaattatttttattacattgattttgtgcattttattgctcttttctatcttaggaaagaatcactttccagctggacttttctttgtttggaaacttcttgtaagagaagaattctcttatggaaagttatttaattttgggaaacttgagttttccttttactaatcgatgattttgattttgtctttagtagaacaaatcaaattatatttatttggcaggtttgaagtccaaatttgtgatcttagtttaatttagaaagtttcctttgtggtcctgacttgctactgtgaaacccgattcagatggtgcaaatcaaggatttttttaagaaagttttgtacagctggaaaattgttttcgtggttgtctctagggttgctatattctataaataggacctagagagcagacaaacgattttatctcttctagtctcatattttcatatattgctttgtgagaagagtgtatcatttgtaaaaacctatagtgttcaaataggatttggttttcttattatgatctcgtactattcatagaataggttgaagagaagctttgaacaagtgtgggtcttcaggagaagacttttccaagtctcatttttgggaggaagtgagcatatatcttcggaagaagatttatttaagccttacttcgaagggaagtaagcacacaacaatagctgaagggagttcactacatggtgtgtttcagagatcagattagcaaggtggattacggagggttgcggcaaatcactagagggagtctaaattattggcatttacaaaaactcaatttttcaattgttatcagagcgggacactaaacttttagtgtggtccttttaacattttcttgtgtttttgcaatatgtttctctttgcagaagaaacttctattgttcgcccacctctcctcaatgattctaactattcttattggaaggttagaatgagagcctttatcaagtctcaagatgagaaagcatggaggatggttctttcaggatggtctcctcctattgtggtagatttcgaaggtaattctatattaaaatctgaatttaaatggtctactgaagatgataaattgtctgcttataatagcaaagctttacatgctatatttaatggagtaggtgaacattatattaagcttatatcttcttgtgaatctgctaaggatgctcgacagatccttcaaactgagtttgaatgaacttctgatgttaaacgttctagatttatcatgcttcagaccaaatttgatgatcttagaatgtctgaatctgaaaccttaactgaattttatgaaaggctatctgatatagctaatgaatattttactcttg

SEQ ID NO: 163638 - DNA, 2398 bp, Cannabis sativa
  modified_base (2350)..(2350): a, c, t, g, unknown or other
tttagttattcactttgattggaaaaataattagggaatggtagagtaatgaaagaaaggaaaggcatataatgtgattttgaagactttgaattcaaactaatacacgtctcattaaacatgataatagaactaccaccacaattaacaaatcatgacatttgggaggactttcttcattccgtactctagaaagaaagcgcaacatgacaaatatctaatatcataactataatacaagacaaaagaagagtttttaagtggtgagaacgaagagagtgaaaactgaaaaaagaaaaaaaaaatggaaaacttatggatgatcatcctcatcctcatcctgactaccttctttttcatcatctcaaaatccaaaactaaaaagctgccaccagggcctctcaccattcccatcttgggcaacatcatatggctccgcaaatcattctcagagctagagcccatcctccgcgaccttcacaccaaatacggccccctcgtttctctccacatcggttcccgcccagccctcttcgttgccgaccgctctctcgctcaccaagccttaatccaaaacggcgccgtcttctccgaccgcccacccgctctccctaccagcaaaatcataagcagcaaccaacacaacatcagttccgccgcgtacggtcccacgtggcgtctcctccgccgcaacctcaccgccgagattctccacccttcgagggtcgagtcctattccggtgcgcgcaagtgggttctagacattctcctcacccgcctctcttctcaaactcaaaccaatgaacaggtccgagtgatggaccacttccaatacgccatgttctgcctcttggtgctgatgtgtttcggggacagactcgaggagcctaagatcaaggaaatcgagaccgttcagcgtaatttgttgctgagcttcagacggttcaatacgctcaatttctggcctagtttgacaaaggttgtgttaaaaaagcgatggcaggagttttttcagctgcgcaaggatcaagaagcggttctggtccccttgatagagtcccggagaaatgtcaagaaagaagaacaagcaatggtatgttatgtggatagtttattgggcttggagttggcggaggaagaagataagaggaaactgaaaacagaggaaatattgagtctttcctcggaatttctggacgctgggactgatacgacttcgacggcacttcaatggatcatggcgaatttagtgaaacatcaggagattcaaaacaaactgtacgaggatattaaaaaggtaatgaaacatgatcatgatgaaatcgaagagaagtatttggttaagatgccatacttacgagcagtgatattagaagggctgaggcgtcacccaccggggcacttcgtgttgccgcacgcggtgaccaaggacgttgttttggatggatatgtggtccctaaaaatgggagtgttaacttcatggtagccgagatgggatgggaccccaaggtgtgggaagatcccatggctttcaagccagaaagattcctcattaatgataataaggttgagtttgatataacaggaagtaaagagatcaagatgatgccttttggggctgggagaagaatgtgtcctggctatggtttggccatacttcatttggagtattttgtggccaatttgatttggaagtttgagtggaataaagccaatgatgatgatgatgttgacttgtctgagaaacaagagttcaccgttgttatgaagaatcctttgcaagttcgcttgtctccaaggactcatcaccattaattataagaataataataacaacgccgccggcttagaactattagtactgctagtagcctagtactatgtatcactactacttatttatgtgtatgcaagtgttattatgtttacctcattctgtatttatcactttatttccagttccaatatatgaactatcaatagattgatctgcctctgtcaattaagttcagtccaacaaatttacaatttcatgtccaaagataagagatctagcttaggttgcctgcatgggaccatcaactaatttattaccagggagtgatttaaataagcaaaaaattaagagatatcatcatgtataattttgttgttaacgaaatgtgtaataatataaactacagaagtaagatatttttaatgttagagtttgactcaaattatttatttctttctttatttatctatatttgtaaagttgcaattttttttttgggtaattattaattatgggaaaaagaaatttttggttgccaagttttgaaaagtcttcttaaggaagctttggantgtcttggtctccaagttgtcttggtgcccaagttttgtaactttata

SEQ ID NO: 163639 - DNA, 946 bp, Cannabis sativa
gttttgtattttatatgtttttttgtatataaatgtggttatattacagaatatttaatttaattacgatattttgtaattttttacatacagaatattcttttaactcttaaatatatataaattaactatttcaatctcatatattaaatcataaaatataaattattattcaatcgtttaatactatcaattagatatttattatttgaactattttattttattgaatcgtaacatatttattcggaagaaaaaccaaatttaaaaagctaaaacaaaatttaaaaggctcacagttatgattgaatgctgaagggttccaaaattttcaaatggtttcaaatactgattttaccaatatgcctttcctatttttttatttgtgtttagatacatgtatgatcgatgagatagagagtggtatgtatatggtctcaggaacttctccttcaacgacctccatctctattggctgagccgtagatgatgcgaaggactgtgttctgtgttcaggcaatcgatcgataatatacattatacagtattcgggcaattgatcgataatatattttattatactactccttgccatcatcgcatggcttggtgatctcgaatcggtctcgaaattcaactacttatgatatttgcttcttatgactcgataaagtcaagaattaaagtttctctcttataaatgctttgttccttctgttttattattattattattattgaaagggatatatataacagggctactttaataggaatatgtcattttttctcaaaacggtagaaattattaaaaaaatagatgatcctagaaaattagaaggatcatccatatcagcctttattaataaataaattactattatgtttttttctaatttttttttattaaaatttggatggtttgagaatatatttgtattggttt

SEQ ID NO: 163640 - DNA, 1295 bp, Cannabis sativa
  modified_base (1202)..(1207): a, c, t, g, unknown or other
cgtcgcggacggagtggttcggggctactgcgaacgagaagcgcgttgaggatttggagcgcgtgagggtgagacggcggcaggttgtggcggagggatcaactgcgtttatgtagagcgtgacgtggcggtaaaggtcgttgagttcaacgccgcagtagccattgaactcggggatttcgaggtaggaataagggctgagtaagtcttggagggactcgtagagcgagtggagtagggagagtagttgagaaggtaagacattttggagaacggttagaaggcctagcaaggaccatagctgtgacaaaatctccatatctcacttactaatattactctactactctttttgtttttggtatttatatagggttacaataatgattgtgaagtaagaaattatatatggtttttggcttatatatatgttgtggatagtactagagatattggtgcatgtgggtgatgaagatgtgaaaacaaagtaaaagacagacagtttattactataatgtagtttggggaataaggtgtgtatttattacttagatgctgggaataatcatatattttatattgtgagagagagagagagagggagagagagagagagaggtgttttaggtgctcaaagtgaagcatagggaccgacaaagttaaataaaggtataatgaagcgcagataaagagtaaagatgaagccgactgctattcactcttttgctttatctataattgcctcaaaagaggttttcatgtgtccactctccacgtatatacacatactcgtctctcctgcaaaggcgtgaatgcactgccactcacacatttatgtaatgtatatatttatattagtgataaatttagatgaattatttattttttaataaaaatttgtaaatcagataagaaatgaaattatgttgggtaaaatattttactttttgttttatatgttatatacattactattatagtataatttaattttttaagtattataataaaattgtaattttaatatatagttaaattataaatgcactattttatttcatatttttctaaataattttttattaaaaaactaaatgcacaattttattaattattatttagaattatttattaagaagtttaaaatttattatatggagtattctaaatagttttattaaaagaaattatttttataaaannnnnnaaataaggtggtataaaaaaattacggtatttctcataatgcattattttcatatctcgatcattaaaaactattattattattatta

SEQ ID NO: 163641 - DNA, 3258 bp, Cannabis sativa
ttcaagatgatccatgttataagcaatgtgattggtagctccggtgtcaacataccaaccatgatcatcaccaaaatcaggaagagatgagcaacaaatgcttgagactcataatcaaaagattgcttagttaaatttgcttgaggttgagactaattagaaatggatttaggagcgatctgatttctatcgaacctgtaatgacatagaagggcagtatgtgcataccgcgtacaaacttggcacaaagggcgatttggattgagattaggtggtcgagagtaattaggataactagatcctttgccattgaatcttgaagagtgatcttgagcaccacctctgccattatagtgatcttgaccacctcctctgtcagtattactataagatcgataatttccttgtcttgagccaagagtgagattagcagacatctttgttgaaagatccattatagatgtgtgatgctcaagtcaagtttcatgaaacattagtagcgcctgaacttactcaagagacaaattgtcacttcgagaagtaatgctagaaacaataggatcgaactccggtccaaggccattcaacagatgcaaggtctaatcgaagtcagtgatgggatgaccaactatagctaacgaatcacaaagggatttgatcttatcaacatagtcaaagatcgagcgagtccctctatgaatgttagaaagttcgcctttgagttaaagcaaacaaaccttgtattaacttgaaaatttctactctaaggctttctacaccgcacgaaagccggtgtaattcgcaactgtgccaaggatgtcttcactcatggatgatcgccaccaagaaagatcaccaagaaagaagaagttgatctttcttgcgccaagtagtgaaaatagggttgagatctccattgatgagtcattgaggagtgagatcagagagcaagatttcatcaagctcatgaccaatcacattgatttccatgctagaaaattagtacgatccaacttgaatgtaagagacgatgtaagggaattggagaaaggattccaattctgagttgttgtagtaacttgcagaggaataggattggaagacgagttgtcgtcggaagaagccattgacgccagtcagaggctctgatataatgaaacaatatgaacagaggagaaagaaaataaaaataagctttgaatctatataaactcactagagatgctgagggtaccataaggtatgaaaacccaattcatgattatagcagaacaacagaagacctagagtaaactaaaataaataaatgaatcaatagatataaaaaagaaataagatgatttagcaagcaccagtacacaaacaatttttataactaagccattgaggaagttcaatgtcaaataattaatacaaaaagacctaagatgatttaacaaaggtcatcactcatcaaccaatttatactccagaagttcaatgtcaaatgagaaaccaaatgtgtcgaaacatacatggaaaaataccttgaattcacttttgaaacttgcttaaatggaggcaaaacatggcctagtgaacaaattagttagactggagcaagtatcattagcaacttaaatatatccagcatacctgcatcctccctttcatcccgtgggctaagaggaattcccttgttcatagccattcccttggcctgatttcactgacaacaaattagttaaggaggcaaggcataggaagtactcagtctcacgttactcatcacttgagcaagttcattgagctttctcacttagtaaaaggtaaaatgttgagaagtcccaaatggggaagcaagctttcaccatatatcaacagagctactgacaaatacaacctccgtcaaattggcagttcttaaatgaaaaatgggcaaaattaaatcaattctagggaggagtagtcaaatctcatagtatacactagtttggaatctccataaactgttaaaacttactgaatttttcccaatgcccagatatacatatatagtagtagcatatatataaaaagtataacaaaactataatcaatgaaattaacttaagtataaagaagcaacactccactacatttagttcgaaattcacgtacattcaatattactaaagtatccacaagaagataagaaataaacgataccagtgcacgaaataggcaacgaccatctccagtaactctcagaaccgagtaacgttccactttcttcatggccggtgatcctccgtttccactgaatcaaaaccatgaataacagaaaacgtttcacagttgaactctcaggctacgcaatttagcaagcttttcaaaattaaagagatgataattattaatgaaaatatatgtgaaagaaactacattggtggactgattctagcaaagaaccggtgactggttccggaaaaagacggctgaaatgtttgataatcatgagttgaaatggaacgagcggtgactgagacgagctcgaacttcgcaactccatttttaagctgctcaaggatagtctctattagaagaaaagaggaattaaattcagaaattctgtttggaaacagataaaattagtttcatatatatatatatgtagagagattttctgtagtgaaagtgttttgggtgtttaccgtttgaaggtttttccgccatggatggatagatagagagagagagagaggagaatatcgacggtgaaactacgacgtggataatcgagaatgtgaaggttgggttgttaccgtccaaatctatttcttggcccattataggcccactcgtaaaaaaagtcatgtgaaacttaacgggtttttacatcagaaatttccaatttttttacctttttttttattgtggagtagatttttttaaaaaaaatattgtgtaaattttatactgtatattgtgttaagttttcattgttgatctacgcttattttttaattgttctattattgttttaattattctgttttgttattttacggttgttttataaaaaaaataacatttttgtaaaaaaatgtatgtaacagtaaaattataaatttttacttaaaatatgatttttttttaaaaaaaaaattatgggataaattaaaaaaaaaatataaatggaaaaaaagaaaaaggattatttcacaaaaatataaaaacaacaaaaaaattacaaaaatacggtttcacagaattttaaacattttttacgattttttt

SEQ ID NO: 163642 - DNA, 2021 bp, Cannabis sativa
atatatatatatatatattagcctgatatatagctagctataagagagtaattaataataataaaaaaaattataatataaatatatattctaacatattgaggtttcttacaataataagtacatttaataaaattcatcataaattactaatgtttgtatctaattaataatcaaagggcttagtaaaaaatatacttttatttagttttatataatagctagtgctatatatggtttttactattattattaattatatatataattgagaaatgttaaaataaatattggtgcctacaacggtttaaattattaatttgtgttgttgtagttaaatatcaagttttatataatttaatataataatttttataggatatcgctaattaattgcaagatacatctttaaatgatcaatacaaaaaaaactacatttaatgacaaaattttaataacaatataatttttttattgtgactattatgacttttagtcactattactaagcactaggtactaatatctaatggtaatacttgtaataaaatactagtcacgactcacaagaatataattacgatttataaatatatttttatgtacaaattatataataaaaagattaatatttgataatacagattgatactgttataatatttttgtcacaagaaatttagctacgattaaatattattttttataattacaaataatttttattgcttcctcaaaaaaatttaaaaattaattttattgctactatatttttgtcaaaaagtaatatttaataataaaaatttgtattgttacgaaaaaataattaattaatgtgttaattttgactcaaaggtggttgcgcgacgtcggtttaattggaccaataccagatgaagtcgcttactttactcatctgaaaactctgtaatgaaactctcctttatcaatattatatccttttgatagattctagaggctagtatttagtaagaaagaaacaaaattccaagtttatattaatatacggtgcgttttagttataatttttttacttaattttttaattttttaaataaaaaaataaaaaatattttttaaaaatatattctataaaactgtttttatattttcatttaaaatttttgaaaaaaaaatcacttaaatgttttttaaatagttttttttaataaatattttttggactccaacttcaatttagactttgggatccagattttggctccggctctgatttccaaactcaaaccacgggcgagaaacttggatcagacttaaataaaatcaaaaaataaaaaataaaagtaaaaattatataatacacttttattctctgtttttaaaatttataaataaaattagttagagaacacatttttatttcttaaaaacacaacttttaattttatttgtattatttaaaaattaaaaaataaataaaaatattactaaatattactataatatacacatattatataaatatttgaaattttttatggttttcatatctagatatagttaattatcatagagaacactctatcgtaggtactttattagaagttttctaattataagtttttagttaattgcttaaaatcacatgttgcaatatttttttttttaaattcttttcatgacggtatctgtcatagttacaatatcattcctgtatatttttgagaaatttcgaataatttatagtaccgaaaatagagttcctgatatttcaatttgctacgcgtatttaaaaaactttaaatgtatttttggcactgaaaattatttgaaatttttcaaaaatgtacagaaataatgttgtaagcataacaaacaccaccatgaaaaaaaaaattaaaaaaaaaaatattctagtacatgttttaggtacggagattaatcgtaataagagatgggatattgcggctaaaccacctgaactttacgatttgtaacacttaaccataaaaacagaaattttagcggcataactacct

SEQ ID NO: 163643 - DNA, 712 bp, Cannabis sativa
taacttctataaaagcccagaaagaaaaaccaactttcactttcaccccactgagtcatttcatcatacatattacaagcagaatggaaaagtcaccaacaaaatcaatccagtaaataattttatttatgtatacgctcacaaaataaaatctcaaatacccagattaaaaaatacaaataaaatgaatggaacggaatatacatacgaaatgataaggttcagttcaacctcaaaccaaagagttagaaacttgaaactccatagagcatatagcaggagctgcgtacctgtgtggcgttactgataatgaattgaagttgtggtagagacgaagtagaagcaactctttcttcagactccggtcaagtcaggtgctcggttgaacactgtcacactgggggttcaaaataacagaagagaagagagaagtattttcaaattaaattactttttataattttgatttaattcctaaaaagattttttgaaacaaaagatgggatgggaagcttgaattgaatttgaatgtgtggctggctggtcgtcttctccaaactgccgcaccgtttatcagccagaagagaagagcggtgagtgagttcacttccaaaattgcaatgggccaaaactcttttaacccaagtagagcctaacatttacgggtaagttgaaaaatgcctttttattcatcaattaatcaaatttacct

SEQ ID NO: 163644 - DNA, 1384 bp, Cannabis sativa
gaagaataacaccttcttgtactccccacaaatcgacgatgctgacaacgtcaccatcaccattccctatataccatcatttttttaataaattaatataattcgttacacactctcacattcttatctcaaattctaaataaaaaaaattagcaattttcatcctcaaattttaatatatactaaattattttttaaaaatttttttaagcgttaaaaatttttctgaactattaatattattagatttaaggactaaaagttcaaaaggtataatttaatacatatcaaagtttaagagacatgatttagtatattttaaagtctgtgagcataatttaatacctaaacaaaaacagtaaaattgaataaaattaaacaaaaatctttaaatctaactatcttaattgatgagaaatttttaacgccaaaaaagttaaaaggatgaaaattgctaattaccctccaataactatccgacaagagccaaaaagtaaaaaaaaaagaaaaatgtaactcattttaccaatccaaaaaataaaacaaaaagaaaactccattcatcttacctccaattgtaacgtaattaaatacatattttcaatttaaacgaaaaggataaatatggtgaaaattaagtaccgttaaataaatgatggaggagaaaagtatggtgtggaatcggccgaggaatgagtcggccaataaggcgccgaggattgggaaaagagatgagacacccacccaaaagtttacgtttttggccgcagtggccattggttgacggagaatgttagttaggtacataatcaggttcccggcaagaccatagaaggcaaaccggtcagccacttcaacaactgatataattaattaagaagatgatgggtaattaattattaatttgtattataaatagaataattaattaaagattatatatatatatggactacttacagatgatgaagagtgccgcattccagccacctttggagggttttgtttgtgtagttgaaagtttgttgttgttggtgttgtcttgatcatcatattggccattattgtctggtttcattggagttacagaggaactgtccatgaaattgatgatgatgatgatgacgatgacgatgatggagtgttgtggtagtgttttggccaatggggttgtccttttataggccagaagtatagaaccttttttattagcctacactatatttataaccgctattaattaatgagataatatatataaaagttagggtgattatacaatacaccctttaaaagagatttatgggtgtacttttaacttgttttggcatttagaaaaaaaatttagtctaattttttttttttcatatttatgtaagttata

SEQ ID NO: 163645 - DNA, 1804 bp, Cannabis sativa
atagctttttccacgtaaataatctcttaacattgttgttaatatactttcatccattagctcaaatcctttaggaatatattcttctctcgactcacatagtttcttcattaacttttgtagtagttctaacttctcgtatgattgagacacttcaatccaagcatgacaatcaaaactttctctcgtatgaacataaacctgatgagctagagtagtcttgccaagtccccccatccctaccaaggagattacggtgcgcctatgggatccactttccaccttttctgttaattcatctttggaagaatcaattcccacaatatcgcattccttgaggaaacaagaactttttcgaggatcataccatgtacttgttcgagaagaatatgtagattcttcttgtcttgtagaactaaagccatatgatgcactggtttgatttatatctcgaatagcttgtttaatgtcttttattttggagcctatatcatgtcgtcgttttagttttaccaccaaacaagcacttctacggacaaaccctataaatcttggactatgaggatgattttgttgcaccatgatatgcgtgtattcatcaataatatcttccactcgaaatgcagcatttcgaagattttctacccacactttaacaccgtggctagtgctgctgttttgatctatttcaaccctcgcatctgcatccttgagaaaagcaaaaagaaagtccatatcacactttattccttcaatttccttgtgaatacctctcaacaagtacgcttcttcagacagtaatgggatcaacttatctataaccaagcccacagcaatctctgccattttgataataagtctccctttttgcaatataaatatacgcgttagtatacttttgtattagtatatataaaattcaaaatgcaatattaatacacattttttaagattgatgaatcaaacatttgtttttagttgtttaatgataaatgttagaaatctgcacctccctaaacacctcaaatggacaattaataagtacaagaatagtggtaattttcaaaatctgttatgcgtccacaacaagaaattggtattatattcaaaacacactgaatccagccctacaacagtgagcccaacaacaaagcaagacaaaaacaatctcttcactcaaagaagcctaaggttcggcccacacacaagagatcagcccaaatacaactatcgaaccttactacaaacccttgtataaaaggctaaccaaggcaaactctcaaagcctaatctccttctttagtcgttcatctcttttctctctcaaaattcaaaccgaacttagatagggttttaagctttcttctcctctctttcctcttacttccgttagggttagggttaggatatattagagttcttcaagctttcttctattctccttctctttcttgctgccgaaaacaaaaatttttttggtgaaccaaattgtatattcattactccaatatcgattttgtacaatctataagaatcttcaaatagaaggcctgaatattatctctacactttaatattttcaatagctgaaaccaatctataccattttgagtgactttctttggcattacaattattcttaactacccatttcagcctagcatcatatcagatggattcaccctattcgaattccacaatagatcattccactacaagaaatatcatttttaccagtacaattcacaaactgcgctagcaaaaaggtcaaattttaccagcacacatttgcagtggctaaaat

SEQ ID NO: 163646 - DNA, 2406 bp, Cannabis sativa
gttgacaacaaacaataataggcaatgactcacactaagcaaggtgacaagtgttgtatatatttggatataagcagagtatatccttctattgtaccatccaaatcaagtaagagccaaattgactagagttagatccttcaacggctatgatccagatagatctcaaatctcataataatccaagtaaaccaagcatgcagaacaagtgccatttatcgacaagaggtactcaatgagtaagaatcttctgagatattttccttaaatacctccacaattatagctcatttagaatccctattttcattgaattaatctgattgatagagaaatatataggattctgtattcaaatctccctaatttatctcatgttaattcgtggtaaatgtaattgtacttccctataaatagtgaggtcatatcactgtttaggaattattttttcgcattctaaaagatcaagcacttgcaaaaataatcgtacactttctaagaattgttaagaaactcacatggacagaccttgtgatattgataaatcctcatagtaatacaacaaaaaggagaataggttattaccgttataaggggtcaaatctctataaatattgtgtgtcgttcgtgtattgttcttattttttattatttactctatagttattatcgctttaaaatctcaatgttattgactaaaagcaagatcaacattttagtactttcattgagagcgtaagatattatctagcatgacctacgatcttcaatccatttttgaatcggcaattgtggttctgataaggatattctcatcaactgagccacgtgatcctagcaacaaatcctaatgttcaagcacccattgattcaagaatagacaaccctaatgccaggctgcctcctttgggcaacccatccatgaggacaagaactggtggttcagtccctgcgggaactaatactagaacgaccagaatcacaacccctctgatcgaaatcaaacttagtgttcaagaagttgggataaccgacactccgtacactggagaaactggatctggcactagtcaaccatctaaacgggagccctaagtcgatctaggggaaaatctcgaatcggaaaacttgcaaggtgcagtcgaacaagtcaaaatgcattccaacacacttcatcataaccaagagaaaacacgtaccattgtgaaccatgtgtttgaacaaaaacaacacaagttataggagtggataggtcatcaaactcagtccatgtgtccaacatgaagagataaatcaccgctctaaggaagctaccggcctgatcaaacgattcacccaacaaactaggggcaagtaatagaaaaccatccacccagacgagatgcacataagggaaagaatccctacattttgtgtgaagacaagagtacgggtcagaggaacatccaaccaactatgtgtagacgcctaggcgggatggaccttcccactctaggccctcgggatcgaatagttggtcgcctggtagatgatcaatttttttcgggtcattaccttgataggaatgatcagcccaacttccctcctcaacctgaaggaaggagagacgttgtactgcccctaccagatggaaggtaatttggtgtatatagcaaggatggaagggtccaagtttaccatcaatcctagtattctaatgcccaactttattaggcacgttacagtgattttctaactattgtgccccctttgctaattaaagagtttttctgtcaaatttaaactttttaattaaactttaaactttaacaaatacatgactttacataacatctgagatcctatttataagtttaaaatagtattcaaaatacattttacaaatgtgtcactctgcaactacaaaatgaaggcccatgttgtcttgagaccgaacactccatgtctaaccatcctgatatgtacaatcatcctcaagctctagactcactgatgctcagccttcaccttttcttttcgtacatgtggacacatatttgtaagtcaactcaataagaaaagcataaaatatataacataaaactgacttgcaaataggtgccaatacatctacctacaaggcttaacaactgatcaagaacgttcttaatggaagtacgaactctgtaccacatgcactaagtactcatcttgtactagtgttggtaagtacaaatgagtgttgtactacatacactaagtactcatctcgtattagtggttgtaatgttgtttcataccccttaacattatctactgaacaaatgcactccgtaccgcaactgtactagtgttggtggtataaaatcccataatacaacatgcatataacatacatacacatatacatatacacattttatacta

SEQ ID NO: 163647 - DNA, 2449 bp, Cannabis sativa
  modified_base (2001)..(2003): a, c, t, g, unknown or other
aattaacactgtcacattacgtctttgctagggtttctcgtgatctttagtttttgagctagggccatggcgggtcgagggagaccaagaaagggagtgaagaaggatgcgaaaggaagtgctaataatgcaaagctcgtgaagcgaggagggctgacatcggaggatcatattctcaaaactaagtcggtagcagatttaatggggataactacaattgatttttcagaatcgggggactctaagaaggacaaggaaaggagtgaagggggaacctctattgaggatatgctcgaggagatgtcgccttcagttgccccaagatcaattcttgaaacacttatacctctagagaaaagggatgatgcgaatactataacatcctggataggagtcatcaaagctttagaggagagaatgtctagagttaaaatcaatgatatccctacccctatttcgcatatacctgagattgctggtgaaatgtaaaaggaaaaatagagaacagaattaagatttcctttgaggatatagcgaatgaggtttctttaaggaactcttcattggtgtgttatgtttttagagcaaatcccccaattcatgtcatgaaaggcttcttccatagaatttgaaaagataaaggtattggcaaagtgtccctgttcacacatggagtttttgttgttagatttcacttagtggtgaatagggataatataattgtaggaggttatgtgttttttaacaggaaacccatcattatgaagccttggaatgctctggggaaatttcataaggagaatttgaccaaaataccaatttggattcaagtctttaatcttgatatgaagaattggggtggtccatctatgaggaaaattattggacaaattggaagtattctgaaacaagatcaagaaacgaggaatagcgatagattggaatatgcttggatcatgattgaaatcaatatagatcaaggtttgtcaaatcagatcacttttgaaaatgagataggtgaagtgatttgtttgcctattcattatgattggaaaccaattttatgcaggcaatgtcaaaggatggggcattctcaagatcagtgtaagagagatactttaaggctaaaatggattcctaagaaggtagagaccaaaccttgtaatgacaaggtgcatgagaaaactcaaattaatactgggaaaaaaggagcagaatcaagaggttgttaagattatttaggccgagggacaagagaatgttaaagaagtccatggagtttggatgaagaaaactagaaaagaaagtttaataaataaaacagagacgattttgactatggataatgcatttgaggtcctaaatgaggaggaaacacaagttgcacaagttctttgtgatttggttcattttggaaaaggaggaggagcacctcctaatcctaatggatagaattctctgtttgatgtttgagggataaatagttcctggaaacatcatgaggtgcttaggcttattcatgataagaacataggaattattcgtctcttggagactaaggttaaagctcacaaaatgggagcttgatatcttagtttatttcgagggtggtgtttctcttctaattcttcctatcatcccaacggaaggattgtcattgcttggaaccctattgcttttgatttgaatattgtctcttgttctagtcagtgtattcatactagtgtaattcaaagaatatcatggtttcatatttcctatcttcctggtaggcctgcagctttaggtggcatgatctcttctttcttctactttgttaagggattatgcaagtaggatgttattgttggaatatattttaccaagacctagattttcaaacaagtatgtttttaacatcctaaatataaacttctaaaatgatgaaaattaaacacataaaaggtatgagaaaccttacattagttgcagcggaattaaatgactccttctgctcagatnnntaacccttgtttctttctgtcgcagagtaaaatcaagatctgagctcgacactccttcacttgtttggattcttcacaatcttacacactattattgaggactaacttgatatgggtgggcatgcaatcaatcactaaagtatgaattttaatgttgaagaacactataggatttgaattagaagagagaaaagaagaagaagaagtctcaaagttgtctcagaagaagaaaattaggtcaagagtcattagttagattatgagaccattctttttttatactaattcatagggttaggattgaattatttggaataaaaataataaaataatagcaaaaagaggaccctagtggccaaacatgagagggcccatcactagttagattttttccattttttcaataatttatctatttttcacaaataccactttttgcaatttta

SEQ ID NO: 163648 - DNA, 2393 bp, Cannabis sativa
ttattaaaaatttcatggtgttattataggatacttgtgtacgaatatgtagacaataagaatttgcagcattggcttcatcaatgccctcaacaaatcagacttagttggagcatgaggatgaacataatacaaggaatagcaaaggggtttgattcaaaaacccttaatttaatccttgaatatatattaagacataaaattaagagtggtgtatgcattaattgtttatgcagattggcttaccttcatgagggcattgaacaaaaaatcctccacagaagcttaaaaccaagtaacatcatgcttgatcaccaattcaatccaaagattactgatttttgcattgcaaacttctttgggccccggtggggatatacagtcatggaatcattagggtgatataccaaacactacgtatatatataacattatatatatgcatacataccattcatttttctaactatgcaatatttttgcacattatatatattatatttatattcagttacttagctccggaatttgatgatgatgatgatgataatgaatcgtctcctataacattcaatgaaaaacatgatgtttatagctttggaattcttgtcatggaaatcataacagggagagccccaatagatcaccaccatgaatctcaagtatgttattatatactttcatctggggcatataaaatatgtgtatatatatatatatattatttgaaaatgttataatttattgttttgacaattaatttgtagccatatctagtggagtggctaaaatcaatggttgcaacggaaagaagtggtgatgtgttagacccaacattggtagagctgccttgttcaatagaactcaaaagaattctattgatagctcttcgttgtgttgatgttgatgaggaacacaggcctaatatgggagatgttattcatatgcttcagccacgtgacttgttacttcaacttaatcgttaatgaagacaatattgatcctcatcttatgatatataagagctaattttaattaactataaatatgtcctttttgatttattattattgttatttttcattattattgagaaatgttggtataaagtgagtgatttgttatgtgtagaagaggaaatcaatgaaaaacttatcgtagaagatgacctttttacaactaattaaagcttcccatctttgatagtgtaatgccctttatttatactgagagtttgttaaagaacaactaattcaatcaagaaaggaattaacgaaatataactatctaacgaatacaaattaattactaattagttaagtaacagccgtacctattaaatagttggttaacatctctcttaaacaaaaaggtgtggaagtcatcttgagtttggacttgagatataaaaatctgtgaatagaaagggactttgttacagcaacaacttgatcaacagcagaaacatcacggaagactttggccaaaatgtgatcgcgaatgaaatgcaaatcaatttcgatatgtttggatcttgcatggaatacagggtttacattaagggagatgcagtgttgaaaaatgatctatagttctgacagaagaaaaactaaccatttcatctttgccacaacatttgttaaggcactgaattcactttcagtactcaaccgagccacaacatgttgtttcttagcgaaccaagaaataaaatttccttcaaggaacatagcatatccaccattggatcttctgccatcaacacaagaagcccaatatgcatgcatcagagtatcctaaactcaacgtagatgttggagtgagatgtaacccatgagaaatagtcccattgagataccttaattagtgtgtgaaagcctcctaatgagtagaaataggtgttggaaagcatatttaactagaatcttacttttactaaacaagtatattgattattactaatctaacatcctaaacatagaaccttaaaataataacccataaaagtttaagaaaaccttaccgtgattgcagtggaattaaatatctcctttcgttcagttctctaacacttgatcctttctgttgcaaagtattgccaagaactaaacctgagtcttctcctccttcgattatgttcatcacagtcttccacaaaggcctaagaatcaccttaaatatttagaacaattttgagagagttatttattatgaatttcgaaaaataaagagaagaagtgacattttttcttaattcttttctctttctttacataggcatttacaaaggattaggtttatatgagatggactaaaataaagacttgtactcatatctaactcatagggccacatatattatgggctttagagttagatttttgccactttat

SEQ ID NO: 163649 - DNA, 1186 bp, Cannabis sativa
agaagaagagattgttcacaccactactaccgttaatgcttgatttattagttaatggatctgtgatgatcttatttcttctccaatgagatatgtatatatatcgttttattaataaaacaaggtaacgtttatagactcttttttatttgtagagaatgatcggatctctgtttttagctgttattttctagaatcgaacatctgttattttgtaataatgttctgaatgaattttcaacaaaatttgtgggaagtgggaggagcattgagctgtgtcctgctgcttactataatctctgccataatactaattgatttatcttatcttcccctgattataatattaatcaatcttatatagtttttcttttttttaaaaaaaaaacaaactaatcataatcttacgtagatttattttatttagagacaatatgtagattttagtttaagaaaaggtattgattttttttttctttcaacgaaggtattgaatatcttaatttcactatgtcatatactgatttttttttttttaagaaaaaaaagttttttaatttttttattttttttacagaatacttgtaaattaatacacctttttcttagtatttgcatttttagaagtaattgtattaaatctagtaagtttttttccttttcttttcttttccatttattgtatatatatgagcattataacttgtaaatattataaaataaaaaaataacagatctgtaaataacagaagtgaaaattactttacaaaggaaataacagaagtgtaatgtatgccaaagacaatagaaaattctaaaaaacaaacaacacattgatgtaattttagtcattcatatgttagactaagatcacataattttctttaattactttgttttaaattaattacaaatcctttcaaaaaaattaatatattttaaaatataagctcttttttttttccatcacataaacgtaacttattaatgttattatagttctcttccatattatttttaggaatttttattttaaagtgttgtaataataagtacctctaaatattattcaaataatattttattattatttgacatatattaaaaaaaattttacatcaaaaatccaatttactcaatttattacaaaaaaacccctacacgcttacatcatcatttttacctt

SEQ ID NO: 163650 - DNA, 1586 bp, Cannabis sativa
ttcatataactaatgtttgtatatatattcaatgttacactaactttgacttcaagtagcttaaaggtgttaaatagtattatcctaatttctgcccacatgacgtgacgttttcacataggcaagattgaggctatgtggagtacaacctatcaatagatgaagaaactcaccatgcacaacttatcaattgacaaggggtccaaattaatacccgggcagaatgaagttagaagaaaatggctaaccatgagggtctagctggaccacaccatggtcgtccaagggacaccgtgtgacaaccatccccaagcaaagggtgtgctgaccagcaggtaaagggtgtcaaaaagaagcccaatcaattgatacttctgtagccctcatcctggacgaatcacaacttgttctcagctgcaaaaccactccaatagcccatgaaagtacagtttcaaccccaaaatatctacctattttttagggatattagttagttatttaaatatatgattaaagagtaatatctcctattttttagggatattaacctatttgaatttagatcttttgtaagctctaaactatataaagagcattaggtcaagtggaagaggacctgagttctaagtcccgaaagccctagagcaccattacttttcctctctcacatgccaccttcaaggtaatagacattaagtctgtttctcatctcaatcattctaaccattgtaacattcatagagagccatactagaaatgacaaggtaaaagtacgtaatctatgtggtgttatctctcaaatcaatacaattaaaaaggagagtgggtcattacccactatataaggaggccaaacctctataaatcgttgtgtcaatttctttatttgcgtatgtggtgattattaatcataaataagtctctgatgttagttgaccaaatttgagatcaatattttggtgctttcattgagagctgtatttatcatcttgatcaatcaacatggttgtaactagaagaaccactaccttcacttcctcgggtcttccttaagatcctatgacaactattcccaactttcaagtttttcccaccactacaagcatcactgatcaatcacatattgtcaatctagaaaatcctataaatctagctaataccattaatctcgttgatcatattgaccaggttaatgatagcgatccacctttgtcgcccagagcagattcgctaatagcacctcaaatagaaggtcatgtcagcacgaaacaacctctacagagcagaattaggactggtccctagtattatgcaggaaaaatagggtcaagaattggtgaaccagctatttgtgaggctcatgtgtacctgggagaggacatcgagctgcacaggctcagagaagccataggccaggtcacccaaactgaaaaaccactcactgttggttgcctagttacctacctgggacccttccttctcggggcatcacccacaacattggccttcctaggatggtaaaggatttcacagtcataatccttaaccaactccaaccaacgcctctatctcatattcaaatgttt

SEQ ID NO: 163651 - DNA, 4257 bp, Cannabis sativa
taaaataaatttccaacacctatttatactccaatttcaatctttggagtttgaaataaacgacctagattattcctcccaaaaagcatctttccgtccaacagatggggagctgaaaagactgcatttaatgcatagtctaaacgtttaatattcattattacacgtctcgtgtcttgtacgcattaaagagaggtcacctcaattgttctgtcatcattgcaactcctcccaagaaacgcgcctcctacacgcgcgtgtcgtcagcaaatgcatcaaagtgtaatcttcagatgtaggctcaaatctcgagacaaactactataatttctgtgattttttatccatcagtacatacttgcactatcttctttgagtgctcgatatttgaagagagtattcacatatttatccctcaatgttcaaacgtactttgaatccttgagtattctggtgttgtttaaatataaaaaaagaacaaacatagtttgactgtatgaaataatcagtaagttttaattacaagacttgagagtttacataagatgagatactgactcgagatttagaaaaagcaactccttacatggataaaactgatcacataattcctcacaatgcattctacaaggccgattataggacataaaaaggaactccaagtgagagttaggcaagtgtcttacaacaaatggagtggaaaatcctaacaaggacagtcacttcatatgaacgtggcaatggaagttacaaccatgcaaacactagaatatgaatatggggatgttaccccttattcagaatcaaaaagtaataaagaagtctagtgaaagaaagcttttcacgataatatcttacttctgggtttgttccaccttggctcgaatcttttgctccaacacagatatctctgtctcgagactgaacattctattaagtgcatgcatattctcaagagtttctgacaaagtccggctatcactaccatcacatctcaagtgttgcattggaccatgtagtagcttgttcatgatacctcggctaagatcatccacagcttttcttgttttcttggagatgtcgtctcccatctttgataagcatttttctagctcagcagcccttattctttcagcataagctctcagtttcttgatggtcggaacagtctccagtgagtccctccatgcttcaaattgttttgattcatcagcaataattgcctgagcctccattgctttgcggagacgatcttctttattagcagctacaacctctttcagatcatcaacattgtaaatccttgcagtctcaacctccccaacacatgaaccaacattccgagggacagaaatatcaacgaagagcctataacccccagtttcttgatcaacagcaggaagatccttcacatgctctttcaaaaataatggagtctctgatgccgtgctagtaaacacaacatctgcttcagcagcacaagttagcatctcagtaaggggtttgtagatgatctctacaccgttaatctcctcacggatggccgcaactctttcttcggatctattcacaaccatcatttttgtacaaccttttgcaaccaagtgtttgatcacaagctttcccatctttccagctccaatcaccaacatacgagcagtagtgtgagatgattcaggaagcttcattaaggcaagttcaacagcagcagagctcacagaaactgcacctgcagcaatgttggtctcagttctaacccgctttcccacagtgattgcatgcttaaacagtccactaatgttcctaccaaagccaacaattccttgcccaactttgacaacttgtttaacctgtgcaaggatttgtccttctccaaggacaagagagtcgagacctgctgatacttcaaagagatgctgtgttgcatctttgttatacagtaaaaaccgatgcttgcaaatctccgaagcagggataccacttgtctaccaacataaagagaaaatattggttagataaaattcaaagaattgtcctgtcatttaactataaaatgcttttattctccagcctatcagtaataaattcctacagctacattaaacatataatggcaatgaagaaaaaaaaacaaatatagcttttgagggcacctttgacatccactctgtcacttcttttacaccacgatgctgagatagagctaccacatatatctccattctgttgcaggtactaagaacagcagcttcttctatatgatttaacccgcaaagctcccctatggctcgaggccattctgcttctggaattgcaagcttttctcggatttcaacaggtgtagtgtgaacactgagtccaatcaccacaatactgctcctctccttggtataccctgataaaaacatacagtagtttcacaccaacagttaaccacaaaaaaaaagggtacaataaaatctcgtgagcagaagttgtacaataacccctaacgtgacatttcagaaaagctctctcggcaagaatcattacatgacaaatatttcataaatgatagaatttggatgcttaaagaaaatcatatgcagctaaacatagaatcaaatcccaaattgcatattagtgaacagggcttgtctcctatctacaaatatatgtcattacattatgtaatttaagacaattatcacaataaacatcgaattgaaatgtgaggagatcatatattaataacaaagcattcacagacccatgttttaaaggacaaaagactcagcaacaagtaacaatattcaaacaacatttgcacaaacacagtaagcacagtttaatttattaactatgaattttcaaattgaatacaatcccaaaacaattatgagaaacatactatcagcagcagaggtcttgagctgttcaagcgcggagatattagaaccacccggctcattagtctgaaccgaagtctcagaagcagagacatcgcacctaacgacccctctctgaatcagggctcttctggcacgaattggtttgcaaaaagatgaaagcggagaagaagagggagcaaccctggaggtggacgtcgtggtattagccgaagaggacttgaacagtaaagcctccaactttgcaccggcgaaacttgtagagacagccattgttggttgaaaacggagatgagaacctaaacctgaattttcagaatttgggaactcaggagttggtgaagaatccaaataaaataagattttttttttcaataggcaatgaaaggcaggcaatgggtatgggtttgtgttgggcttaaagatgtttggaagagatggagttgatggactttgctgatttcagcgtcttctgattggccaatccattgcacgttttatccacactctcattctctctctctcccatcttttcttggcaccacattatatttctaaatcaacaaagatttctttttgtctttcaaaaatgttttgttggttatttacctaccatgcaaattatttaattttttttaagtaaataaaataaaacaaattgaaattatttttgggtttacaaataatgtattataacattaatgaaccttaaatctatttataatttgtgaatcaacacaaccaaccaaaataatggaaaaaatatatattgaacttgtaaaagttgtaaattttaattattttatttttactttgtgaatagaatcacacatgattaataaagcagcaaattataatcggcggtggaatctcttcgaaccaggataacttatcgtctgaccgaaaggcatgttttgccaaaccatgagctgcagaattcaaattgcgagccacatgagacaaaactgcccccaaaaatttagacaataaaactataacgtcttcaagcagcaaacaccatcccattattaaaagttgttgccagagctaaaaaaattgaaaaaaatatcgcgacaccaaactaaaaaaacacagttatattagaataacaatcttcaaaataaaaattaaaaaacaaaattagaattaacacacaacccatatcactagttcaacattacaaaaaactaaaaaacgaacaaaatttctaagtataactagccaaaggtattaccctttggctattaacaacatactagcactctaatttaaaactgctgaaaattaatatcaaacatattatatttaaaattaaatttattggtaaattctctttaagtgtagatagggctggcaaaacgggttagac

SEQ ID NO: 163652 - DNA, 1077 bp, Cannabis sativa
cataagagatagtttttggtggttcatccgaaatcacaatgtctactagaacccgagcatatttcaccatagttctttcttgtgtcaccttgtcaaccataattggattaccaattgtactaaccaaggcacttagattattcttttcccaatattgtagccccagcccattcaatctaatccaaacagggactgaattcaccatcttcatcgattcaatttctgtggtccaaggccaaagtaccacatgtttcctatcaaaatgtattaccccagcttccaggatgagatcccgagtcatttcatctcgaaagtttactaaggtgcatcgattattagttagttgttataagtgaaactgcaagagttgctaaaatgattgctcggttttattattatttctatttacacaagattattgaaagtgtttttgtgggtgttgctaaaatggttgtagtgttcaattctttgttatttttttacatagtgttgttggaaatattgctatcaaagttattatatttttttctttgtttctttgttctttgtacatgttgttgttgtaggtgttgcttaaaaggttattttatatttgattatttgttatttttactgtcataatgcgaattttttacttaaaaattccagatcaatctcctataaaattgacacgtggatccaatcctcaagggatggatgattagagcacgaaaatattatttgttaatgctaaatactaaaaaaaaaaaaatcaaagttttaattaatattctccttggttttataagatttatttatatagttgagaatacttatttttaacttaattgttattattttgtaggatttaaatgcattttcggacgaaggaaaatgatgaaaggactaaatcataaaagaaatttggagagtggtagttttgaaagaaaatcaaagctcaaaatcaaagatggccccagattatccattacattaggattatagttgagaaatttacatggtatactaatttttgctatttttttacaaaaatactgccacacagtattttttacttttttattgtatttttttata

SEQ ID NO: 163653 - DNA, 1869 bp, Cannabis sativa
ttgtagtaattgacgctttaagttgcctcttaatatttttctaaaataaagtataattataaatgtgagattttaatttgaatttcattttaaataatgtgattggttaaaggtattatcatactattatataaaataccttataatattaatattgctataatttaatatagaatctctcctattttaatttgaaatagccatatgtaccaaaatgttacataacttaaaaaattgagtcaatcacatcactcacatcactgtgaaattggtgttggaagtatgtgcttttttgcactttaattggaaatatgtcacatggggatcatattaatacattattggtctcctcttctaacatttttgtagtgtttacatgcattttggaaacattatataatgactatatatcttagtgaaaaaggcaactattatatccaataataattttaggagatgaaattcaaaaatgttggaggagaggagaggagaggagttagtgatatttttgtactatgtactatgccagctctaagggatctcaatccctccacatatatattttagttacctacctaatactatatatccacagccacatatcatatatccctaattattattattatcaaaactcatcacatgaatttttcagatgcctaagtactcatagaatctcatatttaaagctctaaagaaaaaatattaatgtgtaaattttgagtgcttgcttatagtaaattttaataacatggttacatattgtagaccacctatcagatcaacaacattttattttcttttttatgattcttatattcagcatgaaccacataagcctcatcaatttaccaaataaattggtaagtgatcggacatcccaccaagcaaaatcagtagtttcttggtcacaactgactaaaattaaagttttatgagtgttttcgtagggcagagtctctttaaataatataattttttcatgtaactgattcaaatatgaatttcctcgtttaggataatatttttgcactgatttatagaaaataataaaatcatacacacataaattcaaaaccagactgattatactcttcgagcactcatccttaaactgattactggtacaaagttttcaaatttggtacatttcaaagcttttaactttgggttgtactcaattagtacatgtacaacttaattaagttttcaatattattaatgctataatcttaatttattcaaaaattatccacagccacataatacatatggctaataaaaactctctttaaaattgtaaaacctaactcaatctctaatgtgtattattctaaattttagaaacatgtgatgtgtcacataattttttattttttttaatttatttcacttattaatatttttatttataattttcaatacatagaagttatagtggagtactcgaatccccctctacataaagtcaaaatgatataattatattttatttaatgatttttcctgataaaataaaaaagtcaaccattaacctgattagattaattaaactaactactcaaagccaatatattcaataatgagcagagactaatcaaaacggtgtcgtggtgtagttggttatcacgtcagtctaacacactgaaggtctccagttcgaacctgggcgacgccaatacttgactaatttttatatatattaatttctgatttaaatgttgttaataaataaatacttactatatagatatattttttttttcagaaaaataagcagtatatataagtgtgctctaacttatatatacagcaataatactaatctccagagaagatttacctgtaaaaattgatgaagagtatact

SEQ ID NO: 163654 - DNA, 2058 bp, Cannabis sativa
  modified_base (901)..(905): a, c, t, g, unknown or other
  modified_base (1031)..(1040): a, c, t, g, unknown or other
  modified_base (1772)..(1773): a, c, t, g, unknown or other
gcttacgttaatggcttctctgaaaaggtaattaggttaatcaagtacttataactatttctattattgataaaattaagagtgtaggaacttattttattttattttgtttatttgtttttatattgattttttttaaaaaaagaaaaaaaaaacaaatgtttgaaattaacatcttaaaattcttaaaattcttttgaaaacaaaaaatgaagttcttgaaattgtgtttttcattctaattctaaaatataaacacaaccaaaaaataaactaagcgtacgtgttgcaaccatttttttgtttggaatgaataacttcattattaaactatcaaaatatcatataccttaaatgtatatatatagtcagcttcttaatgctaagtggaggtgttttcctgtttagagaaattatatttcagtttttatcattatttataaaattaatttatatttaataaattaaaattataaaatatcatcaaaataatcaaatacgtactaaaatataaggagtaacaataataaaaagattctctattttaatcttttagctattgaatcttaaaaaaaaataaaagcgtcgcatcattagacatgctctaactaccaaactacaaagatggaagttgcccaagtaattaattatagaaagaaggtatgtgtcagctataattaattgggtggcaataactcccatttactccacacctacattttccaaatcatgtgttaaataaggtagctattaggcaccggtgcctagcaccttctcgatatattgacacataggaaggtgatagacaccactagtgtcctttagcatttctccttaatattatatggggtttttttatttttacattacaaaacagttctttttttttatatatattttnnnnnaattctacatagaaatctctattgcaactagcgctacaatctatattgcaaccaaaaaatcatctagaaatctatattgcaactaacgctgcaaccggccactttaaaaactcaaaccgtaaattnnnnnnnnnnaaattaaaaaaatagtatatgagataatttcccatattattttataactgattagtagttttaaatattacctattaaattaatttgtgtgaaactcaatattaaaatatatcaataataatatatgttatttttgaaaacttctacacctaaaaatactccttaatatttctcaacaaagaaatataaaaactacgtccatgtaaaaagatatgacaaagttcaacatagtacttctcaccatatatattaaataacaattattaataaatttgtgggttttttttattattttgtagtataattatctaataatttttttatataaatttatttaatttgtgggatttttttgttattattttacactataattatcctattgaattaatttttttaatgtaactttttttttactggaggctactggccccatataatatagtgtaagtcccttcccgtattacttgtgaattgtgataatagtgtatttggtattttttttttgttaataaaaatagaataattttcggtataaatacttaagtttaattctagttgtaaataaatatttaaatttgatttttgtcagtaataatacttaagttataattctagaacttttgtaggtacctaactgttgggtgtgttaagtaaattgccaattcctaattagtccaagtcattaaatttgtattttttaaaaataaataatttaaatataccaataannaaatgacacgtggataataacttaatatttaacggttaggtacctacaaagttccaaaaatataaattaagtattattaccgccaaaaattaaacttagagaaatttaagtatttatgccgcaaattactcgtaaaaataacatatatattatattatgataattacttgagtagtgcagatgtattaaaaataactttaattagagttattatttttaggagttttttcatttttacacttcagaacagtttttttttttttttttttgtttttttacagaatt

SEQ ID NO: 163655 - DNA, 1195 bp, Cannabis sativa
ttcatgtcttcattagaaattcagaatagaggaagatccttcaaattatattagattacttaacaggtataaaatggctccaacactagtaaccaaaattcatttacatgatatatgaaaaaatcacctcaactcatggaataaatcaaaaccaactgacaatccttactaataaaatcaaatagtaaccatatagtatattagcaaggatacaaaaattggcagctcacctttccaattagaacagattttgctttcttaaaacttgctctaagcttctcatattcaggtgcaagttttttacaatgcccacacctgccattccaagtacaattagcacaaataccacactaagatataatcataataaagcacacaacaaaccattccaaatgaaatgaaatcaacataaattattaaaaacactaaaaattgaaaatgtttatagtttacagtaaaacttcaagattgtagcaaatactataccttaagcgcccaattcaaaattattaaaatttagtgtattatctcaatgtcaaaaattatggaacaaagtacactagccttcctatatacaatatagtcatacacagaacacaaatataaaatgaaatttcattataagaaaagctgtaattatttataatgcaattagcattgctgaaattaaactttgaagtaaaggcattatatatatatttatatgttggggtattaccaaggggcactttaaggtgataaacatacttctaatttgtgattactcttaactattaatattttttcaaatcaaaatcgaaacacgtgatattttagtgcataattaaggattacatggtgtattttattaaatgtacaaaataaaagtgcactttagtttatcttcagtattatttatacatgtgggcaccgcatgtaagataatacaccaagtcttgtccatagtcaaagaccaagtggttattgtagaaaaaatacaaggatgaggaaaaaattttaaatgacaaacaaaaactatcatatatatagagagtttgtgaattgtctttctactcatttcactacctatatatgtatatgttgacctcgcttttagccaacgacagtgagtcctattttgtaagctacaattaatttataacgattgatatatagtaaagcaatataaaggcacaggaattttatagaggttcag

SEQ ID NO: 163656 - DNA, 2990 bp, Cannabis sativa
aaagaacaaatagaagtttaattaaaaacacgaccaaaataatggcttatttcttcgaatatctgagctttgtttatgtccacctctctttctgggacatagctattgcctttctggggctatttattttcacatgttttgttcagaaaatgaccaacaaaggtccaatgttatggcctgtcattgggataataccctctttagtcatcaacatcaacaacatctaccattggatcaccattgctttgatcaaagctaaaggcacttttccctataagggagtgtggatgggaagagcttatggaattgtcaccgttgatccatcaaagatcgaatacatactcaaaacaagaagcaaaaacttcccaaaaggcaagtattataaagaaaggtttcttgatttgcttggtgatggtatttttaatgcagatgacgagttatggcttcaccaaagaagagtcgctactatagagatgcattcgagtcgtttcgtgaaatactcacttaaggcaatgcaggatttggtacaaaacaaacttttgaaggtgattaaaggacataataatattattgaccttcaagaattgcttcttcgttttacctttgataatatatgtgctgctgctcttggagttgattcagggtgtttggctctagaattaccacaagtaccctttgccaaagcctttgaagaagctacagagtgtactctgttcagatttttggtaccatattttgtatggaagcctatgaagtttttgggacttggtttcgagaaaaggcttaaagaatcaaccaaattcgtccatgaatttgctgataagattgttatggatcgaaggaatgagctcgttgagcaaggaaacttggatggtcgttctgatctcttgtcaaggcttatgatcatggacaatatcatcaatactactaaacagaatgaacagagttttttctctaacaagcttttgagagacttttgtataagtttcatcttggccgggcgtgacacgagctcggtggggttggcttggttcttttggttactacataaaaacccgaaaatcgaaagcaaaatccttgtagaaatcaatgatattttgtcaaggcgcgagtccaaagaagaagagatagtttttacaatggaagaattgaagcaaatggtgtatcttcaagcagctttgacagagtccttaaggctataccctcctgtaccaattgatatcaaagaggttataaacgacgacgttttccctgatggaacagtgattaaaaagggtgctaaggttctttactccatattctcaatggctcgaatagagtggatatggggaaaagactgcatggagtttaagccagaaagatggatccaaaataatggtcagttggtgaacgagagccaattcaagtatgcagttttcaatggtggtccgaggttgtgtctaggaaaaacatttgcttacatgcagatgaaaatggtggccgctgctatactactgaggtaccaagttaaggttgtggaaggtcagaatgttgtcccaaaactcacaactactctttacatgagaaatggtttgttagtgagtttcaagcctaggttggccaactctgctgtgtgactcgttctgattcacactcctcaacttcgatctatatccatctatatatattgttatctcttataaatgttattgtggtattataataatcagcttgatggaccaaattaatacttgtttactatgttgagtagtatgaagcttctatagctagtgcatgtattcaaaccaattaagtttgtgattaacaaaaatgtttagtctatgagggaagattattatgtatatccatttggtttgaacaagtttaactttttgttggaccgtgtgatataaaccaagtcaccaaccaaactcttaagtcaacgcttttcacttgtatggttgaagaaatgcataagagcattttcaatggggttagtttattggagtggtcttgtaatatatgcattgtggtccaatttttaaaagtaattttatgtgaagtcttacacaatataaacaatggatatatgatatttttttttctttttctttgttttttttttcatttttttattaaaaaatttattttttacctaatgtgatatgcgtaactttttgagttgtgagtatttttttttttaaatgacaaattttatgtagatgaagaaaaaaataataaaaaaattaagattttaaaatgatatatgttgccctttattagagatgctctaaatggcattagtaatgtctatcttcatcacaagccgagaagggactaggaaggaacgggataggaccgatgaatgcatttcaacaaagggggagagtttgaatttttgggagttagagggagtcattttctctccttctcttctctccatcttaccaaataatagattccacctccaccttcaccttctactttcttctcccccaccactctccatctaggtattattagaaaaattaatcatcttaagatacaaaattgtctataatataaaacaaaataatatgtataataattagatatacgtacttgcttgatttatagtaattactacaatttgatagtacaatgctatcaactaagtcttcctctctagatctctaaattagaattaattttaatttctatctgattatcaaaagtatacaattgtgatgagccactatgtgaattagaaaggggacttagctatataatcttagttggactgagtctgtatcaaaagtttaaattaactaaaaaagtcaatacttctgtttcactaaaattttacacacacaatacccattaactattgattaccaagaatatgggctgacacattaaaaaattatctaattaactcaaattttaataaaaccaataaaatttaatgtaagtacaaataaaaaatataacacccatcttttccttcctttcaaatatattgtttttttttt

SEQ ID NO: 163657 - DNA, 2064 bp, Cannabis sativa
ttaaaatgttatattttcatatatcatttatctatcgtagtatttatttaagagagtttttcagttaattttttttgtatatgttgtagtttttaagaaaaagtttagtaaaataaaagttaaacaattgctgactatcatatatgaaaatacaatttattattgatattaaactattttaaattttctgaaacattttaagtctttttaaataattataacgtatatgattataaaaaaaataacaaaataattatttcgaatgctaggataaataataagtgtaacggttattttacagtgttctataagaattacatattaatatattatgtggttatcactttcaactaaggcaattttttttttcaactttctttactaaatcaatttagttactctaaggtcacgtatagtaaaatccaatcatccttaattgttagatttaaattcaattatggtggaagataatttggtggtagagaattgaagatgtatcaatgtgtaaataataatgaataattattctcataaaaaaaataatgaataattattaatatattattagctggttgataaatgaacaaaattcatatgtacctattgaaacaaaaggggccaaactcccatccctaattaaaaaacatatattaattttttttcagattaatatttattttagaaaaataaatgtcctctattttttttatttttttgagtagaatgtcctctgttttttaaatgcaaattaaaataaaaaaaaatgtcctttaattgacatttttgtgtaaaatgtaccaacaaaacacatgcataattaataaaaataaaattaaaaataaaataataaaggacacattcacgggggcacataagtactttagttaggcatgaacagtttttagtaaataattccaaaatatatatataaagaaaataataattcaatattatatttattttaattaataaaaaaaaaattaaaaatctgacattgatatgtcccaacaaaattataaacagtaacagtaaactctgcatcgtacgattttctttaatcagacggctcagagaagcagttgagaatttttaccaaaaggattttgccttctttgaaaaatttagcagaagatcttctctgcagtttcactcatattttatttatttatttatttattttaatttagctgaaataaaaataaaaagttaattaatatcaaaattattcaaaggaaataattaataatggacaagagtgatgtaagcttttacaaatagtcaaatagtaaattcaggctttcataatttatctctttgtcatttattaaaagggtttttttttcttgtcattatgactattaacttttcttttgagaaattctttataaccattaaatatttcttcacattttttctttattatacaatttattttttagcaattatgaatctatgatttttttttaaagataaataaaattaattagtaaatgggacatagttcattatatgcaggttttgcttattgagcataattaataaaaataggtaaactaagctatttacaattaagataaaaaatttaacaatatcatcaaatgacttataagtagccacatgcgaaacatcaaaacaatgcaaaaaatactaaatttctcttctgaatgaaatgtgatagatcacacttattaatagaaattagtcaaagatcttctaagaaaaattaggtataacgcccaatttattcaaataagaataacaaagaataacaaaaccaatcatattaaagacaacccacatgaaagattgatccataaaacaatgggttaacaataatatagggaacccccaaataacattattgaaccaaaaaatctcacttagaataaaaactactaatttcataaacacaataaaatggtcatttattaagaaaaataaataatgaaaagataattattgtaattaaaaaaaaagtaaaacaaaacactaagggttcgtttggaacgccgtattaggccgtattgtattgtattgtattatattgaattgtattttatgtaa

SEQ ID NO: 163658 - DNA, 3017 bp, Cannabis sativa
atttattacgtattgtattgaatcataatgggattgtttcatttgcatgaacttactagttactgtgccctattcttaagcgtgtgaccacaaattattattagctttattaacttcattttagaagctaactattcacaaataccatgatttagctcactaaaaaataaatagcccattgccaaacacttgattttgattgattactagtagtgtgggtataatttctaatggaatgttcaaaattgtaaattactacaaataaaatcaacaactaaaggaataattaaacattgactatagtgtttttgaggggagactactagtttagctagcttcttacaacaacaactacaaaaatattccctaataagttttcttataaagtctataccaattaaaatttgactatgtcttttcaaagtaacgatcccattcatgatcttcaactgtcccaaaaaagttgtatttccatgacacttcttctgcataatccaaactagaatccttaccctcctccatttctctttttattctactcactctttccacaactcctttgactgagatatcaaaggcatcatcaagattcttcaatttcgaaccagcatataccacttttggtatcaatcttaccacttcttctctcatttctgcaactttctgtttcgatatttgaagcagagtcttctcaatgctcaccttcctctttttgacatcaatatcaggtataaacacagaatagtttgtaaaacttttaggcaaatgccacaaatattgaatgtaagctgaacccggatgaaaaaatacaggaatacaccctgccaagattgaatcaaaagccgatcttcgagtactcgaatcccccggaggctgcaagcaaaaaacagagctttgaaacattttcataacgaattctggcttttgacacttgtttgatccatcacggcattctaacagcttgcatttcttcctagaagccctgcattgctcaatgacctcaccgcgaatcgagtctctaatattaggcctttggccaccggcaaaggagaacaagaaaggccttctttgccttctcattctgttctgccattgaaacacttcaacttctttcaaagggtgaaagtaagtcggatagggtatggcaaagtcattgttatgccaaggacttgattcgattgtcaaaaccgtcatgttttttgactcgggtaagaagagaaacttgtttccccaatcgaattcctcatcacttagcctcctgaaatcccatgttatccttcccgcgacgaggaaatgatccctgcccgacatttttcgccactcgggcttctgtcttagccatttgacaagcccgagtgagtctgaatctctcatggatatgttgtaaccccaaagataccgcgcaacatcaagaccagcatagtaaggcacgaagaaagccgaagccaacgacgtgtcgtttgtcaagcattcgtattgcttcatcctattatggaatatgacctctaatgagaactggttcgtcgtatgccaacctctgttcgaatacactttcccgggatttgaaagaggaggaccaaaaccagagtttgatgtgaactcacacatattagtccaattactaagcgaagcacagtttttcaacaaatcttggttgaactttcttggtagattatgaatgtagacatatcggcctgcacatgaatctgaatcttcattggattctcgctctcgcgttgtgtcgtttatgggtttggtatctaactctatgttttctttgctatgaaccttactagccgatggcgcgagacgattatcaggctccaaaatatgatcaataccttttaacccattattgacaatgtgaaaatcactactgggtttgtccccattttctgttctgataagaatattgttaatatcctctgtttgtgtaccgaacaaggtatcattttcataaaatggtataggctcaatcatattttcaaatttgaatgtgatggaacccttagtggttgttgaattataattacaaaagcaaagcaataaataccagaaaagaaaagaggccaagacgacgaaccagaatcggcatttgacaatgatggacatcgtaattttatctccaaaaaccttcatggatgataactcttttctgggtcgtagagtttctggtcaatctccaaccagggaagagatttgttgctttcagattatagagatttaagaaattgaaaaaggcatcgcttgagaggtaaacgaagagctgctttgaaatttgggtggttgtttaaggcagcgttcaagttttttcctctttttttcttcttaattattattattataaaaaaggaatgtaactattttgttttattttatttttagtacaattgatacatttttgaacattctaaatatacattgccgtgtataggtgtaggcatatttgataggagaattaattggttgtgtcattggtaatggagatatttggaggccttatagttacgtgcaccaattagaatcttcgtctacgaaaataaatatccctttgtcttattgttattagacggctgaaacaggatttggaccttttaattattttagtggaaaaggtaaagatgaaagtacatgcataggaatttattggctaaaataggaagtaaatcactttcaacttttgtttgtttttatggaatttcagactgttgttcgacttatccgatgagtctatctttttggcttcttccaatcataaaatgcagctagccggctcgatctcaagaaaatatttaaaagcaatcaaatatagtagaactagggttgttttcggttgcaaatgcggtttttctaatttcttaaagtgcaatcgcactgtaagattttaaaattgtaaaaaccctaccgcaaaaatacagtgcggtgcagtgcagtttgagtggttcacactatgattattatcgagcattataataaaaatttaaaaatcaatgtataaaattttaacaatacaaaaa

SEQ ID NO: 163659 - DNA, 1419 bp, Cannabis sativa
aagagaacaagcaagaggaaacaacacataccttcaactatgcctaaaaatccactaaaattagtatcttgcttcacaacttgaattgtagctccatttagaatagttggatctgagttgacatcttcaattgcagcatctattgccactttagcaactttactaacaagagactcatatgataaaattgccccaatatgtatcacacttggtatggtaatgtttgaattttttgaaacattagtagtaaccccatttgagacaaacccatttgagataataacagctagtaccaaataccaaactgaaaatatcctcataatgaaacttgtgaaaaattacacaactccttattcaggtactaacaaacccatttctgaaacacctgaaatatcaagatgatgatgatgataaattaaaacttaaaaatgttattaaacaaaacccaaaacaatgaaaagataagtttcaagagagaaattaccagaaccagacaaaacccatttgcaaactgcttagccatcacctaatcaagaataaagattaaaactttacactaagttatgaaccagaagttgcagagtgagctaaagttactaactttatacaccaaaaacaaaaaaggaatgaaatttcaaggaaataacatgtagaaaagaaaacccaaatgaacaaaatagtaacttacagaccagaatggttggaaattgaaaaatggagtctttactctttactattttgcttaataagaaagaaacaaaggattaaatagaaccccaaatgagagcatatttcattaagccaaggaagtcaaacttttctcccacatatctcaccttggattaaaagtgaacagagaacaataaaaagagaaactttagtgtaaattaataaaaaaaattaaaagctaaaatacataattaaagtatatacattattatattcatatatatagacagtggaagcatttttattagcaatatctttaatggtgttggcccaaaacagcatttacagaaattttaccaattactatggggcacacacataaagagattcttcttcagttcccactaaaccatttctttatgttattatattattattgtataatatacaatatataatatagtataaattcatgaccagttatatggagttgttctagatttgtttattttataattattatttttctgaaaataacatattcttctagactcaaaaaaagttgagagtgtaatatttcttttaatacccctgaaattgaacttttttgcattaatacccctaaagtttgctaaatttgacaaaatttatataatgacaaatatctatctggttttatatacacattaatgtactgttcaccatacatttcttccaaaatctaatccaaataaatatataaatacatat

SEQ ID NO: 163660 - DNA, 1329 bp, Cannabis sativa
agaattatagtagttcaaccagaacttgtcctgctttgtatactttaagaagatagattgtgttgagaaaactgccaccgaaaataaaataggagtgatattaccgaataaattttttggattgagtcgcggactaggtcgctctctttaagacgttcgcatcactgatcaggaatgtgcaagcagtcaaaaattgccggtcgtccccacaataaaataacccaatcgtcgtacactgtatcgcagggactgtaggttggttgcctcaaggtgaaaatcgagcgttggggctatctacccctgagtcagtaggtgcttagacgctggggtccgttgccagaggatcttgtggttcagttgataaggatcttcttatcaaaaccatgattgtcgattcaaaagtagattgaagattgtaggttgatgagagctaggtactaattcaggcacttaatgaaagtactaaaatattgaccttacttttagctaacatcattgagtctttaaagcgataataattatagagtaataaataagaacaataagaacaataataaacgacacacaatgtttatagaggtttaacaccttggtaataacctacttttcttttagttgtattactatgaagatttatcaagatcactagattcggttaggtaagtttcttaatagctcttgaaaagcatacaaatatttaggcagagtgcttactctttaagaatgcaaaaagaatgtcccttttatagtagggtggcctcactatttataggagacataaaaattatcgtttgctaaataattagaaacaataaatgtgattcccaatgttaaagggaataaagtggcgtgtaaattcaaataagacccattaatttcttagtctggcgagctaatcctacagaaatagagatttaattgagctataattgtagaagcagctaaggaaaatatcttaaaatatccttcaatgaggtcctctagtcagaccattgcttatctcggatagttgatgttgctcggtgcagggtgaggtaaaaggcctatgtaagtctttcaaacttgtcgacatatagatataccggctagagtttttctccttgacacatgtcacccatttacttaccatgacatctatgcaaattttgagataacggtatttaatgcttgaggatgtttgatcatcactatttaaatattttatgattttaattcaaaatttaagaagtgataattaaatatgatatatagttgaatagacattaaatatgatctctgaaatacactaaataatgaacttccttcaactattgatgtgtgctcacttcc

SEQ ID NO: 163661 - DNA, 1281 bp, Cannabis sativa
cccgcaatcatcaagaaaaatagatcaagtgaatggggaagggcaagctccggaggaaaggtattctcaagatgcagcaactcgttctgagtctaagctaacgacaccccaagcctatataaatatacgttggggtcaataatttggtcaattagctcccccttaagatcaaatgaatctcagatcaaactctttccagacaatcctagcaattgacaatccaccctaaatggtcgcccctcttagatagcaacctagcgtatctctcatgaggatcctctcgaggactttagagtctgaggaaaagatgtaaataaagttagccataggaggatttgcctaagattcatgcccaactcgaggtgaaatcactcgactcccttaccttaaaagtagaagaggaactgcaaagtttgctaagcaaagaaagtagataaaacggctctaggggtaaaatgcaactcgattttctaagttattggaaagacaaaacttgtacaaataaggaatgagtaaacaacaagcattttcaacaaggataagaaaacttacttcacaaataacaaagaaggatcgatgggatgcaaggttcaacgaacgagaggagaagcacttgtaaaaaatgtatgtcaaaacaaccatccaaccaaaagatgcacaagagtgacttgtcaagacaaagtagctcagccataacagtgacaaatccactcggccacaagagttacaaaagttactcagccatgagagtaacaaaagtcactcgtccatgagagtgacaaagttactaggcaatgagactgacaaagtcactcagccccaagagtgacaaaagtcactcagccacaagagtgacaatgccactcgaccatgagagtgacaaagtcactcggccacaagagtgacaaaagtcactcgaccatgagagtgacaaagttactcggccacaagactgacaaaagtcactcggccatgaaagtaaaaaaagtcactcggccacaagagtgacaaaagtcacttggccatgagagtgacaatgtcactcagtcgtgagagtgacaaagtcacttggcctcaatagtgacaaaagttactcacccatgagagtgacaaaagtcactcggccccatcatgaccaaatcactcagccataaaagcgacacagtcactcggccacaagagtgagaaaagtcactcggccatgggagtgacaaagtcactcggcctcaagagtgacaaaagtcactcggccatgagagtgacaatgtcactcgaccatga

SEQ ID NO: 163662 - DNA, 1544 bp, Cannabis sativa
  modified_base (973)..(976): a, c, t, g, unknown or other
attaatctatgagattaatttacttctccaatccaacaacgtgatcttggtcaatcaaataaattgatagttgaagttgagttttcaatgttgtccctaactcactttcaaattgattaagcattaatatttcattactatcatattttcttttcaaaatctaagaaagaagaagatacatatacatgattggagcttacttggaatacatgggaatgaggaaacaatcacagagacaacacacgtgcacatatataaaatttctcttgagataataatttagctagccacatacatacatagtccaaaaagggtggaacaaagaaaaaagagcatctatctacaataaagagatcatttgaaacccacatcattaaattttcttactattaatctgtttagttgatttatttttcagaattgggtagttgacattaatggatattgcacttatttagaataaacaaataaataataattaaacaaacacttcacagaatatatatgaaggcattaaaagaggtggacagcataggaaagaaagaaggatgcagttgtattgtatgtactccactccactgtgggtaatagtaatagctggcttattattattattattattattatttgaaaataaaagaaagaaaaaaacttttcgtttttggtactttaattatagaaatccattgacttctttccagtttttctgtaattaatttatttcccaatcatcatcatgtgcattatattgatacttttttctaaaggcaagagtttttagtgttctttttcattaccaaccctcaaattcgtgcttaaatatggttttgcaccaacatctatattacttctttaataaaaagagaaagaaagaaaaaaacaatgaaatttataataggtttaacgcaatttataaaatgagttgtcacatttttttgtctgatttttgcactaataataataataataatannnntaataataataataataattgtctaccttccaagttccaaacccatatccaactatcattgtctctcacgaattttgtaaagaaaaatgtaacttttgtgaaattaaaattaaacctaaatttgttcacgaattgaaacttggttgttgtctctctcgctagtaatggttttttagactctcaaatcaaatgtgtcttattcaactttcattttcaatttttgaatttttttgtacacaattgatcggtgtcactttattattatgttattatttatatacaatgcatatcatcaaatagtcacctatcgtatgtaatataagtgatgatgatgaatttttttttttgccttttgaacaatgaacaaagtgatgagattatgataatagaaataggggtgagtaacggtaggtttgatcagttttttagacacaaaaaatttaaaattcagttttcgattctcatggttataatttgaaaaccgaccgaccattatataaatgtaagaaaatcgaccgttttaatctacggtttggtcggtttaaccgagcttttttttaaaaaaaaa

SEQ ID NO: 163663 - DNA, 1375 bp, Cannabis sativa
aaaaaaaaagaagaagaagaatatttaagtaccgtacaacataagagttcaacaaaaacaaacatttcaacatatatgaaaatgaaagcgtaacaataataaattatagttaagttgagagacataattaatttttttttgaataagtgttctttattaataactcgagcaatcgctcgcaaggatagacaataagtccgagggaacactgttaatgggaaacatacgttcagctagataaacagaatggcgggcaataaaatgcgcggcacgattcgcagaacgtttaacaaacagaagagaaacataattaattagttttacttttagtcataattatttttataaagttgattaaaataataatatttgcagccacaggacatagactggttaaggctatgttaacgatcacttaaatcagtgatctaaaaaaactctccttctataattatatattttttgtactgaatatatatttgtatacatagattttattattatactttttttgaagaaagattttaatattatactgaatatatatataattaatttgcaggttccattttacgtttttgcccaattaacgggagctatatcagcagctttagcgttacgtgaattattgtacccaatacatcatattgggacaacgacaccttctggatctgattctcaagctttaggaatggagattgttgtaacattttccatgatgtttgtcactgcagctgttgcaactgatgccaaagctgtaattaattatttaattattaatacataacatccatccattaattaatcaattattaaatcataactaaattgtatatttatagttaaatattattgttatcattttaattaatggcacaggtaggagagcttgcaggtttagctgtaggttcagccgtgtgcattacttcaatcttagctgggtaagcaaattattataataatattatttaagataataaaaataggcaataattttaagaaaattaaaaatatataatattttatttagaatttattttaaaaatacacaaaaattacaaaaataggattatctaaaattttaaatatttttacgatttttaaaattttatttacataaaatatatatgaattttttatattttctattatttttatgtctaatcttgttattgtgttcttggttttttttattatttatatattattttgatgataaattttatcaaatataatactttgtgtaaacttctcatatttgatttttaaggaaattaaacttaaatatataaatatctattctatataaagtgtgtctatataactgaattcttggtttatgagaaattcatgggtgtgactttttatttatatt

SEQ ID NO: 163664 - DNA, 3023 bp, Cannabis sativa
taaataatttacaaagcaaataaatttcatataagaaagtgtaccgaaagagtcacttttagttgtactataatattacccaataataatcaaggtttgcaaaattactatgcaatattattgtaatataatgttaaatttataatattttttttattttttaatgcataataagttttaagttaattatattcaaaagtagtcaaaataaattatgtaactatatattgcaagtataaattattatttttatatataaaaaacataatatatattatactcatatattattaataataatattaaaggaatatatgttggtgcttcacactatggatatatgttgatttaattttagaaaataacattgaattcatatagtggtgttatcttattttacttcattgggacccaatggactacccatctagaatttgtttctagggcaggtaaattttataatatattttctttttgtttgtgattttacttttgctaattgttgattaagtgttcataaagaaatgtgtaagaattacgtaatgcactgagactcgtcctagaattaatttggaccctaaaaaaataattttcttgagtcattttaaatataaataatatttttaaaaattattaaaaaaataagaatatttattaatttttttttccatttaggtcttcataggagggggccctaagtacgggctaacccgcttaatctaggatcggccttgattggactttcaattggtatcatacattctctcaaaactattataaaaaccatgataatattataatttaaattaatatgtaattaaagtaaattcttgttacaaaataataatattaaagaactagttgctaatgcacaaaaacttcatagaagaatcatgccaacaactcttattataagtaatatcaactaattaatatcctatgggaaagaataatgcttttgttgttgtatgattacataagaagaaaaaacaaaaacaaatcccatgggccaagtctaggtgatgaatattaaatttcaaacctattcatctcaataatattatttaattcttttgtcattggacgaaaaagtcactatcagctactctttttcacctcatgtaaatatcatcttccaattttttaataataaattgctaatatttattaattattattaatatctcaatgggccgcatttgattgggttaaccatgtaaataactgttgggctgggcccgcaaccaaccaatatttgacacgttaattcacactttagcaaattttcaaatttatccaatttttttatttattttttgtagcttaattcttttataattaagacccaccacaaccatgattcgaggctttcgaaattttggtccatggaatttgatattgtggggcaaagcttattttcaatcacagtgtttttggtttggccttcttctccatggccccaaaccctagaaatgtacccttcctttacgttttacctacttcattccaattagtccatagaaaagttacacaccttttaattactttttcttttagcaacattattttgagagcattattatttggtatttgagactgttttttagaaattgaattaacaaaaaaaaattaagctgaagaaaataagattaaaaaataaataagatatgatttttacgtgattaaagcattaacacatcttagtgcacgagttaatattattaaatctttgactatgaagtatttactacttttttctcatacaatttttttaactctttatatgcaggggcgaagccatatttataggctaaatggctaataggttgggcggacctagacccattaaggttctatttagtgttaaaaacccacggatggagtaaatataatataatattggctattgggctgggtaggtgaggcccaagttgtaggtaaccgtcatctttatataattatactattgacagcaacaggtgtgcatgtgtggtcagtattaagaaagagaatgtcagagtagtactaggcgttagccaaaaatgtgattttttttttattgtgagccaatatgtggtctaacacatgagacaagttgtttgatgtctcaggatcgtgttagaattatgccacatgagtcggcttccgtgaccttaagtattctcggatgccttttcgtattatgttcctggatgcgcctcttaagggcatccgtctttgatctacacttgttcgctatttgattatttgttggttgatctaggtttgggctctctcgaatccgttgttgagagacgttagtcttgatggggctagatgtcaagtctgacttcgcccattcttgatggacaggttgtgcatgcaattgatccatatggacccaatgaatgggtcttgttttcgtattggcattcatcgtcgcctacttatgagctatccaaaaacacgaatattaagtacttaaagcattttagtgcttaaatgtatagtagacgtgtcgtaaacaagtacatccgtactaaaataaatatgttgacccattaattgaacacaaattcttttgtaaacatattatatgggttcgatttttatgcgactacacaaaatgagctaagtttgcattattatttgcttaaaatacatgagtctcgataggatatgaacatggtccgccaacacgaattctaactcctaagcatctagggaacaaaacaacaaattagtggggttcaaatgctaataaacattaaacttgaatatttatttaaagaaagcaaaattaaaagatttccattataatagaagaaattgactaataatttttttttatttatttatgtataaaaaaaaaaatcaaatttagaattcacgtttaggccacatgaatttcaaataatgttatttaatttgactaaattacttcttgcttatataagacttttgagacactcttttgaataaattttgaaccaataaaagtgatgactactttttactctatttacatatatctttatatatta

SEQ ID NO: 163665 - DNA, 1375 bp, Cannabis sativa
  modified_base (1322)..(1322): a, c, t, g, unknown or other
aaagttcattgtaaaaaaaaaaaagatatattaatccaattaaagtcaatatatattcatcacacatgaacaacttccttaccatattgacactaccaaattatatatatagagagagaaatcttatggtaagtacaactattttgtctatataaaatggggacatttttttaacttttgatatagctatgataaacttctatgtattaaattacatatgtaagattttgaaaagagaacaaaattacatatgtatgaagaaaaaagcctaaaataagtcttgaaaatataaaaagctctgacaaaaatagaaaaataaaattactaaaatagaattaggctgatcaatatcgatgttccatatcttccactgaaataaaatattgtttcaaaaaaaaaaaaaaaagaaattagctccatttttggtctccctccactcaagttctactaggacctaatctttacttttaatttcttttccatttctttttctgcaaaaatatataagcacacgcatgagccatgaaggcatatattgatcataggagtggagaaattaagcttaaaatgggaatcaataatgggttagaagtagtgaaaaattattcttggtagttgggttagagatgtatgattgttcttgaaattatagctatcctcaaaggagaaatcggaactgagatgtttgaaaccaaaaaagaaatggaacattttaatagctatcgataaagattgggtgaggcgaaccgacaactagtgacctaaaaaaattctagctgaaagtctagtacatctcgtcaaagaaagaagcataagattatgactgatgaagattgagatgagttaggccaaaatggtacgcactattagtttaagtttggttgaaaatggtacgcactattagtttaagtttggttgataaattaaagtatagtgtaatgaaggaaacatctctttctaagttatggaaaaagttagaaaaactttatatgtcaaaattcctaacaaatagattatatttgaagaagcagttatatgagttaaaaatggttaacagataaaatgttagggatcatgtaaataaaattaataagtgcataactcaattattaagtgtagatgccaaaattgatgaaatctagctattattttgagttttgagcataaattttgagtttaatttgagggattggagccttggagtgggaattcaaagcttggataaattgcatattttggtgttcattagaatcgtggtctatccttgatttttggatgtattttgtgttggaatatcttttaccaagatctagatttactancaagtatatttttaacatcctaaatatgaatctctaaaacgatgaaaataaac

SEQ ID NO: 163666 - DNA, 1668 bp, Cannabis sativa
aaaaaactaaaacaaagtggcgaaattcatctggtctaccgccatagggaacctgccagcaaaccaaatagctttggccaaagcacaattcttaaagagatggttgcaatcttctaccttagagtcacagaagacacatccaaacctggtaaaagcagaaagtctagcagcagtaggaagagcatcaaccaaaactctccacaaagttaaggacaatcttgggtgcaccgaggggtcacaaatccacttccacaactccctacaatctccaaacctgtccccctgatcaagagcataggcatccttaacagagaagcaaccatgctttctcatcttccaaaccactctatcaggatgaggttcagggattcgaggaattgacaaaattctactcccaagagcttctccaaaaatctacaaaataatctcctcattccagttattaccatttgagacatcagcaatagtcctaacagtaaatcgagggtctctcacactctccatagtagccaagaactccgctgagttgagccacgggatccaaggctggtgccagaaatcaataagatcacccgaaccagctaaggataaggacccccattggataatatttctagaagacaagatactcttccataaaactaaatcactctctttcggccggatgctccagaaattctcatagcgacagtacttctcaagaaggcactgaacccaaagtttatccgccttacaagctaaaaaccaacccaacttagccaataaggctacattaacatcttcaaacctccttaaccccagtccacccgaggacttaggctggcaaattttgtcccaggaacgcagagccataaagcgatccttctcattacttccaagccaccaaaactttctcataattgcatctagttctctgcaagtggtaactggaattctgttggttgacatggcgtaaattggcattgaagacgatactgacttaatcagagtaagcctccccgcgtatgataacgttttcatcttccatccttctattctcctcatcatgttccgtttgagcctctcatattccacccttttccttcttttaaagacaaatggattaccgagatgtcttttctcatcactaacttcagaaactttaagatgtctcaggatggaggatctccgattctgatctatattttttgaaaataataccgaagatttatttttactacaggtctgacgggaccacttctcataaacagcaagacacttcattaattcctcagcttctctttcatttgcccgagcgaaaaggattgtgtcatcggtgaacatgagatgcgaaatagcaggagcattcctagcaattttagttccatgagtacttcctgaacactccgacttctgaagaatcttcgataaaacttcttggcataagatgaaaaggaagggagacaaaggatctccttgtcttaagccacgctaaggcgtaatcttcttgataggactaccattcaagaggacagagtaagtaaccgaagtcacacactgcatgatgagattacacacccagttgctaaagcaatttgctcgtaacactctcaagagaaaactccattccaatctgtcgtaggctttgtgcatatccaatttaatagccattaaaccacctttgccttt

SEQ ID NO: 163667 - DNA, 8782 bp, Cannabis sativa
  modified_base (8432)..(8440): a, c, t, g, unknown or other
gggcataaaacccaacaattaaaagcgcataaaaggtaaaaatattgtccacaccttatggaggtatttttataaataaagtataaatttatattttccatgtaatagttcgtaaaaaatttgatatatatattaggttaggttgaagttacctagaatgtacgtatacttagttttatataaaaccaaagaactaagtcacgcttcgcgcggtgttgtcaaacttttgtaatatttttatatatattgtacttatactaagtaatataataaaaaataatacattttgagtgtgtgttattataaacaaaataattgtattaaaattagaaatatagtttcctatttttaaaatgttaacccgaaattttttcctagtgacacagacatcaatatttgacatgtggcatgaaggatgacgtcacagaaatgggtagacccgagtgatagtagtcaacttgggaggggaccctacccttgcacccaggttgactttgggatctctgggatggaagtaaggacttcaataacttgaatccaagatattatctttcaaatattctataccatgaagacatggaccaacctaatacatggtctatgagctgaaattacacgaacttgcaacccaaatcccaacctggggacctatggtttccacccaacacccaagtttacatcctcaactagggtttcatttttcgagaccatcttagtgaaaaattggccaaaacttgtattgggacatcaacttgacatatcacacacatgtttggggcatcagaattagatttagagtaagttggtttttgagcacccgaggccctggggcccgagcacctagtgcccatgttgacaatttgtcaatcagggcaacggtcaaagatctaaattttgcattgaatctaccttcataaaaaaaatggagaaataggtcctttcggaggaaaaacagcaattcctgggcagaacaaatagggcccaacgcccacgttcacacttggagctagccctgcacccttgttaatttgtcaacctaggccacaataaatggagctttcccaacattctttcaagcatcatctccgtcttcaaaaatattgagatttaactatttctggggaccaagtgaacctatcgaaggagtagaagagggacctagcgcccaagttgacacttgggactggggccctgcgcctaggttgacattttctcaatatgggctgtttcctatttagttcagcaaaaattgcttcgggtatcttcaccgtcatcagaaataacagagattcaagtaaactccgggagaaaaacataaacctgagtccctgggaatagggcacagtgcccaggttgacctggtgctgggcgcagtgcccaggttgacaatcaacctgggatgataaatatgatgtgaccattgaattcggcattgcaaaaaaatagggggagagaccccatcctcaagtttagaagccttggaaaccttgaaagtataaaaaatagaatcccgagagctcaatttaaagccccattgcccaggttaacaaatggcatagcttcgttggattcttcttatctgaatctaatgtcatttcgaccgtttatcatgttttcacaagtgcaatgatccataaagtcaaatcaaccaaattcacaactttaattttggctcattgggaagcagaaagtttcgagtcttctgtttcggtaaaacagcaacatcttcgagaatatgtgaccagtttcacataaacatataaaagtactaaggggtgtcaaaccatcccttaggcatctcaaaggacttcccttagaagtttttacacttatacaacatccaggttgacgtcagatgtcaacctgggcgatggaatatgaactgccttcagtaaaatagccataactcactcaattttttattcgatttacaatattcaacttgcattttgaaggtttttaagccctcaatcaagtattgcgtcacaccccaagcgtaattttgaagataccatcatcaaaaatcaccccaagagagttacgaaaataaggtctgggtaattcgcaataggacccactagacatcaaaaataagctatcaccagcagaagctaattttcactgttaagtcatcatcaacggtggaaaatactttatttttattttatcttctatatttttgggcctccttcacctataaaaggatagctcccttagtttattttaaacttttaaaaaactacccataaggttagagcttctctctctagaattcaaagcttcagatacttaaacattagttataattaccatcttgtgagaaatataaactaaaagtatacatagccccattactatcacgatgtaggattgaactactataaatcgatgtgtctatcattaattactttacaacttttcttattcttgctaatctcgtgcgcggatgtggcttagaagtctagtccagatttcttagtcaacattttggtgctttcattgagagccacagctcaagaaagtcactaagaaatatggttgtgacacattctacaagtgtcaacagaaaaacttcaataactggccaaataattgggggcacgccagttgatggaattagaaccaggactactcctgcgccctaggagctaggagtaggccttataaccaccacctcaacttgtcctccaaggccaccaccaactagtcctggcactagtaccaacgactaaatccaacccgaggagccatacgtggaggtaaaagaccctaaggaggccaatcctcaggtagctcggctcagccaaattgtggctaacttgcaacaactgcaagactctcttgataagcaacacgaccactttcaacactggttcatggaaaactagaagcacattaaaacccaacttgttgagcaagagtagtatagagctaacctatctcaacggattagagatgctgatcgttctaatcctagaactgcttcccgtagaggtatttctgagttggtgagagacaccccatcaaccagttggtcacgtgggaactagtgttcgaggaaaaaccctaaatgctcaaactaccaatgttacattggttaaccgagctgacactacacaaacaccaagcatggagactttctggagggaaagtaccttcaatcaagagcctgaaaggactcaagctcgagggcgccaaccaatgggccctccactgaatgttgaatgatctcacaacaaagagagaactaacaagaatcctccaccaagtcctactcaacattctcaagagaccagacctcaagaccctgcaaggggaaaagatctattgttcaacccaaaggaagtagtaggagacactacatcaaaattagaagctataaaattaaataggtaaggaccaatgagtcgcttcatactcggaagtactttcatgatgaaggaggggagtcgtgtcgttacattgcccatggccatgagggccaatggtatgagtatttcccttacgtacatggagaggaattgaatttgagtcaccaattcaattgtttttgcacctgtgatcctactgaagactacttcgaggaaactagccactataatgctccaaatgaaaactctcatagtaggtcatcccaagacaatcatgaattcattctggaggcctcactagagttgccttcatgtccctgtggtcaggagacagctacaaaacccaggtcgaccagagtacatgatcgacctggaagagaaagagacatgcctgacctcttgaacaaaagaagaatagtggatgtgggagcgtctagagaagaccctattcagataacaaaagctccattctatctcagggtcaatttggtagaatttgacacctcacgtgctgtagggaaggcgatcacgacacctaagttgtacaaaatttaagcttgacagagaatggtgctcaccactctctgaatgaatcaaagcacttcccattccactaaaatttgagaacctttcttggaatcaatacaccaggcaaaaagattcgttattttacatctaatacttcaaagtacagacctatttgtatggtgtgagagacgacaccaagtgtagaatcttctgtgctatgttgacaggcctagctcaacactagtacctaaagctctcccctagattaactgactcaaggaaagaactagtgaatgctttcgataaccagtttgctccttcttgacaatgctagatcgagcccaatgatttggttgatgttaaggaataggaacacgagcccctcaagcactacatccaatggttcttagccactaagacaaaaagtcttagcgaggatgcaagggtaatggcacttacagtcgggctcaaagagatgagtcccccgagtatacattatgaatgacttcttagatagagcggatggctttatcaaacttgaagaagttgtcacccgagtaaaagcctcaaagggtggcaagaagaagtccccaaacactaaagctcttgctactgaggtatagagcgatgggaagaaaggaggtttgaatagaggaaagagagccaacaatggtggcatgcaaggcaactcccctggaggaaagaagcctaaaattgggggcaagcccttaagagattatgagcctgggttcaccatctactccattttcttaggtccaagagaggagatatatatggccactcaatcaacattattgtatcataaacctcttcctctcaaagaatcagggaacagagacatgaacaagttctgtcgttaccaaaacaattacggtcatgatactaatgagtgtaattagttgcgggacgagatagaatttctcataagacaaaacatgctgctctttggtggtatgtacgacatgatgctctagcagggggaatgctccattctagcctggaccaattacaagcaggttagagattgttattagaggccttcacttagctggaaattcaaggaaggcctcagaaaggtaagcaagagttctctaacatgaactaagattcgaagtcctagaggtcgaaatgccttccaaaatctcagtgctatgaatgtgaacgaatcaccttcgaagaatcagactcttctcatgatagcttccctcacaacgatcctctagtagttgaggtcaaaatagctaatatgatggtggccagagtaatgattgacgacgaagcatcatcaaacatcttgttcaagcaagtcctactcaggatgggtctaaatttagatgacctagaagcatgagaatagctcatgtatggtttcattggagtcgatgttcctccatgtggcaagattaagttgccacttaccgtcggcactgcccccaaagcaaaccaacatcatggccacattcatagttgtggacttgaagtctccctacaaagtgatgctcagatggcctacccttcaagccatctccttagtataccacattttcgttaagttcccaagggttgctggtttcaattatctccttcacaatcaagaatatgcccgcgagtgctacaatgcatcgttgtcactcgccaagaagacctcttcaattgtcatgacctctaaggggacgaacaaaatctccactactattataacaccaagggggatgagcaagacctctcccacaaaatttggcgagacaacaaagaccttcaaagattaaactatggataaggtagagacaacacctaaaacaacttgaaggtgcacccaagacggggatgacattttcccccattttagggaaattgacttgggagttggtctaactgaggaattaagagaacatcccctcaacacattagacccgaccaaggttttcaagattggaacaaacctgacagagctcttgagtgagatgctcatagcttgcataaggagaaatgaagacatcatcacttggtcgagtgaggacatgatcgggattgacccccaggtcatctgtcatgcaatccatatagacaaagttaactttaagcctgtacaatagaaagacaggctccttaacaaagagtgttccaaagctctcaaggaagaagttgaaagactaccggagaacaacttcattagggaagctttctacttagtttagttatccaaccttgttctggtgcctaaaccaaatggaaagtggaggacctacgtcgacttcattgacctaaacaaagcataccttaaagactattttccactactaagaattgatcaactagtggacgcgaaagctagccatgaactcctcacattcatggatgcatattccggctataaacagatcagtatgcatgcaccagataaagaacagacgagttttcaaactgatgcctaagcttgtaaaaattgatgcccatctagtaattttgagcgaaacgggtttggttcacgtcatcaagttaactctacacaagtgtgaaattaacatttggggcaaatgttaacccagaagctttccctggtgatgtgaacataaatgtttgacatgtggcatgaaggatgatgtcatagagttgagtatacttgagtcacagtggtcaacctaccaggtgaacctagccatgcacccaggttgactctagaagctttaggatggaagttcgtactttaataactttaatcccacctactatcttttagtattctataccatgaagacatggagcaacctaataaaagtttcaagagctaaaaatacatgaaccttcaacctggaagccaacttgggcacctagggtttccacctcgtgcccaagtttacatcttcaactaggatttcagtttttgggactgtcttagtgaaatgtttccaaaacatgcattgggacatcaactagacataccacgaacatatttgaggtatcagaattagattcagaaaaagttgattttttgagcatcgaggtccagagcaccccacacccatgttgacattttgattgatcgaagattcgacttttgcatttaatccatcttcataaaaaagtagggaaataggtccttcaagtggaaaaaaaatagtgcttgggcataaaaaatagggcccatcacccaggttgacaattggggctggccctgtgctaaggttgacaatttgctaacgaggggcacaaaaaatggagttttctaagaattcttttgagcatcatctccatcttcaaaaaatattgggaatgaaatatttccaaggaccaaacagaaacttctgaaggggtagaagaggcacccagtgccctggttgacacttgggacaaggcccagcacccaggttgacattttgtcaacctagcctgtttccaattcaatcagcaaaaagtgctctagggatcatcactttcattagaaataacaaagatttaagtaaacttagggagaaaataacaaaacccgagtccctagaaacatggcctaccacctaagttgacttggtattgggcccagctcccaggttgacaaccgatcagggatgctgcctttaattgctcaaatgcaaaatacgattgaccattgaatccgtaatggtcaaaaataaggggagagatattgtcctcaagttcttaagccttggaagtatcaaaaacagaatcccaaatgctcggtttaaaggccccaatgcctaggtcaacaaatgacctagtttgttggttctacttatcccaatttgatgttgtttcaaccttccatctagtttttcacaagagcaatgatccattaagtcatatcaatcaaattcacaacttcaacttttttggcaaagtgactcactcagaaattggaagttttgagttttccatttccatagaatagtaacatctttgaggatgtgtgatcagcttcaccaaaatatataaaagggctaagcggtgttaggtcatcacttaggcatctcaaaggaattccttgggatgtttatacacttgtacatcatccaggttcatgtcagatgtcaacctgggcagtggatgtcaacctggctactaggacctgaattgtcttcagtaaaatggtcataagacactcaatttttatttgattgacgcgattcaaattttgttttgaagctatttaagccctcttttatgttatgtctcacataccattcaaaattctatagatatcgttgtcaaaatgcacccccaagggagtgacaaaaataagttccaagtaactcccacaagtatgctgaattaacaacctaaaaatgaattgtctaaaaaaatgaaattaaacaaataagggtttaagaaaaccttacattggttgcaagggaatataatgactccttccgttcaagatctttagcccttgattcctttttgtagcagagcataatcaatatctaaacctggatctctttctctccttcgagttaggttaccactgtcttactcattatgattgagtacttgacnnnnnnnnngtgggcatggcactctatcactcaagggtttgacttggatgaacaatgaatgagatttgaaatcactatggaagaaactcactgatctaggttgaatgaaatagttaaattgttaaaactggatgagtgagagcatcatgttccttttctagtgtttcaactagggcttagggctgaattatacggattaaaaaagaataaaatattgtgcaaaaaaaacacttaagtgccgtccacttaaaggaccaaactcaagttgcaattttgtcacttttttcaatcacttatttttcttttcaatagtaccatattttccaattcaatcctatacatgtcaaaact

SEQ ID NO: 163668 - DNA, 1300 bp, Cannabis sativa
ggggtatttcaagaggaattgtctccaactacaaaaataagaatctaaggaagaggaaaaacccactcccgcccggatattttccattactcaggccaatgctgaggctagcccatcagttgtgatgggttagcttctcattaataactcattttattctatattgtttgactccggggttacacattactatgttgctactagagtaattgataaactaggcatgccatgtgatagttatgaattagggtttggaaccctattgcctagcggagcattagttatctccgaaaggtggactaggtctatgccagtcagagtggaagatagggagttaagtgttaatcttgttgagccagtcacagtgtactttgacataattctgggaatggattttctatctaagtatgcagccaatattgattgcaaaaaaaaaaaaaaaaaggtaattttccagcatgagggtgaagagccatttgtttttgtgagatcaatttagggttctcaaattccaatgatcttagtattgaaagctagagacctcttgcaaggtggatgcataggattcctagcagttttgatagacattagcaagcccaaaacaggttagcctaaggacattagggtagtggaagtgtttctggatgttttcccaaagaattacctggtttgccaccacatcgagagatagacttttatcactaatttggcacaggggtagagccagtttctaaggaaccatactagatagctccaacagagctcaaggaattaaaattaaaacttcagaggatgctttacattgggtttaccctacctagcgtgtcaccatggggagcttcggttttatttgttaagaagaaagataggacacttcgtatgtgtattgactaccaggaattaaataatttgacaatcaagaataagtatccactgtcaggaatcggtgacctgtttgatcaactctaaggtaagacatgttggtttttagggttcacattagagtcgcaatggaagtagaaattggattcaggttttttaaaaaatattttgttgaatccgatatgaaccttaaacctaaaatctcaacacaatgttacttaatctaaaactaactaattagaataggaaattacctcttgttgcctatcagcgcttccttgaaacttttcgtataaaaatttgaacaaccaatccaacaataggcttgttgaagaatcatcatgtcttccagaccatccttaacactcaggataagagtgagcttatagattttataaaataaacaaattttgtaatc

SEQ ID NO: 163669 - DNA, 1485 bp, Cannabis sativa
agttagaataagtaacatttaactaacactaaccagctgtaactaatagtttaaccgaaaataacaaactatattagcagagataattaagttgatcaccaagtttgaggacgatgtgaagattggaaatgttgggccccgcacattaatatgatattgtccgcttacgctcacggttttgtttttaggcaccttctcaaaaggcctcatgctaatgaaatagataaaacacttatattcaagatttaataactctggactattctttcaatgtgggactatgcattatgtgtttgttgatgtggcctttaatgatggatttgttgccaaggatatatgcacatgacagggtgttttctctggtttccaagaagatacacacttcagatcctttggaggcagctagccaaagttttggagaagcttcgggtggatggaggtttcttatttctgattgccaggggctggtcccagcttgtgcttctaaagtgtgttatcactgattttttttcagcttttaaatgtcttagaagctaacttggctattatttggttatttagagactttaatgttgctgcttattgtttggcaaaatggagtgttgtgaattcttatcattgtgacctaagtttttgggaggtgaatttatcaccaaaattatttcttctcaaaattgatttctcagaagaaaaaaatttgacaaattgttgaatcacactacacatgaaattgaaaaaatagctcaaaccgtatttgccgtacagctatagaaaataaattcaaattaaacgcattatctgaagattattaaatgatgaaagttgataaggtgataagtttccatataaggataagcttgattaaaaaaatgtggcaataaagaaagaaagtcattataattttaattttcgaaaaaggtatgaaacaatttggtaagttatcatattgaatgcattttattttatagctaaagtggtagacatcacaaataatagtgctaaaaaaggttgagagtcttttagtaaaaaaaaaaaagtacagaagcagattgctttattgtgtaagtcagcttttcattcttgagggaattaaaattgttgaggttgctatctttacattacttttaaattgatgcaaataatcaatatttggtccaaattacaatgcataaacaattaacatgtcctattttataattcttacttgcttgacattataagtccattgcccactaatgtattaccttttgatctcacagatacaagttgaatctattatcatttcataaattgggagattatataatgttaatggaccaatgtcaattacttttaagaaattacattattattatttttttggctggaaaatgaccctaaaaattaagttaataattatctattttttaaaaaaaaaattaagaaaattgtcaaatataataaattaattaataaacattataaaatatatttactacatattat

SEQ ID NO: 163670 - DNA, 1892 bp, Cannabis sativa
  modified_base (1534)..(1543): a, c, t, g, unknown or other
  modified_base (1609)..(1610): a, c, t, g, unknown or other
gatggagagagagtgcaagcacgtgaagcgtgagtgcgcgtacgaccccgatggctcaaggaatttgttaggctagagcaaagaagagaggagcggctgggagtattcagttgtatttattttcttttattttcattgtaatttcagaacagagggtatataaagacccttagaaaaatttgtgtttttgggttgttgaatgaaattgctgaaaacggctggagattggccttgtctcgaagaagacgtatcctatcaataaccatctattgcaacattcgttatgcattgttaaaaaaatgatttaaaatgttgaattaagagcgtaaaaggattagtccgacacatattacttctgaacaattatttacaagtgtatatatatttatatatatacactatataaatgagcaaattaggttagaccctaaatggtacctacttttgtgaaataaagaagagccacttaaagactcacctaaacaccacgcgtatgtggtcgttcgaccaaccgaattgaactggttggtgtggtgtacaccttattttttggagtgttttattagctggtaaaagagatattttctccttaaaatttttagacacaatccaacttttcacgattaaaaaaaaacggttttcttcctattttatttttcccattcaatttatttttgaacaataatattattgaaggtatacatttaacggtttgctaaagtacagtagtatttcgatacattgtacattgtcacaaccctcttaaaaagagtgatttaatccaccactcaactcaaaatatttattcaataatattgttcctcttttattagttaatttatattaacagtgtttacaacaccttcaattatttattactttttttgggtctacaattaaaaagaaccacaacaaaattagatgccaataaaaaaaatgttatttataaggttgaacatttacattatgcatcaataatgcatatttattcttttttttaaaagaaacctcagttcaaattaaaccaaaaaaaggtttttaggatccatatagcgaaaaatccctccccttgacagttcagtaagctaaggaagacaacctggcatctttagagagtttatcaacacaattgacaaaagcaaaagaaacactaataaaactcctttgaagatccaagaccaaggaaaacaggggccacatcttccaattcaattcagggacctttccatattgagagagttaagaaccaattgagaatcaaataagatagtaacctcctcccaatgattctctctctcccaaagcaacgctaatttgatagcttacaactcagcagtaatagcactaattgcagccaatttatggtcctgacaaaccaattttggttgtcaaaatcagcagccaaaatagcaccgcaaaacttaccaactttgaaagaaccatcagccaggatcatttttggagcaaagggaggtttgttgctgtgagacaaacctgtttgttactacctatataatatatatatatatctatnnnnnnnnnngtgtgcctatataactgaaattcgtggtttatgagaaattcatggtgactttttatttttatttannaaaataataaaatattatttatatctaataaaataataataaaacaaatctcattaatatttgaactgatatttgatcctaaatattagagaatgagaatccatttaaaaaagaaaacaaccgggaatctgaggcagcagcctaatagcgaagctcctcatatacatgtgacagtcgcccatctccattgctgacaacttggtgatttttctatccaattaggcaataaccacaaaatcaaagctttgtagtctattcttggtgagttatcatttttttttt

SEQ ID NO: 163671 - DNA, 2038 bp, Cannabis sativa
tacataagttggttggccaaccctatttttatggcctgtccaacctgtgacctctcattggctggccaggtatggtctggccagctatttccttgttgttcagcatctttgtacaactttcattataaaggtcaggcctccttagttgaacagtgattcttggctgtcgagcttgttctaaggaattggctggccttcaagcttcccctggccagcttacaagtttcccttgcctggccaaacatggtttgccaaggtcttaatggctttcttgactcctttttcttgttcttgcttcacaattttgcttgaatgctttagaacctttgacaatcaacataccgtataaggtgactttgacctattgttgacaaaccctgttccacatgtccttagttttgactatgtggacatgcctcgtcaggtggaaatctttttgggtaacatttatccccctagtccctgttcggacgttgtacgacttgcgacttttcagctcttgtcttcactgaaggggcctttattaagcaaccttatttgcctaagtaccaaactttttaaatgatgcgcttttaaacctttgatcttctttgtcccgtgtataccttttactttcctcatcttgtcctctttgatatttctttgaatttcccattgaagagtttcaagcattttaaagcttttagagctttttttattctcatgttttagagtagtcttttcacattataattcgcttgatacctttaggatttataatgtttggcgagggtttttttcgtggatatgggggctgctatggctgctgattcttcgtgttgaacaaggtggtaaaatgaggaaggcgaagctgtgtcggttcttttatataaccctatagcgtcgattaataccaaataactgacgccatagggttactaaaaagggatttttacatctggacacttttttttttctatttaatatcaattttaacgtgtatgttcaaattgtaaatattaccatgagtttttgttattttcaatttcaaagtatttagttgcttattgtttgttgacgtcataatcaattttcacatcatatctatcaatctatgaggtttgtagtcactctcaacacatgcatggtaggtgttgatgtggtgttgatgtcaactgatgatgtgtaatagcttaaaaaaaatacatactgtacgatattaattgtttttcatattttttaaaattatttagttatttaattgatagatataatcaattttcacattatatctatcaatctatgaggtttgtagtcactctcatcacatgcatggtaagtgttgatgtggtgttgatgtcaactgatgatgtctaatagcttacaaaaataaatacatagtgtatgatattaattagttttttatattttttaaaagtatttagttatttaaagtgagagtaaaagattattaatatttatttatttactttaagtttatttttcaagaatacatcatttatctttttttttctctttttattttcactttttctcttttatctttaactttttttaaaaaaaaaaaatcttattatgttgttactcgatggaacttaaaaaaaaattattttatcggcttacatgatgatagattgtgtttgaaaaaataatttgttgttcccatatatgaaaaatagactaataggtttattagtgtgttatgtttgattatagtttactttgtattgaaaaatataaaatgttgtgccaacaaacagaaactagtaggtttattgacatatataatggtagactatatgaaataaaatgagcagtcgttctaatatacgaaaagaaaaataatttttttttcaatatgctaaaataaactaatagatttattagtatatacgatagtataggctgcaattctgtattttaatattcccaattcaattatttaattaagtgattaattaaatgcggaacaatgaaactggtattgaaaatagtttttccgtagttacagaatacacacaagatttttgtgcgtggt

SEQ ID NO: 163672 - DNA, 925 bp, Cannabis sativa
ctacttcccatggtatactaaataattaagtatcctccattttgccactgtgtatggaacagaaggtccatctcttgcttccacttcgtacctcttcaaatcagccatgaatcgttcaatttgttggtctgttgacatgacatttggtggaagaaaccctctcagactaattaccaaccaaaataataaattatttcataccggctatacagaacagagcaaggtcaaggtatagaaaaggaatccattaatggtgcctgctgcttctgctttggatcttgtatcttgacctaaaaccgacagagatgagagatgtgacggaaggccatctaattaaggcatgaactccggcgagaaaacaaaatcaggtggctgagctgtacccgctgcaaagggtgttcctggtttgggagtcgtcgttattgggttcttcccaaaaatctctttggggaataaaacctctgaaatcccaaaaatggcgactgagatttgatcaaaaactgtttgggtcacagatacttgaacgatgcatgtgttgattgccactcatccattaactctataaatgttgagcttgaagcttcctgcgcccatgtcttcccatatttattattttttaaattagtttaatataatataaatggaagtaatgaaaaaacttaaaagtatgggatttttatctttctttataaaaatataaaatatgagttaaaaaagtccatctaaacatatctcattaactttatttaatttatgccaaaaaaagtaaatactaaaaaattcccataatttatgtaatttcaactaaataaaaagaagtgaaaattacaccaaatatgggattctacaaaaaagtttgaaaaatatggcttttttaagtttaccacccttatatggcatttatttaaatttaaagttatatatg

SEQ ID NO: 163673 - DNA, 2810 bp, Cannabis sativa
taatagtgaattatatatagagaattgtttaaaggaattattggtgtctagtacgcttctcatactgctattgatgtaattaaatatcgagtgaaaataattttttaagaatatcgctaaatgtcacctatataaaaagtgatgcatactagtagtgctaaaaaacattactcttctctacatgtaaaatctctttttactttctcaatgtgtatttattattccatgcatgctcatggatgtggtctatatatgtgtatatatgaattagaataaaagaattaactaggataaatactaattaataagcctctaatttggattggcaatcgttatagccaattacatgtgtattataagcatttattaagtaaataattccacttacattgtaactcccaaatatgggtacgtacacgaacttataatcaataaaatcaccaatccttcccaatttttctcttttcatatataccctcttctactttccacttattacttttcgtataaatatatatatatatatatgtaaacacacacacacagtgtcattagtcattacacatacacatagatagttaaatacccatattttaattctgttagttcaaactttaaaatggagtactctacccaactcatcgtgccaaagattgaaaacccatttgatgttgactgggttttccatgaaaacccaaatgaaaagtaagttttttttcattatttaagttgtaaaaattcaacctttactttcttttaagtttataatgattcatattgtgtgctctgcttcattgatttcacatttctttaaacccccatttgccttattctattatataatatgtatatgtgtgtactactgttgaagattctgtttgaaatcgacatattgatattgtttggtatataaaaactcttcctttttgttttttgttcttgggtattattgcagcttagtatcatcagtactagattttccaacatttgatcaatatgagaattactcccaatttggttcattttcaaaccaaaatgaccaacttcctcaaattgatttcaacagctttgaagattttgataatgggttttcattagaaaatgcctttttaaattttgaagaacccaatatggttgatgaaaaggcccacacaaacatggtcattacttcttttggtcatcataatcatgacaaaaatttgataacttgccatgatgatgatgacaaaaacaatattgggtatgatgcttcaagagaattgtatggaagtttggtgaagaaaaatcatgatgaagagaccatgtcaaatggtagagtcaataataataacaatggtcatcataacaataggaagaagaaaaagaaagctgttcaattagaattggatgagattcaaaggtgcttcaaattaccaatcaaagatgctgctatggagttgggaattggagtaacaagattgaagaaaagatgcagagagcttaacatcatgaggtggcctcatagaaaactcaagagcttaaagtatcttttaaagaatgtcaaggtttgtatacatgtgtttttgtcatatatatgtataaatagtcatgagtaatatacttatctaatgctgatattttgggcaatgcagaatatgggattgagtaataatgagataatgatgttagaagaacaaaaaaggcttgtggaagagattcctgacatggaattgactgagagagccaaaaagctcagacaagcttgttttaaggctaattacaagagtaaaaggtctttagcatcctcagttcatcgatcttagaactactttcttatattgactttcatgactttacaggcacacaaagttaaaaccacaaaaaagatatcattttgaatcaaatattgaaaattatagtagtagttgtagtactacttttctagatagaggtttaatcatattagaattaccattgaaacatgttttctaatcaagtagtactctgtacaaagttgttaaatgtcaattttatgatgatgtggtttacttttttcactttataaatctcactttgtttctcttataaattctaattaagggattgaagtagttggctcttgtaagattagagataaatatatatgattattaattggattaatataatatatggtggtggtactactagtagtacacatcacatatatctatatatatatatatacattaattaatcaaagtggttgattatatcaagtattacatcatatcaaatagaagcttttctaatcatatcatgatatactatattagaaatatgttttccagctatatacaaaatcatgaaaggaaaaataaagaaaagttgaagcttatatatagaaaagtcaatgaaaccacaatcaagaagatcgaccaagactactagtatgattatttaatacattatatatatatagatatagatatatagatacatatttattatgatgaagagcccatttttctctgtttttcttgcttgcgtctccatgggaccacttgcttaaaactttcataaatgcttgcctgcatttttgataaaaatgtatacattattaccatgtatatttatatatatatatatatattaattatagctgatattgattgtatataataataataatatcaataaattaatgtgcaaaaagaagataaatattccatgataacgccaactatatcatcatctatagaaaccgcagcaaaccattattaagaaaataattaaaaaattaataatatatatatatatggaagaggtttcaatggttacatttttattgt

SEQ ID NO: 163674 - DNA, 876 bp, Cannabis sativa
ttttgtttttttaattatttttttggcttaatatatatgtcgtatcctttgatacgtgggctgtctctctggtttggagagttttgttgttaagtttttgttgttggttaatcttgttcccatggcgtcgagtagcagtattggcagagacatggaaggtcaaggtaatgctgttgtgctagaagatgaggaagcagaagtgctcagggtgatggaacacaggactgaagatgtggcgattgatacaaggtggtgtttggtaggaaaactcctgacaggccgagtctctgattttaatgtattccaaaacatgatggcttttctttggcagccggggatgggtatgtatgttaaagaactcaatcctaatttgttccttttccaattttatcatgaaatcgatatacagagggtcatcgatggaagtccatggacgtatgataggaagccgttcatcttcactaggctgaaggagggagagaatccaaggtcggttgagattaaacatgtcgatatgtgggttcaactccacgatcttcgttctggaaatatgactctaagtgttgttaaggccttaggaaactacattggttctttcatcgagtcggatccgaacaattttgtgggcgtttggagggactacttgcgagttcgagttacgataaatgttgagaaaccgattaaaagaagaatgaaaatcagcaatgacgactcctcttggtactgggtcaatttcaagtatgaaagattaccaactttctgcttcatctgcggaatcatcgggcattcggaaaggttttgccccagacttttcttgaaaccattacacctgcaagaaaagccttacggcttggagctgaaggcatcaactcaacg

SEQ ID NO: 163675 - DNA, 913 bp, Cannabis sativa
taattacctatttattagactctacattttattacattatatcccaattttttgcaaaacggatcaaaatacttcaaacttaattgttttcaaatataagatcaattgttgggtcatcagcaaaaaaggtaactgaagataaaaatgtatttaaagttattgtgaccaaaatcaagttcggatactattttggtctattttgtaaaaacatgttcaaaattaatatggattacttttttctttttcttttctctaacagcatgtttaaggtgaaatggaggccttaaacttgcaaaaatgcaacaaatggaatggtggatcgatttcctacaatgaggaacactggtaatatggtaaagaacttggacctagaaagaaagaatatatgacatcataaagaggtgatgaaaagtccatcacttgaccaaggctacaagaagaatggaagaaggggtgataagtcatgtgattcatgtgtcaacctaactataagtgtgtcagatttgaattgacttccctataacctaattaatgaaatttgtcattttgatgagtgtaaaaatgtactaaataatataatgattagttaacctaaattttattcaagaactatactaatataaaatttaaaaagaaaatcaactaagcatgtcaaggctaaattaaattgttaaaaacatagaagaatggaaggtcattggtatgctttgcctgacatattagataagatatttacaaaatttagtattttttcacttagaaaaatatcagagatttatttatttatttatttgataagaaggtgagctttatattactaaattgttctttaaattttgccaatcatgcaacgctagactgaccttgtgtgttgttgaaaattattttatcatgatctaaatttactaacatg

SEQ ID NO: 163676 - DNA, 1692 bp, Cannabis sativa
atatatattttaaataactataagtatatcaccatacaaaattttttccgtacatctcgtttaaaagctgcatattataaaattttcttatatatatacgtggagcctatctatctacagaaagtacaattattaccaaaattagccttactttcatttaaaggagaaaagaaattagccttactcaattttttctttcacaagtgtaaatgataacaatatgttttatatccttttctctttttttttttcattttttttttttgataatattaattttgtttttttttttcgtttgaaagaatcaatttttttttaaagaaacttacaaaaatattaaaatttaagttaatttttataaaaatactgtcacacgaaaatattttcaaaaatactgtgtatttataaaataccagtagaacacagaacataacaactcaaaacaaaagtagaacaactataaaacactaatgaaaacttaacacactataccttaatatgaaacttataaaaaatacagtaaaaaagtaaaaataccacatgacaatatttttataaaaaaataataaaaattagtataccgcttaaattttttttttatcacgattattcagtttttcatgcgcgatcatacaccaagctcgttgattatgtgtcaaaaattatatataattgttccttaaaaaaaaacttcgtggatttatagctttttctccccttttagagggaaatggacaagcttgcccccatcgttcaacactatgaaaataaattaataatcacaagaatattacatattgcattatagtaatcacaacactaacaacttatcatccacaaacatattttatgtatgtttatatatatagtatgatctataatattgatcttattctagaaaaaagcaaacattgaaacacaacacgagggcgtacgtgtgcaaaacctttgttagcaaactcgccacgtgctcaaccccaaatcccattaggccattaccatatcaattttcctcaaaatgatcatattaatttaagaaccacaatacaataacacaagggcttacgtgtgtatttgtactaactaaccatagttaacaaaactaaccctacatatatggttaagccctatatatactaatcactactccatgcgattcttcacgacagatgtccatgtctgaacaatcccaatagcattttcttcttctttttctttaaaaaaaaaaaaaatacaaaaccccagttaacttcaagcttgtgataatgaaaccattccttcaagctaaaataatcactctcttaacactcttttcctttggcttcattttgtaccaaacaccatggcctttcactctatttctctcaatactattctccttcgtatactcctttctcaaccggtggctagtccccggaggttttgcttggtcaaagtcaaaccaccgtttctcaaaactcaaaggcccaatgggctggcccatcttagggactatacccgaaatgggcccactggctcatcgcaaactggccaacttggccgcttctttcgacgcgaaacgcgtcatggcgctgagcctcggctttacgccagtcatcatcagtagccacccggaaaccgccaaggaaatcttgggtggatcttcctttactgaccgtccgatcaaggactcggctcgcttgctgatgttcg

SEQ ID NO: 163677 - DNA, 1789 bp, Cannabis sativa
aaagcaaaaaatatttaagtaatttgaacattagatgttgacgtcctgtatctaacatctacttctgtagccacaaacacaacatctatagtgtgggtataacatagcatggcccttttttgtttctcaaaggtacagtataacactttttctttgataatgtcattctgttccttcatgtttaataccttaagaagatatagaatagggtgaaagaatatacagttgtgataaatggtgtttactattctgaggttttgttaccatcgtactttccattattgtgttattgtaatatgtcctgattatacttgtgttcacaggtgcgagggaaaattggtgacttcttaatgggtgtctttgcagtatttcaaggtataaattattgacaggtagtatgttaatttacaacttcatgaggacattatcattttgctggaatgttgtgtacataaatttgaagcaatggatatattttttttctttttgggtagaaaaatatgcaattattgcataaaagaaagaggttttagcctttcttatgttactcccaagtattatctaattggccgtgcttatatagtgggttttttccctttaaaagaatgataatgctatctttgccttttaacagaaaacatttaaattctggattctgactcgtcaattctatttcaatagatctggactttagttttctggaaatgaatccttttacgctggtcaatggagagccatatccactggatatgagaggagaattggacgacactgctgctttcaagaactttcaaaagtattttcaagaactttgtgcttaaattcattatgaacttttcagtttcacatctactgtctactctttctagagtgtaacccatctgtgttattcatttccaggtggggaaacattgaatttccccttccttttggaagagttatgagccctacagaaagctttattcactcattagatgaaaaagtaatttcacattcaatttaagttttatagtatttcaaagttaagagcattaaaatcatattgatattgaagtttacacagtggtgatcagatttacttatcatgttgtcaaataaatgttgcagacaagtgcgtctttgaagttcactgttttgaatccgaaaggacgcatctggacaatggttgctgggggaggagctagtgttatatatgctgatactgtaagtggtccaactcatcatattcttatctctgtataacatggtgcaatgtgctactttcttccatatattctagaggtttttatgcctgcttatactattttatcattgatatccaatgtgatctataggttggagatttgggctatgcatccgagcttggtaattatgcagaatatagtggagctccaaacgaggatgaagtcttacaatatgctcgagttgttattgatgtaatataatctattttaagtttttcaatttcagcatcttgttttaagattttcattttagtgttgccattttaaatgattctttgcatttcatctcatgctgcagtgtgccactgcagaccctgatggtcgtaagagagcccttttaattggagggggcattgctaatttcactgatgtggctgctactttcaatggaattattcgtgctctaagggagaaggtgtgttctacttctagtgaagccactgttaggctttaggataaataaaaagggtatatgagtaattgtaattggagtattgagatggtatatatatgagagtaatagaagggttttggggtgtgaatga

SEQ ID NO: 163678 - DNA, 2567 bp, Cannabis sativa
aaaaaaaatacattgtctgtaactatgaatatattcttaaatctccacaggcctttactgtactcaccaagatatgtcgccagaatacgcaagcatacttttggtaagttaaaaatgtctgttaattccttgtgatagaaattgtgatttggtattccagtttaacattgatgatccttttattagtcagcaattggaataacaaagaagaggggaataagacacaagaatggaaatcataattgtgaaaaatgctcaaatttattaaaacaacatccctgcatatattatcaaaatgattttttaagggtaaattagactttcaggatattaataatttttttaaaaaggagtgtatgtgtgtttgtgtgtgtgagagagattgattaaaagggtcatgtcatcctaggatagtgtttgtgtgtgtgtggactttctccgttatggggtatgactcccatttccaatgagaaataaagatttttttttcagtatttcaaaattaacctcttgtaacaaataatatggattcttgatgacatgtttgtaaagatgtaagccacggaagtaggaatatactttcacaaggttggaaactttcattttcaagaggaatgcaaatagatattgctttttttccatagatctgcatttgtaattttgattgatgggagctcttttagcttcgacactccttttgaatttgaatcataatataccatcctccatgaacttgcacttgatagaactcttcattttgtaatgttaggatcatcataaaacttgaatcttgcttgcttccctaagcattaggcaatgtcccctgaattcagtcttgaaaataaatataacttaaattctgaattatgaccaaatttttcttcactcagggtatgaccaacaccgtcggagcagttcctggaatagtaggcattgctctcactggctacctccttgatataactcattcatggagtgtaagttgccattcttactatttctgttatataccttactctttaaagttttactcctaatccattcatacttgtaatatgcagttgtcattatttgcaccatcaatattcttctacttaactggtaccgtagtttggttggcttttgccagcagtaagcctcaaagcttttccgaaagagattgatccttttttctcaggttgcatctctagaaaccaataggagaaacgtttttggatgcattagcatggaaattagcttcttccactagattttattcttttgtatattcacataggaagctcttgcagttatacacaaatctcattgtaatattctgtacaacacattcgttttttttttctttttcatatataccaagtaatttctgcaacccccaaaagatgtattgaatatgcctgaaatgtcatattgtatagcagctttttaagcattacaagctctacatttctcattttcttgaagatgacttgtggaaattacctgtttgagagttgactggtagtgaataacttggtttacttgtctgattagaaagaaggggaaggagtttgtttatttgagaactctttttcttttttgtattctgttgcgaaaaaatgacatacatttgatttgtatcctatcccttattgtcaatggctatattataagcaaaggaaccagtttttctgttccttaggtcacctatttgcaagctgggaggacaacatgaggtatgtgaacaaatacaatagaaaaagggcgaaccactataggtgttgacgaatttacataaataggatctaaagaaggtatgttcccagatgaatctagagtcaaaatgtttccattaagcagcatggttcggctttgtagattaccatctttggcagtaagatgatattcttctctcataggctcactcttgttaggtcgaggcatcttgattgcctttgctttatgagaagtccttgttttgtgaggtgtaatacttgatgtgtgatgactcctgtgttttcgacggaaactccacgttccattgaatgcaacagtggccagaactgtggtgctgttgtcaaggttgcttagtagcaccataatccctttctgtattaagacaaagaataagctcagaaaaagagggtgaaaaaacaacttttgcccaacaaatgaaagtttgtggtttaaacatacagattgtttagcacagtgagcataagcacgaattttcttggacccagaaaagctcgttgataggacgtttcttcccattagccggtgccaaaggagagcactgccattaaagaaaaccaagattcaagcattgttaataacaagaatgaaattctgcataacttctttacttaggtaatggtgattgctatgattccaaatacctgtaatagtctggatttggtatgaagttattagtatcaagcaatccatagtttcctccaatcaatgactgtctacagtatgttttagtatcatgagctgctgacataccaagctgatccaaatacctgtttttttcacttgcaatgtcattatgctatgctagtaatacattttaaaaggattaaata

SEQ ID NO: 163679 - DNA, 925 bp, Cannabis sativa
caatccaaatgaagataagttcctaaagcatatgcacatggaacaatagtattaattggttaccaaggagtagagttggtggaagtttattaaaatatattatagaatttattaaaaaataactaaactaagttgaatctcagacacttacaaagatatgattctaactggatcttgactattaaacctgcaattaagaccttcccaggtgtatacttttggagaacatggatctccttgccagtttttatgaactccatactgagactttatattaaccatagcatccactagcaaacaaaatcagaaaggtgtaattaagttatatatgtactgtttgtttttgctaaaattaataagttccctgttatagttaaatacatgtctcaacaattacaattattaaatcgtgtctcttaattttttgcagctgcttaaaatttcttctcaaactatacaaacaattaaaataaaatttttgttaagttttatttcatgtgattaacaaaatgctggtggatgtgttgttgtatatgagagctacatgtttaaatgaaaattttattttcttattaacagttaaaatttggaataaaatgaataaggttccatctcaaaattaattggcaatgagatgagttgtaaagattcggtttgaccgagtcaaatatttttatatatatataaaataataattaaataatatatatatgtacgtattaaaaaaaaaaatcatatcatatatatacataacagtaccccttcgtccccctctctctatatctcattttctctctcttcaaacactaaagctagaaacccataaaccttcataactatcactccggcgaccaacctccggccaccgctcgacccaacgcgccggtcagaacggaactccaggtgccggcgacctcacccccca

SEQ ID NO: 163680 - DNA, 2219 bp, Cannabis sativa
  modified_base (1054)..(1056): a, c, t, g, unknown or other
tcaattgctcggcgtcgttttccttgttcaaacgacgtcgttttaatagcttaactcatctgataggggctttgttgaactgattttttttttatatatacttttgccacttgatagagccttctctgttttgttttgttttatttaattttcgtaaaaaaaataattaattatcaatcattcatttatgatgttgtcttgttttagttttttctcatttaataaatatttattatgtttctattttgtttataaatattttatatgttggataataactctatataaagagtttgggctgtaagcgaattgtggtgagtaaaaacaataaaaattgtttcaagtttatcaaatattttccttttcaaaagttaatagtcgtatccgagccaataaataaaaaactgcatgtgagagagtgattgtgagataaaaaataggagggagtgattgtgagatgatatatttaatatttatagcagtaattatatttaattttatttaactttcttttctgttttgcagtaaaaatatggctgacaactttgatcattggagcatattgatattctctgttttgatggtcactttgatgattggagcatattgatggaaattttctgagatgtaaagtattgacaagttgtctccaaaggaattattgaaccagtagccgacatagtagtggcagatgcacaaagagcggagttagaagcacaacagttgaaagatcttcaagcaaagaattatctcttcgaagctattgatcgcacaatcttagagaccattctttgtaaggacactttcaagcatatttgagattctataaagaggaaatatcaaggttctacaaaggcaaagatgcagcaatttcaatcacttcatatggagttcaaaacacttcgactaatttaagatggaagaatcaatgtcatactatctcacttggacaatggcgactgtgaacaaatgtgaatccacggtgacacgaaggagaacataaccgttgttaagaaaatactacgaacaatgatgccaaaatttaattatgttnnntgttgtatagaagaagctcataatattaatgaacttttcgttgatgaattgaaaggttctttgttagttcatgagcacaaactcaaccagtgggagaaggaaaaggaagagcaaccctcaaaagcctcaacatacaataattcaaagccaagaggagacagaggatgaggtggaagcagagtcaaggcagaagcagagttgaaaatgatcgtggaactcaactacaataccaaaactaagataattattcccatgactcacatggatgagaacaagggcgaggacgaggaggccaccaatcaaatagaccgaagtcagcaaacaagtttaatttggaatgctacatatctcataagtacagacattataaatatgaatgtcgtgctaatttgaatagacaaattgaagatgcaaatttaggcctaattgctcaagttaacatgatgacgaattgaatattcccactttatctccacaataccactcattcgtgcctatcatgaaaattgaaagatgcatcatggccatgacattttctctatggtcacttgaattttggtggactgaaaactttgcaacagaagaatatggtgactggttttccttcaatcacagctcccgccgaagtgtgggaagaatgtgttattggcaaacaacaacataatctatttccacatggacaatcatggagggcaaacaaactattggagttgatttattcagacttgtgtgggccaatcaatccatcttctaatggaggtaaaaaaaatatataactaccttcattgatgattttagttagaaaacatagggtttatttttgcaggaaaaatctgaagctattggagcctttaaaagttttaaagtgctcgttgagaaagaagttgacagccccatcaaagttctttgcactagccgtggtggagaatacaactcacatgaattttcaaatttttgtgagattcatgcaatcaaatggcagctcacagcatcataccaacaaaatggagtatgtgagaggaaaaatcacactatttttaatatagtgtgaagccttttgttgaggagtggacttccaattttttttttttggctagaagcagtcaattggagtattcatattttgaacagaagtcccacttttgctgttcaaaatatgacac

SEQ ID NO: 163681 - DNA, 2572 bp, Cannabis sativa
caactgaggtatattcctctctggatgaaagtctaatttagtccttttagatattgtttttgtggtatggcccatttcatagctgatgctataagttaaggttcaactctcttctctttacgattccatcgtccttttcctacgaatccgtgtgctccttgataatacaaaatcccttcatagaggtatgaatgttcgtttttgaaaacttgcccttacgaaatggcttatgttttagtatgagggcatccaaaattattgttaccactatggtaaacttgatcacacatataccaagtgtgacaggttccttcagcattgtgatacctacgcctatcccccttccttaagctacaaggatactcttagggctcctcctaaaacttgttataaaaagagcatctttgagctttccaactcaatccctttcgaagaacaaccatctctggctaacacttctagtcagggtctccaagatgcggtcaaccagtttcttgtcccagcctcaataacacagcttcagttcattcttctacacctaccacccatccaactaccactctcacctccactctgacatgcaaccctaatccaatcaccatcggtaccaacactcaaacccttacacaccctgttacatctaaccaagtcactacagcctttattttcacccattgccactaaccctaccatgattaccactattactactgctacttctaaaggcaaaggtcctgtattccctgagcctgccaaggccccttctgtggttttttcaacccctcgagcttctactactactagaacaaggtctaccacgaagaggactcttagaagtatgctgaaaagagctcgctcttccaactctgactttgccgtggttccttctatgttcgacttcaatgaacaagcgggtgttacgaggcaaccttgcccagaaaaataagttttatcagtaggaatgctcgtggattagggagttcccaagcattccaaaatctctccctcctgatcaaacaacatcaacctcaacttctttttgcgatggagatgaagttggctgctaattctggtcatatgtttaaagttagattgtcttttgataatgtcttttgaggtccctataaatggtttaggagacggattacttctcttttggaatgatgttgtaaatgttaatattttatctttctcgtttagccatattgactatactgtgttcatgaactcccatacttatttccatctttcgtgtttctatggttcaccctatgttaatgataaatataactcttgggttttattggatcgtctctttgatgctcttccttttccccttggcttataataggagatctcaatgattatttaagttataacaattgtaatactactactttgcccctactcatgcaatccataattttcaatatttattggtaaatacaatatgtttcctttgcactacggtagaaaccactttacttggaaacatggcaggaccttagagcgcttagattggggtattactaatcagtcttggcttgatattttccccaatgcgactcttgttcacctccccttttacggttccaatcatcgtgttattaaacttgttcacaaccctactccctatctcaataaaaaccataacaggttcttcttcgagaaccattggattttggagctagatttttctaccctcatcactaacacgtggaataataatagggtctctaataatgctcccaccactgttgacttttttcttgacaaacaagccaactgcattctggccatgaattcttaggccaaggataaaattgattttaagaagcaaatcatcgatatccacaatgccatagatcatatttactctcaacagcccatttccaatcacaatatcaagcgtgctaaaagtctttagtcttccattaacaccctcttgctcaaggaggaggaggtttattagaagcagcgatccagggtctgttggctaaaagccggtgacaagaatacaaaatattttcataacaaggcttcttccaggaaaagaaataatacaattaaaagtctcatccttgatgataatgtcactgtccacaactatcctgacattaccaataactttgtccaattctattccaatcttttctcttcaaatggcgctgattttgaatctattaacttgattctcaggtgtatcaccaaacatattaatcaatctcaatgcgatctcctagctaatcctttctctctcaaaagtcaaatatgcccttttccaactctctggggataaggcccctgacccggatggtattaaccctgatttctattaaaagaactagtccacttctagaagagacctttgttttgctgtcttggatgttttaaataatggtgctaacatggctcctattaatgaaacttttgtcactcttatttccaaaaagaataatgcggtcatggtttggtattttaggcccataagcctttgctcgaccatgtacaaggttgtggccaaatccattgctaacaggttgaaagtggtgctgggttttatgccctaaat

SEQ ID NO: 163682 - DNA, 711 bp, Cannabis sativa
acctacagttacacatttagactactatggttcagatcatagagccattttagttgatgttaacttcacaatttaggctcaatcggatattgtagacaaaaggagatcaagatttcgttttgaacaaatttaatagaaagaggttgaatgtactgagattatttcttctaattggtactttgataatgaggacgatccttcaatttctcttacaatgtgtttggatcgatgtgctaacaattcacaatagtggcacgttaagaaatttgagcgtatgaaacaagatatcagccatgctcaaaagagagtttccttgctgcataactcagatgcaccaggtcccaatcactgacaagatgtgttatctgcagaagtgatcttagatgaactcttggctaatgaagagcaatattggcaacaatggtttaggatggaaaggcttaaatctggtgatcgtaatactaaatttttccatgccaaagcttcggctaagaagtcaaataaccagatcaaaaattgcaagatgaacatggtaatattgtgtcttcaagggagagtatttgtgatatagttacaaattatattgatcaaattttcacaacttcggaggaggatcattgggctttatcccatgttttatccacaattccaactacaataacatctaaccataacgatgttgggttttgtgccctaaataaaacccattac

SEQ ID NO: 163683 - DNA, 1337 bp, Cannabis sativa
tgatacgattgatattatttgttaagattttataactaattacttaaccgtatttatagatcgtacacaatgtatatatccaaaaatcataacaaataatatatgtatttattatttaactctctaattatttgttataattttagaacttacttaactatatttacgtttaagtattgaattagattatctaaaagttgtccaatcaatctagaaaagaggaaagtgtacggaaattaatggaatgttaaagcatattcgaaggttattgttacatgataatttgttggtctgtcatttgtataacgtggagctagctaagtagctcgtagtttaactaatcaattaaactttaacaaaattagtgatatatatgaattgggattaatccttattgtctaagcgaagttttacaacttgatttgccaaatcctacataattgtgtttgtgaatgaatgaatcctatttaaaaaaaaataaaacttaaatatatttattgattgtatatatattaacaagatgtaacagatacaattttttacaatatcatttaaaaaaataataaaaaaaatctaatggttagctctgtttttaattttgagaattgtgttttaaaaaataaaaatataaaatagtttttggtcatttttaaaaatttaatggtgtttggctaatattttctaaaaaaaattgtttttagatttttttcattaaaaaaacttcaatattctacatcataccatgacttgaacccaaccccaccccgataccaagacctggacttagactcagagcccgaaccttggaatccgaactcatacttatgactcgtgaccagtatatgggtccaggtatgagtccgtgtttgggtcttggtctgagtccgcgcctgagccctggtcctagtatcagagttcggatctagagtcctagtctaggtctcaagtttcgtgtgggtttcgactcttattatcgtgttggactcattttgtcgaccccactaaagtcagtcattgatgtaatactatactattattgtaaaaattattttcttcaatgtggtaaaaaaatgtgttaaatatggcacaatattgatttaatgtgccttttttatttatagtatggtcttataaatgcacctttttaattataatattgccattaatatttttcaaaacctttaattattatgtcaatttacattgtaaatttttattatgtattggaggaatatttatgttgaggtggaaatttggacacagatctttaagccacacatgttcgctaaattaacgagaatgaattataagttaagtatatatatgagagacacaag

SEQ ID NO: 163684 - DNA, 2200 bp, Cannabis sativa
  modified_base (2155)..(2158): a, c, t, g, unknown or other
tagtggcaggccagaccccatgccctagcctagtggccggccagaaacccatgtcccaagcatagactggccaacctatggggtacacccccttggccgaccagatcccttgaaatccatccttggccagctaggtcttaaacaagacctccttggcgtgccaaggcttatacagatccaaacttgtattttttcaagagcccaaacatgttgttcatgttcttcgtgttctttatgactcaaagagccaagaatcacaacgaaggtacattcagattttttttcatctagaaatcacacattacttatcctaagcctataatgcaaatcaaaatattgaaaggacaacaatctaatgtagaaatcaatggatgttcaaagcagagaataatattcatgctttcatggaaaaataaaccaaatcaagtataataacaggaatagaaagcttacccactacaagaaaccaatgaggaagattttgggaggcttggatcgtcaaaacgacatgaaaatcccaagaaaatggtgcttgatgggttcggccctctagagagaatgaggagcttcttcaaatgtaaatttctagtgagagaagtgaaatgtcaaaagtgaaaaataaaaaaggattttccccccaaaaaagcacttatatagtacatgtgggacccttacttcacttacttcacctacaaaacaaagaaataattaaagcagttattttcctacagcagatagatcagacagtcaaagaaaagtatttccaaaggctaaaaacacatcaatttttattcagtaaaggctacggaagttccagccgcatcaatatggttggtaagtccctatccgtacaaacgtccacacagggacttgggggcaaatgttatcccgattgttgtccctgtgacgtgccagtgcttacatgaacaaaataagtgccatttggtagtacaactcaccaacgagaaggctaagtcaacacttaagcaaacggggaccccaactctcaaacgggcatcaaatgatataccaacttcctcccagaagctggttgaccaaactctggatagcaccatggctggctagcctacttcttacaaggtctctctacgcaggaaaaggcctgcagggttctttgtgcattcctactcctgtataggatgactgggctacaaattaggccctaaaagcccaatagaatagttggataatatctatgttcaagggcactttggtcttttttaattaatttattaaatatacaaatatttagagtttcaaattgtaaattagggttttaggcttcctatataaaggccttaactctaatctagaaacctaagtctaatataagtaagaaataagccactaagaccaactcaagtctgataactctcttcttcactctctctcacacgcccatactctcaacacttgagatttgccaatcccaattcctactttgtatccttaaaggtgttatatcatatcccacctatagtgatctgaatagtattaactctcggtattaatacaactgaaaggagagtaggtcattacccgctatcaaagggggctgaacctctataacaattttgtgtgttctttactttttattttgtttgtgtaacatgtggtaagggttagatccatatgatcctgctgtcgattgataacttttcgaggtcaacaggaggaaatgaaggttggtggcggcattctcatttagagaaacatggagaagaaagaagaaaaggagagtcttacatctgaaagtagggtattatagacctatgtctttggttattttaaaataactgatgacataggccatcacgtgtatctaatattgtgttagggtagttgagacctatgtcttcggttatttcaaaataaccgaagacataagcctccatgtgtgttaggatagtggagaaaataatcgaagacataggccttttgtagtagagacctatgtgttctgcaatttcaaaataatcgaagagatatctatgtcttcgattattttgaaataacttatgacataggtacgcgaattttttctttccttttctccttacttttatctttgaattttatattttgtgttatcccaatttttgcacactaacgtggcatcacatgaatggtgacnnnnggaatccacttggaacatctgctcgggaagcatagtccgagc

SEQ ID NO: 163685 - DNA, 2050 bp, Cannabis sativa
  modified_base (1986)..(2010): a, c, t, g, unknown or other
ttaatgtgttggtaacaatcataaagtaaaagaaatttgattttcaaatgtgatcccacataatcactataattgatatagaggtttgaaatgctcattttgagatactagtttctattaagaaaacacattgttagaaacccttgataattctcaaaattattagagttttcttagtgcttagaaatgtgataaataagttttaagacaaaagcataaaatcttgttcaaattttggtgtgagtagattagtcatgaaatatagtgggtcataagaaaaaaaatatttttgagctcttattaaataataataataataataataattttaaaatgaattttttttctctgaataagtgggccctaagtataggcttaatccgcttatgtctagagtcaagcctgggtgtggatgagagatggtcttcctatttttacttggtattatgtatatattatataatgttataatcacctttaaagtagaagtattgtaatttaaatcttatgttgatatttgtatttttattgcaattgaattgtaaatattgatttttttctactctattaatatatcatattagttatgatacgttcatgaacaattaatttacaagattttgatgagggtcttacaaaatatttttagtttgagggattatgatatatattggacaaaatccaactctctttggccctgcagtttgaatatttggcccctttaaacaaattactaatgactgatgaattaaatatttagatcataaaaagaaaaagggggcaaaaacctttttctcatttttccaacttaattatatatatagattaaaatttatagttgagtttaggtataaatattgtaaagtgtttagaaaagattatagccaatttgcatgaaagtgagggagctagcgcgtggtctagttggtgtgagtggctctctacatcactcaacatcaccttccacttcacatttctattattcttttttttatatataataataatcattttaattaattttaatattatcattattacttaattaatagttagtatacattagatattggtagtctctgtaataggtttggcatggattaaaatggtaccacacataaattagctaattaaacatagataatgaactttttttaatggaagagtttcatctttcaatttgtactaatgttttttgatattttccaataaaatggatcctacaaaaaaaaattgtttttttgtattgttctagaaattttaatgctgtaacattacactttaaaagggtcttgtaacattatttggtggttaaattatttaaattgtatttaaaacttattaattatagtagcatatacttaataatgaactattgagtatcttggtgattaaaaaatagtatagtataaggacatattccctttaatattggtatcctttcttcactagcaaattttcacacgcagctattttaggtccacaatccatacatttacactttttaacacatattatataaatatgaatttgtaaaagttatatgtataaattataagtagattaagttaagtaatggctagagttttagggtgtggaaagttgatcgttaagccaggggaccacaattaggtaattggttcgccggttttattttatgattaacaaacaattaatactaatattatatgtaattatataaaatatatgattgttaatatttttcatgaaaaagtgaaattatctttttttattcgtattggaatcgtaccgattgtggttgctttttctggttacattcattcacaatatgattaacccaattggtgggttttaggttttagtgttttttttttttaattaatttaatttagacatttgtttggtatatactatcaatcatgtacgtacggcaaaatgtagttggttgggtttgcaacttcatatggtgttccttcaagtcattttcattattattattattannnnnnnnnnnnnnnnnnnnnnnnntattattattattattatggctttctttgaataattacat

SEQ ID NO: 163686 - DNA, 1443 bp, Cannabis sativa
ggcataaaacccaacagcctgctcgcggggacgaaagagatgataatgaagatgatgcaaactctattgagaatacacctttggacgaaccattttcctgcaaggactcggctatgcaggtaagtaagtctgatttgacgactttctaaaaactgaagttgatcaatactttttgtacaaaacctgtgtcaatacaatgtcctcaccaactcggtaattattccgactagtgtcgttgtggtttcaatccccatcattcgttgtggtgtcatggttctttccatctctttgtcaaagtaattttgaaatattacgatgtttctcctttccaactcatgccaacagttgtaaagaccaacaaggagcttgcgactcattcttctgcgaaccctctccagaagaggaagtttgaagttgttgatcccccgactatcaatttatccaagaagaagaagaaggttgcccaagaaaaaaggaaaaacctatgatagagtcgacgactaaggctcgcaattttaaggctccaaaggataaatatgtcagcgatgacttcattgtccagatcgaggggacacctatcgaagacatttgggcttgctactctgagtatatgattcaaggggtgacagtatactcgcgagcttttgctgcgaatcaacaggctcttaaggactatgagcttttaaagaaacaaaactctgctcttcaggatggtttgaagaaggctaagctctacatggccaacaaggataagaaaattgaggattttggcaaggagaaagacagggtagacaagaagatcaaaaagctggaggagcaaatcactaatcttactcgtaacttgaacaatgagaaagaagaaaagaagaaagcttacgactagatcgttagcgactatacctacactaccttgaccaagctgccaaacttcgattttgatgtctttgttccagaggcagtcaagatggccatcactttttcgcattatgtctccaactgaaacccaaggcttgtccaatactctttttcctgaagacgttgctcctagagctgaagtcgtggatgccttcgagaaagttgcagagaatctcaatgcccctgcaccttagaaaaaactctacttttgtttatttcctttttaatagcagtacaagggtacttacactttgtacttagcttttaagataattgggattcacactttttatttttcgcagtttctgaacaatatatccttcaaggatatttatcaacgtatttttatatgcaatttatactttttatgggatttcaaatgcacattggtgcatctattatttagcactttatgtaatcataattgtagcttggtgtaaatttttgtttacacaatcttttataatgcaatttatgaacatctcaattgtaacaccctaattactataggcgtattacgtgattttt

SEQ ID NO: 163687 - DNA, 1105 bp, Cannabis sativa
tttaatatatataattcttagtgatgttacacgaattagtctttattatttagaaaaacattaaagatcactttaaggtatcaaacactataaaatgtacgtagcatatcgttatcacgatattagtgtaattcaatattagatcttatacattttaatttaataaataatataaaaacctgttaatcgcttcttatgcgccacatcgttgtagtgttgagcatcataaagtgccttataaaaatgctcaattatttagggttaaaaatgtataggctcaatcactcattaaagtccaaaggaaaataaacgagagaggaaataaatgggagactccacttgttttcaacaacataaactatttccttttaatattggcataaaataagcttatatatacaaattgaccattgagataaaatttcatagatgtatgagcacaaatttgtatacaaattgaaaatttctagttaacaaatacaactgttttgtattttttattgtatgttttttaactgattttggaatgtaatcagtctctctaatatattattagaatatgcaggggcggactcaaaaattttattcaacgaggaaaaaaaaaattagaaaggtgagtaaaggtaaaaattaaaacatgtattgtacatctttcttagcttgcaagttatgtattgtgcattattctcatattttgcattatataattggaaaactaatattataatagcaaattgttatttcatctctttaaccaaaaatgtggaaatggaaaaggggactttaatattttccaaaaatattccactagttattaaatcttataaatgagatatgacagtgtattgttttaaataagatatacctattcatttttatttttgagaaaaagagaaaactatttattttacgtatatatgtatatttaatgttttaagagtgggtagctagatgagaaccatattcacacaatattctatttaatttggaattaaataggttttaaatgattaaataaatcaactacaaactgcataactaaagccatctaattttcaattaagtgagtcacatcctcatacacatattaattattattattatt

SEQ ID NO: 163688 - DNA, 1965 bp, Cannabis sativa
tctctctctctctctctcagctcatcctctcagtcactctcgatccctctctgtctgtggtggacattgaacaatcggaccacacctcaatccctcaaaaatcattcaactattataatgattaagttgtgttttaaccattttttagacattaggaatagtatgtggtttgtttctgttatatatgtgcgatgtttgtttgaactggtgttattttactatttttttatccgaaatgctagatctggttttctctcagaacctagattttttactgtttatcgatagtttattgattgtctatcgatgtaatatcgatttcttgcaagcaaaggtcagtgatgaccattatcgacatgatgtcgatatgttgttgacatgttgttgataataaacctaattttaagcatcgttgtcgacggtatatcgacatattgccgataatatttggaaaatattttatggtaatttttatcgattatttgtcacttgtttatcgatactttgtcgatgtttggaatatttttttggtatttttatttgttgatattttatcgatagaatgtcgaccttaatacaaaaagagtgaaaacttttaaacataagtaaagacgaaataaagtgaaaatttttaaacataagtaaaagtgaaactagtaaaaacttttaaacataagtaaagacgaaataaagtgaaattttttaaacataagtaaaagtgaaactagtaaaaacttttaaacataagtaaagacgaaacaagtaaaaaaaaattaaacataagtaaagatgaaacaatcatgaactttaaaagtaacccctaaacgttaaatttaaaagtctcggtaatttgggtgattcatgcaatacacgcacaaccacccaggaatgaccggttcgcctttaacataacctactttgcaacgacagcacccttgggggaaccctaatggtggatatgcaagataaccatccttttcaatgtgttggaacctctatttgttcaccagcctttcacgttcaaaccgttccataaattccaattgctctttttgcagagtgcgaagatattcttcactacgtttctgtttgctctctttactagatatttacaacttgaaagagaagaacactctagggttaaagaataagaaagatatataacttataaagtataagttttcttttatagactagaatagttgttgagaaggtgtgataataaatgtcaaaaattaattagcattaaatgtccaattgtacacgtaattgtcatgcaatgtgcatttatcgataatatatcgatacgttgtcaatagtttgttatatatatcgacatttttgtaaagtgtctcaaatgcttcaatgtcaagacatttctatcgataggatattgatcgaatgtcgagactccatcgatttatttcactgctcaaaatcatgacacttcttattgatgggatatagatgggatattgataggtcgtcgatcatgttaaatgtctgctatttttagggtttttgataatttttggttttttcttaactaacttttttttttttgaattgcaggatcgactatgtttctttttatatcgtacgatggtttttagtgtgttgagggttttaattgggtttataaagccaaaggcagtttgacattgacagttagaactgacacaaccatacaacaatgtcaaacataaattttataccattatttgtgaccaaggtaaggaaagttgggaatctggagcgtactctgcctactaatcctctctttcaaagtgtggtaaggtttttcgttctgaaatagatgttgggattggtgtcaatgatgaggttcctactaatgtagatcaacaacaagaagctattgggctttcttccctaaataaaactctattttaatgtaatattttctattcaattatcaataaagaaacagatttattttcattactt

SEQ ID NO: 163689 - DNA, 2137 bp, Cannabis sativa
cccccgccgttggctcatcatcagacattgaaggaaccacgacgtcttcagtgacaaccgcccgagctctttccagcatgctatgcacagagcctccaacctgggcagtttgacgcgtgaagggtcgtctggttccagaggtgattccaggagaagcagtggatcgtggttccccaattaccacgcccttgcttccacgattttagggtgaagggctgggaggcacaacaatagattttcctttgtcaatatggatggtaacagagtcagtcataatcggttggggtatggtagtgtggggtaaggatgcaggtagggaaatgggaggatggttggaatcagcagttacaggtgcttggcatgaaactggaagagaatcagaagtttctacccggaggaattggtccacagcttgttgaagggtttgatcatcagtccttgatcgaggaaaatattcttcataagggatggaattagagagctcaaaggggttccgtttgtgctgagtggaagtagtagcacagagagtttccgtgtattccaaggcaggagggacagagaaattgtcgcatcgcataagatatttggtgcacttgttgtaggcgtgatccacatgaccacaaaaataacagaaattgggaaggatttcgtacttaaaaccaatccatttagggtcattgataccacgaaaacgaatagtcatgccccgacgcagaggcttggtgatatcaaaaagaaccctaagacggaggtaaggaccgaaattctcaagcaaggagagaggaaagatttcaataagctcacctatctcatcagcaatgaattgagccaactgagggcttttgagaccaaacggaatccgatgagcctggacccaaaaggggacgtaacagacagagtcaggagttggggtaggggacacatctgggtgggtgaaaaccataagaaatttatcaaaatgccacggttgttcttcaagaacacgacgacgatcaccgtcgcattggaaagaggcaaggaataagccagagtggtattcagagatctgaacaggaaaacggagggtccaagcttcaaacatggctttctctatccatgaaggtttcaccgatttgggagacaacaacttgaaaaacagacagaaagagttgggttcattgggtgagtgcaaggaaatgtggtcaaactcgtgaataagactctcttcatcttcaagggcagaacgaggaatggggtttcgagaagaggacgccatggaaatcacagaaaagggtaaaacagatttggaaagagggaaagaagaaggttgtgaaatgaagcattgcacacaggtatttaaataagtggtggcataaagaagcaagagaagaagatacctggaaaagaaagggcacctcgaggagtaaatcggtccctgagctgcctcttcagtttctgctagagctgtctgaagatggaggcgataggtaatgatgagattggggttaagacagaaaatatcccaaatgacggttggtttagctctgtgatttctcgagggatagaggaagagttggagagattgcagaagcattaattgcgagattgatggtgccgccaaaattaaatgaagatgtgagagagaaagagtattaaagactgtttgtgctcgaaaaaataggggatttttcataatgattaggatgccgacttaagtaataaatgcaagaccagagtgaggggagttaatgcggagtgaggatcagagaaaaaggatctaaaaacagattatattgaaggaggaaagaaagcaagaaaatcttgcaaagattgagaccagagcaaagcctgtaagaagcttcaattgatgatgttgaataactaagagaaaaaaatgagaaatgttataaaataacataaaataaagagaaataagtgaaaagagaagtgagagaatgagagagtaaataagaattttttagtaatttattttaatttagtgaactcataaatagagatggaaatttatacagcggggatgggtaaccgcgggaaccagcccctaatgggatggggattccctgtcttggtggttaatgggacggtggtgggagacaatttcaatacccgaagcggggatggggcgggggcggggata

SEQ ID NO: 163690 - DNA, 1824 bp, Cannabis sativa
cccactaaagcatgagtttggcccgataccatagacgtacctggatgggcccccccattatcacattgggtaatttcagtcgtattggggacttcatctgtattggtcttcatgttcacagtaaggtcaggtattggactttgtaccaatgtgctgggttgtatgtcttcaacgttcgactgcacgctgagggtaccatcgctttcgatattgtctcctagtgcctccgaagaaggaatgtttgcagtaactttcggaaccaccaaatttgctgtatcctgaaaagggcatatttcaccaatgccggggagggtaaccatcggaaaacgacttaccctttcttcgtcagtttccggcatgtcttccaccacctgctccaccaatctccgtttccctggaagttgtctcctagactctctagcctcccaagagtccgcaatccttaacgaattgttaatcttccattgttccttaaactttgggtccaccgttagccttttctgaataatccattcctgaaaccacctagggaggtctgaagagaatggccatctagccggatcttcgtgcttcatccagctcccaaatagcggaaagaagactccattggagtccttaaccaccgtgggaggcttaaaacagaatttctgttcgtgagaaataatcccacacttcaggcatagtttggggagtttctcatatttgtattgaatccataggtcttttatggcgtttctcttcataaagaagccagagaacaatggtttatccacatctatggtggcccggaatcgaacagtccccataccaaaagagccccgttcaaaatcgatgtacctaggtagcttgtagtttggggatacttttgcagccagctcttccaggttcgttttgttctagtagaacggtgggattccgcttagtctcacccagacaggagacttatcaaatactatctcagccggagctaaccaggaaggccaaggcatgatgatcaacaacgctccacaaacaatccaagggcgtctctgaagcacattccacgcatcttccttagtggcaaatgagaagtggagtattccatcgttgtcttctttccagctccaccctttaaatgaggcccaagcctttttgagagtaccggcaatgacatttctgctgagtttaccacgagatattaatttccccaacagaatctttccttgaggttcttgattatcgacttcccccgggtccaaccgacaagtaaggtcagctgtagacacctgaactgtttcctcaaataaatggctgagactgttgtccgccatgacaaataaccgtaagacctgctccgagataacgcaaaacactgagtaacacaacaagacttgctcactgcaatcttgtaaacttccaagttaatgggaagaactcatcacagagtagtctgtttataagattaattgagaaagctgaattaaatctaacattacttacaacagtttttttaaaattgaaaaaactttaaaaaatttaaactatgatactaaaaatatgctacaacagtaattgagctgtcttagtaagtaaaaactggccaccattttaatagaatattaaagtccctatcactaaaatgtagaaatataacacatatttaagatacactttaacactcaagagactcgaagtgagagatggactacctaatgacaccttggaaaacacttcgcaaccattgatttattctttttttttttttgaatttagacctgaataattattaaaactaattaggatttttttgttaaacttttatttgggcttacattaaattttatt

SEQ ID NO: 163691 - DNA, 1342 bp, Cannabis sativa
agcctgacatttctactgtttacaatgctcttgttgctcctagttcatccaccatccttacggggttgttaactccatcttctagattaaatcatcattttcctcatcaaaagaatttgtgtaatattttatatagccctactcctatttagtccatcctttctgattctatagtcgttcacattgaaagtcaaatcagcattcctgataataggattgtatcgacttatgcactttcagatgctaaagttcttcaaaaacatcttcatggtagtgtaatggacactcctacttattttccttatgaattgggcaatagtccttcaatcactgctatgctccataattttttaatcttcccaacctttaaagttcttagtaatttcaacaatgcattcaacattcctttcgccaattgctacattcaattgacaaggtcactaaatttccattcagttcaaccttctcaacctcttcccctagtatatcttgttgactagtggaaattatttcggtaacttctaataccttgggtaattccattgcccctaattcttcctcttcttctatagttatgatttcagactctaagcaaatcatcgtctctatagctaaatccccatccattcccaatcctctgcattcatccattgattcaagttctcatgagatcgccactgtttcaaaattaaacccactagagctatgctttgctgagaccgacaacgaaaggtggtttcgatcaactccgaaaagagactgagtgtagtcttgcaactatatgattttggacttgctactgctagaacttattttactgggattttaatttactaacatgtatgttgattataagcattataatcatcctaaatatgaacaactgtaaaacgataattaaacacgtataaatttgagaaatcttgcattggttgcagtagaaataatatgacccctttcgttctttactctaactattgtttctttctgccgtaaagttataacaagtactgaacatggatgctcctttgaattgttaaacaccttctaccagggccgaccttgaaatttagtgggccataggagaaaaattatttttggacccttatttaaaaaaatatggtatttttcaaaattagcaaaacattatgtaattttaaaaggagaagatttttgttgggcccctgggctaggtgagccctaggcacaagcctaactcgcctgtgcccagggccagacatgccttctacacagtcttccacactaatctgagtattgtctagaattgtatgggaaatatctcaacactaaagcacacaatttttagagagagagagagaga

SEQ ID NO: 163692 - DNA, 573 bp, Cannabis sativa
gagtagttgaattaacttccttgagtagttatcctgaatgtagaaaggaaagaactacctcacaaacatccactttgaataatacccagatgtcctgtaagaaataactattgaaaacaactagactaggtgatttactacttataatattaaaaagggatcttttacatttactttagtacattcgtgtaacagaaaagttcccctggattcaggcaaaactagactattttttatgatttttttatgaatagaccctctattctatataattatgaccccaagaatgagttatagtattttagaaatgcttcactgaccttggtaggatcatccacccaaatacttgtcatgttctcaattgagaaaattcattagatactctcataggccaaagggttagcatgaaaaggtaatgtattatgatctccttcttttaaccaattaactttttctttttgatgtaagaaagaaagaatggatttatgtaatgaccgctctagtaatatgaattagtaaaggcaattagcactaattgttattattttattattatttttgaattaattttaa

SEQ ID NO: 163693 - DNA, 1551 bp, Cannabis sativa
tttattatatagttattagtattcaatgtctcattaaaatatttatttctaagcttaccatccttgtaccttttcttttcttttttctcatttaattgaaacacacactattggcaactaaatcagaatataaaattaacagacttatattatttattttataaataaggatatcgtcctactgtactgatgaaacttaaatgcttttaaaagttaaaaataaataaaaaagttttcacttactattgctttgtttggtaataataatttttcaaaccaataagtaagaataaaagatagatagtaaaaggcagacattagttggtggatggtaatgaactatggttattattagttgctatgagtttggctatactgaactagtcaacacttgattcctttaataaaaaaataaaaaacaataattgattctcattttctttaaaactggcaaagtaagtacttgttatctttaataattaattatacactactctttcttcaccaataaaataaaattcaaaaaaaaaaaagtgctattttcttttatttatgtatttatgggtgtaaagttgggttatgaatttcatattggaatttgtgtttcttacttcctcacagacctttcaaactgacatttgcatgtgttgtttcagacatttttttcacaagtaaaaatattagaggtgtattcaattagtgattaagattgattaacttatttaaattcaatttagcctgttaatttaataagtgtcttttaatgattatgaatattaattatattatattgtaggctatgattttcatgtaatagttatagtgtgtctcttttaaaataaaaataaagaaattaatataagtcattaaaaatagtattcttgcttcatcttcactgacaactgaaaaaggaaatgaaagtctgtaaatttaagggacccccaattcttcacatgccataccaactattctttttaattttttttaattttttttttttattttgatggaactattctttgtaattgctaccatgaaatgtaaaagagaagaaattgaattgttggggatttcagatcttcttgagaaaataacaagtaaatccaataattggactggtgaagttactatttcaacagtctcttcttctgctatcatttgcaggatttcatgtggagcaatagaaaacacttattgtgtttctgcccaaaaggacaccaaacacttctttacatctcaaaatttaaatctataataaaaactcattggaatggagtaccatgatgagtaacacctaaaccactccaataccaaataaatataaactactagtagtaataacataagcaaaggaataatgcccgagcttctgctttctgcttgtagcgatttgttttgaaaaaattactaaaattgacttttgttaaaaagagttttttagagttaaaaacttaaatatatgtaacgtccccgcttcaagcttccattgggtccttacacccacggaatgaatggctcttacacacgagtatgccactctggctgcttcct

SEQ ID NO: 163694 - DNA, 1615 bp, Cannabis sativa
taaatattttttaaaacatttaattaatttattttcattaatgatgatttaattttatataattaaatttgtaccttgaaatgctatgatttattagagtttacttataattaatattgtgatatgattttttttgtaacatattgtgctatattttaatggcctagaacttcttgatgatttatagcttttgctcatcctttcggcagatgctgcataatgagatttcatttaaatatttaaatttaattctcctttataaatatctaaatgtatttctttacggtaataatatttaaattatatttttaaaacataagtatgtgaacattaaatattaaatcattatccgcgtgccatcaattttctttttttgtaaagatctttgtaacaaatttagtacaatcagatagttttaggattaggacgcaaataaatttattgttgattatgaatgatggtagttaagattaagaaatattagataatatcatattttctaaattgaataacaagattttggaaaggtgtaaagatatttatagcgattcggtttggagtgggaagaagatatttataacaacatatgcataaaaagcaattacataacatattcttttcttgctgtctattatttatagcttacgatttttgtcaaaaagaaaaactatacgaaaaatataaaaggtgacattatttatttgatttattatattatccaaaaagataagggaaaggggcccatataagccataacataaataagtcaaaacatgtttcgatttcaaactcattcttccaactgtcgcagtgaaacactactggtattattagtatatatatagtactactgggctcaagactccacccagatattattatgcacttttttacagctcatcaaatcaaaacagaatctcttctttttaatgtccaaaaaaagagatattttctttctttctttattaatagtattaatacagaacacttgtaaaaaatttgggcaatttttgttcttaaattaatagttatagaagggtggttttttttcttccggtcaggcctaacccaattttggacatagacggtttgtgtttaggactcatctaattgggaggcctaaaaaaaattttatcctaaattatatattttttctaaataagagtttaattttattttttttctatggtccactatatatcaaggctactcttgccgggatataagagcagcttggtcgggattatattttgttattaacacacacaaaaaaaaagaacagggatgaacatagtattaaaaccagaaacaataaagtaataaaacaatgaaatcaacactacaatgtatactgattcaagtcctataaattgatgtgacctataactctactccatttctagaacccgctatatttcaaggccgatcttgcctagatataataagtgcggcttggtcaagattgtattttgttattaacacacaaaaattgaaaaaaaaatagggatgaacataatattaaaaccaaaaacaataaagtaataaaacaatgaaatcaacatcacgatatatattggtccaagtcttatagattaatgtgatttatggctctact

SEQ ID NO: 163695 - DNA, 898 bp, Cannabis sativa
  modified_base (791)..(797): a, c, t, g, unknown or other
acttctctcttctattctcttttctttctttccagacttactatataatttttttaatgaaagtgagatataaccttcagctacaacaactacatatatactctctctatatatgtatattattatattatataaaataataatggctacctctctataggatagataaatacctgtactttctatgaaaacataaatataattatttattatatataataagtacgagtttcccataatatttgattattaatttattttttaattttatggttcaaactgatgtatcacaatccttgtcatcaccacttcttttccttaaactatccgatgatgattatttctttagctccggccctttttcctttttcattgaatttatctaagtagatattataattatatggaaaaaaactatatgaattattattccattattttaagtttaaaattttaaccttttaataaaaattaaaattttgattgatttcttaataaaatatcaaaaataaaaattataaattttgttttcatagacaaccaatcaattgaaaaaaattatagaattgatatgagaatacctagtatatatatttgaattggagaagatatattcagtaaaaaaaagaattggagaagatataagatatttaaatattacaaaaaaattaatatagaaaagcgcgcagttgtatgagcgcgacaaacatttaatatatatatcaaatatcaatggcttaaaaaaaactggagagaacttattatataaaacattattattattattattnnnnnnnttattattatttattattttctaaatggttaattattaatttttcttaaaaagttcaggaggcatgatttaatacatatcaaagtttgagaggcatgattt

SEQ ID NO: 163696 - DNA, 2295 bp, Cannabis sativa
tatgttgttgcagagatgtgtaaaattggaagcagtccccaaaatgattggtatttcttcagccacaaagggaagaagtattcgagtggaaagcgcacgaatcgagccacaagcttgggatactggaaagccactggtcgtgacaaggtgctgtacagcaactctgactactccaaaaagattattattggtatgagaaagactcttgtcttctacaaaggccgagctccccatggcctcaactctgattggattatgtacgaatacagacttcatcataccacaacaaaccacaccaataatcatcattatgtaagcccccctcccccccttacaccttttattaattaaatcattagtatataaacttgttaaagtaatttttttattgaagaaaaagtattaattttaaaaaaattgatttaagtttttgcttttaataaagcaatcttgtttgggttataattgttcaaatcccaccataaccttttatgagaggatttatgtttagccttttggaggctagtttactgtggcggcagtaccattcttaatgagttatatataactatataaatatatattacagtggtcaccggagattaattcagtagaagaaggatgggtggtttgtcgcatcttcaagaagaaaaatcatcacaaaaccctagacagccccgtaatgtcgcccatgacgacggttaacaacagcacaatcgaatcaagggaccagataatgacaaagtatgatctatcatcatcatcatcaatcggttataattacgagggaggcttagaggaaatatttcagtacatgggaaataagagtaatagtactactacaactcttaattacaaggaaagtggtcacttcaacaatatcatatttaatgcttctgaaaacgacaccaaggatgagacaatcgacaacaaaaacagcaacaggtcaacatcatctacatccttgatcagcaaccccaacttgttatactctaatagtagccaaaatggttattattatcaacaaccggccataatatacgatgttaatccaaataactttgggtcaacgaattatcatcagatcatggaatcaaatacggttaccatgtccaactggtttttaaatgaacaaactgatcagctggctacttcagtcgattattctactcataatcaacagcaacgaaattgagcgccggagtgcttcatttaagacataacaaccaaataattatcttattatccagaataattatatatatattaagtatggtgtagttttaatattgaagtcatagaaaaacgtgatatatagttacccaccccagcaggcaggttatatatatatatatatgtgtaaggatggcatttatgtttagtaaggaaaacataagcgcagtcgctgttttccagattaaagtgcgagtacgtatgtatgtataatttactacatagtactctttctattcatataaagtacgcaccgcggtctttgtcaaattttatatgtaattaattggcgacaaagatttatcatataatatttatttatttatttgtgtgttttcggaaaaagtaataggaatcacttaagaatacacgattaagacatcagtaattagctcagaacctctccaaacaaaaataactcatcgtctaacatccaaaaataaatataacaaaaataaataaccatgtggagctcattaatacgtgcaaaaggtccataaaacgcctacatacataactaacattaataaaagaattatacataattaaaaataaaattaatgaacttccatttttctttttatatatttagaaggaaaaaaatggctcagttttttttttctttactggaaattaaacttatcatgtgaagtcagtaaattaattatcaaagaataacaaaagtaaaacaccctggcaaaaaaatagactatatatatatatattactatacacatcacaaataaagtattaatgatataaaattatgttatacttttgtgaaaaaataaataaataatcaataataaaacacaattgtagaaatttgtaaaagttaaaaagtggaaaattaaaatgctttttctctctatgagcttcactcaatctcactgagtttggtgccatgacaaggttcagcaaggtgaagaaagcaacaatgtaatgacctcatgttagaatatggattagtaaaggtacttagcattaattattgacatttttataattatttatgattttaatatgttgtgggtcctaattttagaaatgggtattagagtt

SEQ ID NO: 163697 - DNA, 2007 bp, Cannabis sativa
ggtgctgttggtggccactaacaaaactagtactatttcacctactgataaagtcagccttttctgggtttgagcaagtaacaacaacaccaccattaccgattctacctctgccctcattttcccagctcaaatggcaacaaagggaggtcataatgttccttcactttggcgtcaacacattcaccggatccgaatggggaaccgggcacgaaagcccggtcatattcgacccgattgagctggacgccagccagtgggtggacacggcggtggaggctggagtctcactggtaattctcactgcgaaacaccacgatggcttctgcttgtggccttcaaactacactgatcactccgtcgtaagaagcccttggaagaatggccatggcgatgttgttcaagagcttgtagatgcggctaagaaacgtggtatcgacgtggggctttacctttccccgtgggacaggcacgacccacgctacggtcacgatttggcttataatgagtactatttagctcaactacaagagctactcaaaaggtaatccggtttatatatctatcttctaaaatttatataataagaaaatttggtaaaatgttttgtacaattaagtttctggtgttgtgtaggtatgggagtgttagagaaatctggttcgatggtgcgaagggtgcaaatgctgtgaacatgtcttattatttcacggaatggtttgatatggtaaaagaattacaaagctcaatcaatatattttcggatgctggtcctgatgtcaggtgggtcggaaatgagaaaggctttgccggaagtacttgctggtcgaccattaatcggagcaaactagccatcggaaaagctggcattgctgagtaagctaattactttaactattatttatttttacatatataaattctaccttaataatcgctaaaacatggaaattgaattggagttctatgaggagatcctctcctcgcaaattcatttcaggtggtctttgcgaataaaaatataaaaatgggaatagaataaaatggaataaaatttaaaatgcataataaaaattaataaaaaaattattaattttttttttttcataatgcattagaatagtcgttctttctctttttctattttaaaatgtaattatcattctactaaaatagtagaaagacatttctattggaatggcattccaacgctttaatatgtaaccaaacaaaaaaaataataattgtttcatttctttttttattatattttattacctccaaaatatcactttaagtttggttgaaagggtgataggaaagcaaaataaggagggatagaaaattgaggagataaaaaagaaaattaatttctcttaacttctttattaaaaggtataaatttacaatttaataaaactatattaattgaattgaaatgagtgtaaatatgtaattttaaattgggatagttgtggtactaatactcaattttttttttatttttttttttttttgccattttaatattcaaatctgtctctgtaataatataaaaaactaatattttgtaagattttaatacaaatcttttcttcggccacataatacaaaaatttagtattatgttgcaattaggtacaaaatacgttaatctttttttgttaaatgatgagggtaacattgacataatatgagcaaatatatttttttgacatgatataagcaaatatttaaaatataacaaaataaaaaaaatatatatgatgttgcatcattgttttgatagcaaaagttaacagtttgtatttattttttattattatcgcaaaaaatatatatattaaagtgtaacaaaatgttaattttttttattattcccataaaaaataaaaagtaataagatgcaataaaatattggaaaattctacaatgtatccccttaaaatggatatattgatgtacccatatctgttttagcatccgaaataattttttagtgaaatt

SEQ ID NO: 163698 - DNA, 1932 bp, Cannabis sativa
tgggggggctcgaacgcgagccgtgtgtgcaaggggggacgggcaagtgtgtgtggggggagccaagtgtggagttctgagaggaggaagccaagtgttaagttgtgagaggaggaagccaagtgtgaggttgtgggagaagagagtcaagtatgagattgtatggttgaaattatatggaaacttcggggacacagcgtgtagaggaaggcgtactcccacaccttctaaaacctttgaatgcaagggagtacgagtagcgacgacaacggacctgcatggtctgagggcctgagcaaaggtacaccatgggcactcacctaatgcgtgcaagttgggacccccaaacctgtaactggagaccacgcacctgcagctcaaaaccatgcgtctgcagctaaggaccacgcacctgcaacccgggaccacacgcttgcagctcgggattgccctcctacaggtgaggaccatgcacctacaaactaggaccacaggtctgcaattagggatcacctaacacccgacaagagtacgaggcacaaggccactaccagcacctacagccctcaacttgagagcgatgtgttggtaccttttgaccatgttgtaccactggccactagtgcccataagtacccccatcttagatatgagaaggggttggaagttcatttttgtaactcatatagtgaatgcaataaaaataaaagtattcatcatttcactttcattttacttattctctttatctcatctcttaatagttacatattttctgaccactaacttggttgacgagttccaaccatcaacagtttggcaccgtttgtgggaacgacaagctcaagccaagtcgctcctttacacatcattgttacataatggctagatgctcttgacgtcgtcagtacatggaaactcaccttgacgaagaacggttggttgcaccagagaaagacatgctgccatccgtcgtcggcagtagagaggcgaacatcaatagggcacaagtagacgaagagcaccaacatagagtgcccagcaaagtccctaaagcggtggaggacattagaacagtaataggagggtcttgtgtagggggaaaactcgtggaagagagacaggtatgcctgtgaggcaaggcaaaaatctcaatgtaccacttgactatgaaatttccaacccgtgggggtgtcgccacattgaaaggggatcaagatgaagctagagaatactatagcatgtcgtttcagatcaccacgaggccacaagaaccaacgacagtgatcacccatggggggccctgccagaatgacaaaaaaatttctgaactagaccctagagtttatgaggaagtgcgagtggagtctgtagaggagttggaagaaatagtaatctcggaaagcccgccaaaggtcctcaaaattagaaaagggctcctcgaaacccttaagaaagagttgaaggagtttctggagagtaatctagatgtgttctcttgggggcatgaagatatggaaggaatggatccaactgtaatgtgccaccatctcaacatagatctaaacgtgaaaccagtaaggcaaaaatagagggccttgaaccctgagaagtacaaagcgctaaaagttaaagtcgaccgacttgacatgatcaaattcatccgagaagcatattaccctaaatgggtatcgaaacccgtgttggttcttaaacctaatagaaagtggagagtgtgtatcgacttcacacatttgaacaaggcctgcccaaaagacagcttcccgctgtcgcggatagaccaactagtggatgcgatgatggagcatgaattgctctattttatggatgcatactaagggtataatcaaatatacatgaactctgccgatgatgaacacactattggaaatattttaccagaatctagat

SEQ ID NO: 163699 - DNA, 2207 bp, Cannabis sativa
aggagataaaattctcctgagtcagcgtacgagtatccccagaattgtgggattgattgacagagaatgttgggtcattattggcccctatcttctcgaccccatcaataattcccccaatcttctccacgtttgccgtgatcccagaagttaccatattcgaaccacctttaatagttggcaaagttaactcctcaccagcatcagtaaattatgagcagttgcgtcaccacttggctccaatcttgtggtttcgatggcgtggttgtgctctcacaaacattccatatggcttcacaattttatcagggggagtagtgaacaaggtaggacaatatccatatgagtgtcccaatatcccacatataaaaaaaagaggacatgttcatattaaaaattgcaccagaactcctccgtggcatctttttttacacgcctccttctttttaatggcttattgacatcaattgtaactctcacatgtagataagttctccacattcccataaagttcttggaatttgactccacaaattttccaatataattgcccatgttcttcaccacgactttggacatgaaccctagacgaagatcatctagttaaacccaaatgtccactatattcaggtggacaaccaatggatcgtctcctggttttagtctctaaaacaccagtaaaaaaaatcattaaacgtccaaaggcttttctcaatcatcctttgtatatcgacttcatgataaaattagaataaataccgattatcatccaattctttgacaaacattccccgacctggtgccacaatgaggccatcaggtgttttattgcatcaaattcaatacttcattgagtcaaaaatcaccccaccaaacaccaacgatcgtcaatagttgatgagaaggctaaaatatcttcatcttcatcctccaaagcaatattagcccgttgctttgacagatcttgaatccccatactactagaagccatcgatgaacagagacagaaaaaatcaacaaaataccaaaaagacaaaaaactaaacaacacgataaatcaacatgtcaccaggacaagacatataaactacttatattttttattctaaagaacaacaaaccatttactctagtctcttgtgtccatttcttttttcataaatgattattaatataaatgtatgtatacaaaaaattacatttaataggctaaaatattactataaattaattaaaaagtctatagaataaattatgattaaactgtataatgtttttttatgtactagatgaggttagcaggatgttcttaacttttttttatttcatttcatttatatttttatttatttaattatatttgtactagatgagtaatttctatttatttatataatttaatttttatatcttaattagttgaaaattataaaatacattactgatgatacaagaataagggataaattttttaaagtggacattataagtagtttggatattaatttttaaaatttaaattattataaatttcttgaaatttaataagatatcttaaataattaataactcttaaaaatttaatgaataatagatatatggttggagtcttagagaagaattaaaaatagaaagaggttacaaaagattattaggtgatgatgatttatataatgaaaacaaacagagcaaaagaagacaaaaccaaaaacccgtaaaatgaaaatatttatccaatttaaatttaaaaacaatgtaatgttaaaaaagacaaaaaataaaaaaaataaatacttgtaataaaatcatatttgtgagttgtttaaatgacattttggtaaaataacataataattgcacctcatgatgaaaaataatttaatattgtgtttaattattagaaaaattaagctagggaccattatggcaaatacatatgattgattttcatacaaattgaaatatatatttaaaatcaatgtacataaagcttttctggttttagagcgttctagtggcatgtgttccttctcttcggtaccaagcatggttcttctggtccacccaaagaagtgttgtggtggtttccatcctctcatttactctctttttcttttttctttttttgacgcgatgatcaaaatcacacatgattaacaaagcagcaatccacaatcggcggaggcacctcctcgaaccaggatagc

SEQ ID NO: 163700 - DNA, 2031 bp, Cannabis sativa
actacaagatttttggggtaaaagatggaacctcatagtaactcgtatactgcgtcccactgtatttttacccacttatagattctcatcaactttcttagggtacaagtgggccccactacctgctatagtggcaacttttgtagtgtccggtttggttcatgagctaatgtacttctacgtgtcacgtgcgactcccacgtgggaagtgacgtcattttttgtgttgcatgggttatgtttaacggttgagattgttttgaagaaaggtttgtgtgacacgtggaggttgcctggtgtggtgtctggagcgttgactatggggtttgttatgttgaccagtttttggctttattttcctcaacttattaggtgcaaggctgatgttaaggttcttgaagagtatggtgatttgggtaagtttttggggaaaattgttggccaaagttaccatgtttttattaggtttcaatctcaatagtaatagttttgtaaaatagtaataataataaaatgaaagtaaattaaagttttgtttggggaagaacaagtgtcatcttgatgtgatcacattatatattgaagacatttgttgatgtgagttgtgttcacattgtatattgaggacatatggtatttgcatgtaacattattaatcataagataatttaataatatatatatttttgtgtaactttataaataggaataaggggaattttgaaaagtaattttttttttatatatattttttatttagggagttctattacaaaataataaatataaactatggataaatttttttttttatttttttaataaacttttatataatttatttttttttataatatttaatataatttttttattcttgaaaaatatatttttaagaatatgaattaaaaggcgaaaattttaaaaatacaattaaataaatattttttatataaaaaatcattaaaataaggtacatttataattttttggatttttttatttttgcactttaaaatagttttttttttgtatttttatggaattctacatagaaactcctcttgcaactagcgctgcaacctaaattgtaacaaaaaaatcatacagaaatccttattgcaactagcgctgcaaccactctagaaatcaaaactataaatttgaagaaaaaaaaatcaaaaaaatagtatttaaggtaattaccctaatttttttcggtgcaagtgctgccaataaaaatatcttaatgaattatcttagatcaattttaaaatttcttttgctagttctaaccgtgtttaaaattcagaaaattgcggtaaaagtttccaaatttcatttgatgtagaaaaatctcaaactaatgaacttacaaaaatcttgaatttaaggactatgaaagttatttttttgaagttaagaacttacttgcatgaacttttttttaaaaattttttttttgtttgcaattttctcattaaaatataaatatagatacataattatgaaccataattgttgtttgttgcttaaaaaaaccaaacagttaattaaggtactgttttggtgtcctgtctttttattctctttataggaaattgtcaccatacaaattggtgataagattccaatgatgatggcaaaggacagtaatcagagtcccaatatggcaatattttaattattcaaaaaccaaaagttaatattacaattagagttaaaccataatgaaataattatacaatcaatgaccaaaacaaaaccagtgttaaagagcacaagaacccaaaatatcaaaacaatttccttacctacatagtatacattcaatttgaaaagtattagaccataaaattagaaaggtcaaaataagatcaaacatatgaaattcttatagagtaatttgcggcataaatatttaaatttaatttctaagtacaagtaaatacataaattttagaactttgaagacacctaaccgttaaattttaagacattatccacgtattattttcttattggtatatt

SEQ ID NO: 163701 - DNA, 1237 bp, Cannabis sativa
cataaaatagtgcattgtgaaaaacaataataataaagagaagacttattataaaaatcatatgagaactcaactagctagattgtgtgcaatatataacctatcattatcttatataaaaaatggataattcccccccaaaaaaattgtcttctatctatttaaaaattttgttttctaacctaagtgggaggatttttctaatagaagacatttttttttttggaattatccctctttttaaacataattataggttataacttatattatcaatcaatatgatgttctccatcatagagatatgtattaaatataaataaaaatgaaataggatttgtccttttgaatatatatgactctagtggagttttatcctccaaatttttctttattattaaattttttcatgaaaattatatataaaaaaaggcggactctacaattacattctactcattctttaaccaatttattgatgtagcactaacataatacgttgatctggctttgtttaagagtccagaataaaaaatacataaataacagtttaataatacattatgataatatgtatatgtattcttagagctaataatgcaagccccaccctgagcataaataaattaagtctgtgtctaggacccaccagcccaaaggcctattaaagttcaggactgatcttgtgctaatatttatatgtttaatgtcaataaattagattttatgttgcttaaagttgttaaataaatccgcatattgcaactatacttggaattgatgaccacaatatatataatttggaaatatttgtaataatttgtataattttagggagaatttttgtaaaaacaaaaaatagtaaaactctaccaagatcatacccctatatatagtagttcactacagaaataagaatcttatttaatgataagactatttttttataaatatacataaaaatatttatgaaaagtaattggggtttaatcgatatatatttctaagtaataaagtttttcttttgtcaaattttgacaaattattttttttttataataattatttttcatgaaacttttattatttattcgtgaaaaaaaaaacaatctaaggttgattgatcatggtgattgctgaatacatatttcatttatgttatataatatataaaaattaaatcataagtaatatactaaataggggtgttcacaaaatatccgatccaatccaatcc

SEQ ID NO: 163702 - DNA, 1306 bp, Cannabis sativa
gtattcagacaaatccatcgcgttcttcttcatcgtcttcttataattcggataataagtttttggatgataatcttcccactcttttataaattcttgaagagtttcaatctcgccttcttctactgaactactgtgtttgaacttatcaagttctttcaatctcttaatgagattctttgaattttccaactccaaaatcaaagacattgtgagaattagtagtagaataacttcagtttttccaaaggagaagttatatactaaaagttagagaacactttgaaaaagactttgtgctaaaaatatttaaggagtgaatgatttggagaaatgaatcttatatgatataggcttataaagtttaattctttatagagttggcaaagaaagattgtttggaagagaaagagagactaataaagttgttgaatgaataaaaaagttacagtaaggagttatttaaaatgcttgtatttttttaataaataaaatgttttttttaatgtcctattgtcatgtgtttgttgtcattatatatatgattttttttttttgaacaacattatataattgaatgtagcctataataaattttaatatcttgctttaagaaaattgatgcaaaatgggtggttggacttaatcatctctacttttatttgagtaaattgaatttattggacatttttactttgttgtaaataaatgttctttttccttctaatacagtatcatgatttttattttatctactgtgttttcagtcatttataatgtcttttacttttatttgaatttattgaatttatgaattattgatgtttttaacattaaaaatgttatggggtgtcgtaaggtgtcaaacattataagatgtgacatattattatcggtgtaatttaatatatcttgatttaataaataatataaaaaacaaccgttaactaatcacggcacgctacttcagtgtggtgttgggccttaaggtgcccaatacaatactctttaaaataaataaaatagaagaagatacattactttataaataactagttaacggaactgcaaggttcaagaattttgaaaactcaaaatgcggaatccatccaaaacacggttagcattttatttatttatttattttatttttttatgtatatatattatataattatatgtatgttttttttaattgtgaatttgtgagtgtgtgttaaattgttaatttgtttgtttatgtaatatgtatatatataattatactagcaaaaaattacgtgcgaagcacgtatactaaatttta

SEQ ID NO: 163703 - DNA, 2404 bp, Cannabis sativa
ctaaaatattgttcgatcttggaataaacctaaatgaaacacttggaaaagaggacaaagaggaagcaatatccttaatgacacctgaaagagccgagcgatcgttgacattattttgaaattttgtgattaaattctggcagtctaacaatatgagttgaattgggaaccgaacagcttgacaccaccttaaagcacgtcagagagctttcgcttcagcaaagataggaggcaggcccgaaggggcttaagaggaaaacatcgcaatgattgagttgtctgagtcttggactaccacaccataaccatgaagattcgcctgagaacgaactgatgcattaacattaagtttaaacattcctggggagggcagcagggggtgtcttccaagtgatgattgtcttgtgagggatttatctttgtttgtgcatttttgtattcctacaaaaaagaaataacagaggattccatgtctagctccatagccttgttatcttcaaaaataattttgttgcgctgattccaaattcaccacaaaagaccgaagaaaacagtaaagtcatctttggtaaaagcttcggaacctctaaacaaaaattctttaatatcacaaaatttatttttagagaaaaaaggttggaacttagactgtttccacaacttacctgccctggaacaatgcaatagggagtgggtgttagagtcaatgtggttaggacaaatggagcagtaggggttgtcgaagattttcttggtgaagaggttgagtttggagggtaaaagatggtggaaagctttccaaatgaaataattttattttaggggggatattagattacaaactgatttccaccaaggtttgagagcaatagcgttcgaagcacttaggtaagggttgcgggaatttgcaaggtggtaacctgagttaacggtgaggctactagaagggtcatgtctccaaatgagacagtccccgttgaaaggatcaatggggatattaagaacagatttaacggagttaacatttaagaaatggttaagcttattcatatcccattgtctatactccttaataaagtatgcaactgtattttcaggtggataatagccatttctaaatgataattgcgttctattaggtaactaattcgagctagtaatgtcaactgacttaccatccccaattttccaaatcaggctttggaaagaaagtttctaccccaaaaaagacttcttcaacagaaggaagggttattaccaatagaagcttgaagaaagtcattatgtttgaaagatcttgctttcaaattaaagagaagcaaccaatgaattggggttagtgaaaatacgccaagcctgcttggccaacatagcttgattatggtgacttatttgacaaaacccaagaccccatagaattttgacctacaaatctgatcccatcttttccaatgaaccttatgcctatttcccaaggatacccaccagaaattagccatgagactactaaagtgcttatagatagaaataggaagtcggtaacatgacatggcataagagggaatagcttggattaccgatttgagcaggacttctttgccagctttggagaaaatcttttggttccagaaagaaagcttattactagcttcttggagaatgaaaaggaaagaggattttttggaatgggagaggcattgaggaactcctagatatttgtcaatgaatgatttatcctccatgttaagagaagtgagaaaatgggatttgtcagaaggactagtatttggggagaagagcaaagaggatctagtgaggttaatagtgtggctcgtggccttattgtagagaaggagaatttccttgatggtggcacaatctgagttttaacctgggtgaaaagcaagctctcttccgcaaaaaggagatggaagatggaaggagcagagcaacaaatggaaagaccctggaacaagctatggtgggttttgtggttgataattgccgaaaggacttctgccaccaagaggaataagtagggtgaaagtggatcgccttgtctaatccttctggaaggttggatataagctaaggagatgcatctaagaatcaaagatataagctgaggaggaaaagctaaagggtgcatgatttgacaaatgaaatcccattcaactttgttaaaggctttctccatatataacttaagagtagcccatcccaccttaccagactttctagtagtgatagcatgaataaattcattagcaataataatgttataaaaaataatacgattatgataactcttgaataaagagttatttttcatgttcttttagcttaatttatgtgtgtatttaacttatatttagttcttttcctcccattttgtgagaatata

SEQ ID NO: 163704 - DNA, 1822 bp, Cannabis sativa
aatgattcctactgtttttccactcagctgataaaaaatgaattgaaagcagaaacgaattcaaactcaaaaggtgtggagattttgtaattgtgcattattgttattatagaaatttgtctaattaatgtatattttaattaaattaggctcaaatgatagattataatatacacaaaattagaaagtttcacaacacatacaatagataaatattttaggacattaatataataatttcatttattgttataccaataaaaagcacttttaaatattataaaaataattattttttaatattatttattaaattaaaatatataatctcaatattgaatattgttttgatatttttagtatggcacatacataatataatggtttattgtcagtttttttatgcaataagtactcaccaaattacttttttggttgaatgaatgtttctcttggtttttcagagaaaaaatatataaaaaaaatacgataatgggacaagacaaaaaaaataataatataaaacattaattttgaaaaagtttttaatttatgtacaattcttttttatatatttttatggtattttataaaaatataaaaaaacataaaaaaaattaacaacaaaataataaaaataaaacataaaaatatactaaaaaattatattttatgttaataaaaacaatttaaattacaactaaaatttacagaacagtccacctaaaaacatcatcaaaacaatctaaagggtagattttttttaaaaaaagtttgaaaataataattcccctaataataatacagattatttcaaaaaaaaaaaaatataagtaattttcctattataatatactaaaatatacaaatagatttttataaaacgatatctcagtattatattgaactttctcattttcaatgaagtttaatcttttatcaataaataaattaataaaaataaataaatggtatcgtttatggtttaattaattaatgatgaagattaaagaaagaccaaccttagtggtgaggttgtaatccccaatacttttccagccgccgctcctcacgtaccgatcagcatcacacaaccgcctcaaaacaccaagtatcaatcccacgccgatatccgctacgtcatctgtcaaaacgtccggtgtattgctcacccgaatccctttctccttacacaactccaaatcgatcaaatccgttccggcgctgaaacttgcgattatttctaaatttggcaaagcattgatgaaatcggcgtcggctccaaagccagaggtgccgatgtaggctcggatggaagaggcgtgggtgttgatgaactggctcttgttgggggcctcccataggttgtagactttgaatcgtttcttcagttctctctgaaggccttcgtagatcgggattggcatcagtacgcctattgacgattccattgttctgatattgtttgtctgactcactgagtcactcacacttctccactcgttctctcagattttctatcatgggaattaatcaattaattgatattccacagaaaatatgatccctaaacgttgtcgtatagtggtacagttgaacatacaacgagcctgaatgtcatgaggcatattaacatataactatttggaaaattttacataagtattttattttgtaagcatgtgaactaatttttttttttttttttttttttgagaaattacctcattcactgtttttttaattttatttttcaaatttacggtttgggtttctaaagtgattgcaacgctagttgcaataggggttatcatacaatttt

SEQ ID NO: 163705 - DNA, 2558 bp, Cannabis sativa
tttttttttttttttctgaaatgactatggaggaggtttgaaccttgttcattaacctccttatatgaggcctttagttttcaaaaaagaaaaaaaaaatgtgaacaataatattttcataaaattttaggtgagtccatattattaataaattaatttatagactagctgtcaaccacactttcggtgaaagttaatcaaaagagataatttgaaaaatattcaaaaaaaaaaaattatgtttttacagaattctaatttttttttaaatatttttacaggcttttttttacatactattatttttaggctgttctataaaaaaaatcattatttatgttattttcatattatggaaatattgtacagtgttacgacaacataaaaataacgctgttttctcttttaaaaaaaatcacaaatttgtaaaaatatataaaaaaaaaaatctgtaaaaatatatataaaaaaatgtgataattcccattacagtgtctagatcttggtaaaataattcccaacacaattaacaagagtgtttaaaaaaattaacaaacagaaaagacataacaaaatagaaaaaaaaataggattgatatttttctcactcctctctctctcctcacatgccccacacctctcaaggtgtgtgagagatctaaaccctaacctcattacggtgtctcatgagttgaatacacactgtaatatctaaatttgttcatcctataagatctgatagcccactctatttctgagtgttatataagaaaagaatcaagaatactctgataggcatcaagagataattgaatttctttcagtagagatccttgggcttatggttcatattggataaaaattattttatcaaaaatttacttttgcttgcttttataactttgatatggaccataaaaatcaacactttcctcctcggataatctcaagatctggtgaccaactccttatccctaaagtaatcagtggctggtggaacgacccgacagatgggaaggaatggtgattcgcctccacgtcccgtgtaataaaaaagtctcgaccataaccaccaatctttgtaatttttcatgtgtggtaagccaacagtagcctaggagagaaaaattaaagtaccctaagttatggttgcgggggttggacttgagatcaaattattagatgatctcatgaggaaaaatggctcccccaaccctgttgggctacaatacgtacaatgtagataaatacctcaaccctttcagactcagctacgttgggcagataccgtagtaattcgctaccctttgaaattaaggatggagaggtaggatagcaccctactcggcatggggcttggaccatgcacagaggcccgtccttggatggtgcaccgattgcccttcacgcgagaggaaaattacgacctagttgtaaaggccagtagcacggaggttgttcaaccgctttgatgtagacctggacagaaaagactaccataagggtcaagcttttgtagattttctcgaaatgggcgtggattctaatttagttcctccttgttgtaatctgcaccagcctcaagcacccacccagaaggtggtataggctcattgttcgagttgcaacccccatcaatgtttgggggtccaacttcctccattacttcttccacttctcatatctaccttaacttcttccttataagattcttttttttttttttttaaattctagattgttttgtgcttgggatgccattagtcgcccaatatgaggatctaaggctgaagatactcgagtcatttgctttgtctgagccaactttcatctagtatgaggagtttgtctataggtgtgtttggcgatagaaatagcaaagtctactaggacagcttgtctttagggcggagtaggacgtccatcagggagcgtatcctagacatctgccagaacaatataggtccacgaggccagaagaaattttctccaacctcagttcagttcccagatgtgtttgtcatagctatcaccgccaacctggtcagtatagtgatgatgttggaatttggactccaaagagtcacttgaaaacccttcctcaaaggattatggagaaaatgaagtttcactcaaggatgaagataaactacaagaaaagaaaagctacttttgccggcgcttaagctcgccggcaaaagtacgtgtaacttgctgacaaattttactggcgccatttgtcgccggaaaaagctgctgacaatggctcgtcggcgactgaccttttgccggggacataatgacttgtgccggcaaaagtgcttacaccggcgcatttgtttgccggtataagggactcgccggcaatacgtccgctggctgatgtgtccctgatgacgttttgccgacgacgtaacacgccgacaaaacttttggcaaggattagagcatttgacaccttatttttgccggcgagtttagtcgcccacaaaatgggaataaaaaaaataattaaaattaaaaatttatctatgccggcgacatatgcgccggcaaaa

SEQ ID NO: 163706 - DNA, 1831 bp, Cannabis sativa
  modified_base (1797)..(1802): a, c, t, g, unknown or other
aataaaaatattattttaagactttatcaagttgggatcgaatattattgaatttttgcaaactttgttatttcaaatttgggaagaaaaacaaaacattatgaaaaacttggaaaatctaactttattcaccatcaatttttgcaaccaaaatatagtaacaaatcagttggagtgtccccaccctaaaataacaactagaataaaaatagaagcttgagtaaattgatgaacaattaatttattttttgatgtagtgagtaaattaatgaacaactaaattagttgatcgtataaaaaaattaaaatattttttcactcggaaaataaatttttacaatcttgaatagcaataccaaataaaaaaattatagacaaaactctacataataaaaaaaaaaatacataacacaatgagaacagtcatggtgatagtagatcgttttatagatattgtggtaatatttatatagaaatggtggaaagaggaattgtgaaagagatataggaaataaaaataaataaaaaacatattttgatgatttatttatgacatagaaactcaaattcaaatttcccttcaatatgcacccatgatttcaattatgaatagctcttaatttaaccaacaaattcactaaatttgtcaaataattatctggcttggcaaagaattaacacccatgtctactatttatttcacaagaattaaattgtatcttctcctagttttttttttctttttaactattgcttattccttaattatttctacaaacatccaatcacattaaacaaaataataataataataataataagagttttaagagagaaatggtaaaaaaataaggaaaaaaagagccaaaactaaatttgaaacgactcttcatgtgtccaaaagaaaaaggatacatggctttttaagcttttttaaaataattttatttttttaaaaaaaattgtgtattcaccattataaatttataattagatatgttaataaaatacaaagttgaaactaatgagatcaccatattgattaggtgagttactcttgtttctttttctaagcaataaactatgaatatatacattggaaatgaattttctcttttatttttcacaaaaagataaaaggtttttttggagttggatttaacttgtgttggcttttatataaatataattaggagtggataggatgcaaaccaatcttattatactaacttaatttaaaccaattcaattatatacaatatgaataaattgtattttaattggattagattagttattcgatgacacttttaattttaaaatcaactaaaaactcatgtataataattaaatatatttttttttatattatttaaaaattcgagcagaaataaaatttaaatattattaaatatatattatatgcaattaaatttaatcaatttttaattgaatttagaaataaaattcattcccttctcctataattttatgccatgaaagaaatttaaaatatattaaatttgatgtttttagaatatatgatatatgggccactaatttgtgattgtttgatctagtgaggtaacacatcacatcatatattaaaattttaaattaataaaaaaactcatcaccataaggagggaggtttttaaaccaatttagccaaaatagatcttccaatcctttttttgttaattttaatctaaggtggttaaacaataatgctaattttggatttataccccaaattgttgtgaattaaggtggcgtttggttttttttttttttttnnnnnnttttttaaaaaaaaaatttttttaaaaaa

SEQ ID NO: 163707 - DNA, 1500 bp, Cannabis sativa
atggtacctgaggtattatccctgaccctgatgactttcttccttggtttgttattgacaatcgactgcacctctggttctctgcacgtttcatcgactggtgccttccccttgtccttgttcctcgagactgttgccggagggctcttggccggaagaggagtccggtttgtatcatccctgaagtactccagttgattgcgagtattaaagcagctaaaaactgccgattctgccttaatccaaggtccataagcagggaccgcactaccttgggggggataagcaaggtaagtagttcggaaacacgccttcttatcgtgtccgaggtagccgcaattgtaacataccttcgggagtttgagataacggaactgaatccactccttgcgtcccctcttgatgtccaagaagaagccagaaattaattggtaggacgtatctatttcaacctgaaatttaagaaaacccctccttatgactgttttgttattggcaagatcactttggacaaatcttccagcttttgatgctattgttcgaatgttgactgcattgaggtaaggagttggaagcccaaaggcaagaacccagaagacagccaacctcatattgacattataccagtccccatcttctggccattcacgaatgataagaagcttgccattgattatccacggtctctgtcgtaaaactgttgtgcaatcttcctgcttgtcaaaaaatatcccccacaagcctggtttcatcgttttgaacttccaaagaccttgaagtctccaaatctggtttagaatctcctttagtcttgtcttggatacccctttaccatccatgaagcttactagaacccctgtacttactaactctgctgttaaatcaaagtccggttccaggtctagagtcatggaatctaggaaattagatcttagaacttccaagtctgaactttgtccattatcagcttctttcgcctgcgaacccaccaccttctcgccctcgtgactgccttctgtagattgattttccaccaaccccccctcccttccagtgttgttgatttcattaatactgtcagtaggttgttgctgtgaatcatcaatgttcattccattttcagggcccccataagcatctgtctcatcattaacttgttcacgtgatgcttccatcttgtctcccaataagaccaccaaccaagagacaaaagggaataagaaattactgtagagaaacaaagattcttctttgcaagaaagtaggaagagacgttaatcgctttaataatggtgatatttaatgcttttagggaaaacagtataaaactcgaaaagttgacattgagtcaagttggatttccaacactctcatctagagagaaaattataagcatcagattttgtttaatcactatcttgtacatgttacatttgatttgtaatttggagtaaattagtctacaatgaagtaattgttatgttgtaaagataagttgta

SEQ ID NO: 163708 - DNA, 980 bp, Cannabis sativa
aatcaactaagcttcatactacacatgatttcaacataacccaattgaagacggactacctcaaaagattcattacaaagaaaataaaattctggtgagcacacgaggactcacctcccatactcgaagaaaaccatggtcaaggccaacccaagaaacacaaaagtctaaacaaaaaatttaaactaaagagttagtgaaactaatagctaaagacatgcaaaagcctttaacaatcagtaataactaattctggtgactgattttgaagatccaagagaatctcgaaaccgaacaaattcgtatatatagttacatttggatgaaataatttctcacccaaaacatcatattatgagaatattaagaaacataattccaagaaataatgttcacaacagcaaatctttgtcaaaagtcataacaacaatagaaattaagaaggcttacttatatataacccaaaatgttgttgcgagacttggatttatccaatctgaattctttgatgctcaatcttaatagtcatcaacatcactgatatgctcactataaatacgccatccactcctgcaaatctattgattagtattcttcaaaataaaaactcagaaaatccaagaaaaattactgaaataagatggatagttacctgttttccaagtctctcttataatgctctgtttcttcggttagtatgtatggtatgtgttgaattttgggccaatcttcccctgttccttccttgcacctcggaattaacagactacatccttctattgacaaataattaacactctgaggcagttttgttgttggtaagcactctagcttttccaaataaagaagacttaatcgaacaagggaggtgaggtgttgaaagcctttgatgtttagagctttgaggttattacaatcgaagatcttaagagttcctaaagatggtgggagcagccattcctctggaaatgaatccacca

SEQ ID NO: 163709 - DNA, 645 bp, Cannabis sativa
  modified_base (619)..(619): a, c, t, g, unknown or other
gacttcattggaggtcccttggcttatctgttgggaaactttccatgaattttgtgaccaggaggataaccaatgatcctgaagcatctatcaactgtatgacctgacattccacagtttgtgcaggtgtatttaggtcaaaaaggttgaacatttttagcaaattgtccaatgttattcgaagaagatttatcttcttctgtgcagccattattacaattagttaagcctctatgtccttcttcctgagccacactagcataagccttattaaaactaggcagaggatcgcgcatgagaatctgagatctgaccatgctataagaatcattcaatccaacaaggaattcaagaaattgatcttcatcttaatattcctgaataatcttcatagcaccacaactacaaacaggttgtgctctatactctctaatttgataacataaagatttgaggcgagtgaaatatgtagtaacagtattcaatccctatgtggactctgcattgttttcttagcctcaaatatcgttggagcattatttccattaagcttttcaaacaattcttcctagatctcagctccgttatcatggtacatttgttaggttttatgccctanataaaactctttacaatctgattagt

SEQ ID NO: 163710 - DNA, 2222 bp, Cannabis sativa
gtatatttgcccaaccacaagtggagtatctgggacatgtgatttcggcagacggagtggctgccgaccctggtaaaattgaggccatggtgcaatggccggttccccaaacgctcaaggaattgcggggatttttgggactcactggctattaccgaaaatttgtcaaggattatggaagtatcgcccgccctctcactgaccaactcaaaaaagatgccttcaattggtccatggaagctcaagttggttttgaactgttgaagcaagcaatgtgttctgtgcctgtcttggcactccctgattttaatactccttttgtgttggaggctgatgcttcgggtgttggtctaggggctgtattgatgcaaaatggacgccctctagcatatttcagccgcgtattatcccctcgagctcgcatgaaatctgtatatgaacgggaattgatggcaattgtgttagctattcaaaaatggaggccatacttgttgggtcgtaagtttgtggttcacacggatcaacggagtttaaaataccttctggagcagcgccttgttgctatggaacatcaaaaatggcttacgaaaattctgggatacgactttgagattcgatacaaacccgggggtgataatcgtgccgctgatgctctctcgcgagttgagcctgctgcttctcttgcaaccatttcagccccgaacctcctctcaattccggacttaaaggcccagattgccgccgattccaccttgtgtaaggtgctgcatgaactctctaagggccttgattgtggcggttactcgatggaccacgggtgtctcaagtttcgaggccgattggtgttaccttcctcatctccttttgtgtctttgctcttacaggagtaccacaatagtaacatggggggacactccggggtgtttaagactttccaacgcttggcggctgatttttattggcgtggcatgcggcgtgatgttgagaaatttgtggctgaatgctccgtgtgccaacagaataagtacttagctcaatcccccgcgggtctcttacaaccattgcctattcccgagagaatttgggaggatatctcaatggattttatcgaaggtcttccgtggtctaagggattcgactccatattggtggtcgttgaccgtctcactaaatatggtcacttcataccgcttcgccatcctttttctgcaccaacagtagctgaggtgtttgttcgcgaggtggtgaaacttcatggcattcctcgttcgatagtatcggacagagacaaaatatttctcagcttgttttggaaggagttgtttcggttgcaggggactgccttgaagcatagtaccgcctatcacccgcaatccgatggccaaactgaggtcgtgaaccgctgccttgagacatatctatgttgctttgtcagttccaaacccaaccagtgggttaaatggttaccttggtctgagtattggtataatacttcgcatcatacctccattggcatgactccttttcgagcggtttataatcgagacccaccgcccctccttcgtttggaaccagcaagtgccagagtttctgcagttgaacaagaactccaggcccgcgacgatgtccttcagctactgaaacaaaacctgctccgcgcacaacaaagcatgaaggcacgtgcggatcgcaagcgcagagatgtccagtatcaagtaggcgacatggtctacgtgaaacttcgcccttaccgacagcgatcagtggccaaacggcctaatgagaagctctctcctcggtactttggccccttttccgtgctagctcgtgtgggtaacgcagcataccgtctccaactgccaccggatgcctccatccaccctgttttccatgtttccttactgcgagccgccttgggaccacaccagcaggcatctcttcttcctcctggcctcacggctgacttggaatggctcttggaacccgattctctgctggccatccgccccggcacccacaaaaccagcccccaagctcttatcaagtggcagcatcttccagaatctgaagcaacctgggaagattttgcagtcattcgtgatcaatttcctcagtttcaccttgaggacaaggtgagacttctggccggcggtattgatagaccccccttaacatacgtgtatgctagaaggaacagaaagtctctcaaggaaggtgctgta

SEQ ID NO: 163711 - DNA, 1607 bp, Cannabis sativa
ggagttggtgggtcaatccatttaaagaaacgatacccaatcttaacattactctgtcagaaccaaactaaaaccattattacaatcccaaataatatccaaaagaaatttaaccaaaccttctttcttggacacccgaaaaaccttctttgtgggttatcttctatcaagaacgtttgttcaacacattctagaccatatttacactctactggtctccattcatatatattcatagatctttcaccactttcataagaaagagaagaatacgaggataaaagagaacgatgattaaagagagaagaacataaattacacaaacccaacagtgaagaacccatgcgtgaagatttattcatatttattttaaatgaaaaacacaacccaaccgggaagaatagagaaaaaaagaaaggatagctagatttcatgttgatgatatatggctgtcattttataatctttttttaaaattcattcaacttaaaaaatggtaacaatatttaatttacattaaaataaccacctaatctcaaccaatatccgtatgtactgccacatcattcattaaattagaaaattaaacagaagtgaactgaatggaaggactacattctagcattcgttatattttgagaggtactcatatgcagtatataatacgggcaaaacttggtttgataatgtaaccattcattttaattctaaaaagtaaattgtcatttcagctgtcactaaccccaaaaggaagaagaaatttttttgagaggtacgatattataacaaacaactttcatggaaataataacgtaatagtgaaagagagaatcaagttgtctaaacttggtaaacaaacttcatagtacaaaaacaagctaagaagttgatttaatttgtatatgtaatatgattgatatcttattattttatagttgtctttttgttgttttgtaagtattttatagttgatttttttgttattttattttactgaaatatgatgtttttgtaattttaaaatattatttttgaaaatttaattttgtataaatattaaaaaaaaaaagacattaaaaatgtaaaagtaacataaaaagtaaatatttatgtatcaaaccccaaaaaaataacaaaatttagttaaatataacatttaaatcctgaaatgcaacaaaaatatcctaaatattaaaatgttacacattcactactaaataattattaaatgttatcgttttctaaatttaagattaattatgcagttttatatatttttcaataatttgaatactttttataactaaaaatacattttgtttatatattaacacttgcttatattttttttgtgctgttaaaaaacatatatataaatattatattttataaacaatggtaaataagagtgggcataaatcgatctaattcaatgacaacggtctgatccaattataatagaccgctaaacattagatatccaattgtgatcgaaccagattaaatgttatttttgaatattcagttggatcggatcagatgttggatgaggtgtccaaaaattcaatacatctaacatccaatcgaactaattagtatttttattt

SEQ ID NO: 163712 - DNA, 6907 bp, Cannabis sativa
tttcctccggtggggttcggtgtgccggtggcggcgctgtcgagtcgtggtccgcttagtggagccaagtgtcggccgtgtacggcggcgtgccgcggcggttgtgtgggggaggttatggggagactttataaagggtggagttggactgagtgggggaatgggacacttgagctttgtaatgctagtgaggagtgggagaaaggttgggagaaggtttttgatggtgttgttggggagaaatttggtgaagaaaggaagagagttgagggtttgagtttgaagaattgtgttgatgattttgaggtgatgattaatcggactgtggtttgggaagctcctttgccggagaagatttgtagaatgggcttgaaggcccattaaagttgttgtgtttgggcttgggcttgggcttttgggttttgatgattgtaaattgagaaatagtgttagtttatcatacttttttttttggttaatagaaaaataagtatttattttttgggtagtgttattatagtcatttaaaggtgtcttttttatattgtatgtcttatagagttatgccattgaaaatagtaagaaattgaaatgttttgtaattgaaatcgtattatggttccaaaatgataactataaacgattattatggttccaaaatgattatagatttccatttgtctaaattattttataaattttagtatttaaaatggttaatttgataaatttctatgaacgacttgattttgtttgcaatatatatgagaagcatcattcccaacatcttaaagtacttgatttaaaatttgctttttcatgtgctctttttaggccatctaattcaaagtttgacaaattgttgagctttatttaccaattgtactatgcaatatttttgaatgaagaaaaaattctcaaaatttgtaatataatgaataataacaagtagagtatgttacaatgtaaaaggaggggtttggcaaaaatgggatattgaatagtgtagtgtggatttgatttgatttgatttgattagatgatgatatgtgagttggttaggaaacttaaaacacatctactactttggaacaatttgtcaactccttcccatactttgctttgtatctccaaaagcttctttgccttctcttgtaatcctgatttgcaccttattgtctccccatgaatctgtcaaacaccaatatcaaaatcaacatctcaatcctcacttacaatatacatgcataaataccattttaaactctgtgcaaaaattactattgaacctacaaattggaccttatatttccaaaatagtactaaatagtaccttgaactaatatacaggtgttataacaaaactgtttacgttctggtactaaaaattatcttcaagtcggttatatcaaaaaaataaattgtcaaaaattaaactcaaagtcctatttgtactgttttaaaaaatacaaagtcctttttatcatttaataaaacgaaagattcaatcgataattatatatatatataaatacttgtgtatatataacatttacctttagaaacaatctcatcacagcttgtacaaactcaaaattgttcctgcatgagatctcctctataaaataatccaaaagcatttcgatcaataacaactcaggtcttttctcatcattgttgtcatcgtcatcatcaacttcgtctatgatctcaagcattcgaagctccatatccaaggttgaaggagataggcttttaatatgatcagtgaatgttgaaactgtgcatggaaacaacaatgtaagaaaacgttacaaactttgtctaacttgttttgacaaatgatgatgaaatgttacaagtgtacttacaatctttatttttagcagctgagtgtagagcttgcaagaattcggataagggcatgtcagattttccaccgtgtttttccaattgctcgttgtttttcgtctcctcgtttgatatctcactaggtttaaacaatatttctccagaaagagatggaattgaaggcataaagaacggagccttttcgggtttctttggtggttcgattggtttgtttctaacctgaaaattacagaaggaaaaaaataagaaaccaaacttggtgaattcaatattcgaaatatgtgacaatgttgaatgatgtgagtaactaccttaataatgtctaaattaatcaaactctgccactgacttttaggcaaaagagaaagagtaacaagatctgggatttgatgatcgagaatacgaaagggggcgatcgaatccttagtttgcggggcattcactgttggcttttcagaatcatcatcatcttcagattcttttgctgaagagacagatggtaacttgactctcacaatctccttcccactggcataggaatcaacattggtagcaccagagaacattgattgatttaccctgaaaaaaattctcagaaaaataaactattcgaaattgaactatagttaacaatattgtttttgttaatagacacacgcgaaaagcttaccatagataaaccccattttgatcaacatgggttgttgcaaaaatatccatatttggtgatagagccaatgctgtgatagccacatcaacatgtattgcgtctatttgtcgagccaaaacaacgtcccaaattcgaagagttccatccatacttgaagataaaagccatttcccatcctcactaaaacacatatcggtgatacggtctgtatggccttcaaacttacgaaccaatctcaatgccacaacatcaaataatcgaatgactagatcatcagacacggtcgccaaaagacctgaaatttatttgaatgaacaacaatgtcctaaaagtaatatcaaataactattagaataaattgaaacacaacttaccattgagacgattgaaaactattttaacaacagaacagccaacttcccatcgggattttagttcatatcgtttgaaatcccagacctgcatacaaaagcattgttagaaaaatgaaactttgagctcaatgtagcctgcaaaattatcatgtgtcatccaaaggtaaaagtaaacaaatgaatacaacttctaagttggaaattcgaacctttatgtctccttgatatccagcacttatcattaaagtatttgttgaatcacaagcgattccaaccacttccccatcgtgggcacagcttcttttctctgaagtatcacggtaactgcctcggctgattcctgactgaaggttaaatcgttcaatccaaccacctgcagttcctagtaccgcaaaatttccacatgcactaatggcacaggcctgttgcaagagaaatatgcacataaatgattaaaaataagttgacaaactttccacattctaatcaaacaaataaacttcaccataaggtaacgatcgccaaaataataaaccatggtggtttggcgaaaggacttgtaataagaaaatattagacactaaatcgaatctaaaaggaagaaactttttttcgggtttgctgctaatcagaagaaaagttcctcatctatttcaaaatcaaatgggcattgaaatagatcaaaattctaaccttaaccggtgttggactttcggcgctaggttttagaatatgctcaccgagaacaaagttttgaagtctccacacataggcctgtggagtatccatgtgacatgtaaccacattacaccaatctcgctctctaatttcagctatatggttttcatcaaatacaggggaagagacacaattaaaattcatggaccgaaccccaaatagtttttctttttcctttctttagttcataaaagacaataagaaagtaagataagaagcctaccacagtcaaacccgataacaggcttcagtttaatctcttctacctgaaagtaagtaaataaaacatagaaatgtcttttattagccgaagaaatcaatcggtaatctttaacattggaaagggaaaaaaacgaaaccataaacatatgctgctgttgctacattcataccttcatcttcaatttcttggcccgtttcgccacatggcgttgggagagctctctactttgttgatcctgtatgtatcataaattccaaatatataagatttaccaaaacgtaaaacacataattttattaataagctaagaaaagatttgagtttatagaaccaaagttccaaataatgaaaaatttcattatgtaaattttcaatcaactctttttcgaggtggctaatcttatatttatagccaaaatacacaaaaagtccaggcaacttttggcagaaaacaaaaaattactacaatattttcttgataagatatacatttcctaggacaacatagctacaatacataataaatataacattttatttttatcatataattcttttagtgtcccaattttacatttgattaggaagttatgtccaattatgtagttttgtaagactttcaagaaatagtagtttctgtttcatgtatgatgacaaacctggatcacagagaaaaggcgaaaggcgcgatcctgcccagcagataaaatgtgtcttccattggaatagaacctataatagacgaagagaacatttatatactaacaaaaggatgccaagtggaatgcaactagactaacaaaagttcatagcataaattgtgaggaaaaaatgattagaagagacaatggaagagagtgcaactcaaggtagaaaggcacctgagaaatgagagaaaaatgtatgtggaattttatttagttaaaaaaaggaaaaatgtaaaaacaaacaaacagaacctaaacaatataaacaccaaataaaatgaaaagtggtattactttatgcattttggaggagcactgtggccacttctaaaacgtagaagacgaggatctccatcacttgtgtcgaaaatccacatctgcagaagaaagaaaaaaaaagtgatcagtatatcaattgtattgccagaagaacaattcaactcatcaagttaaggtaaatttttcagaaaaataaaccgatgtaactgtttaatcataacgggctagctaagtacccagtagatatctcactattgcttataacttggagtctataaagtgaaaaaaaaaaattccataaatagatccataaaagaattgactaagcacactgaatcattaacaaaaatcttactttgatggaattgtcagttgatgaactcattaatacgggctcattggcaaaaaagtgaagtgaaagaattgaactatcatgagcatctcttataactgattggagccttcttttctcaagattccatatagatatgacaccagatgaaccaccggatgccaaaagaggctgtccatctaaaatatcagaaatgaaacaaagcagaaatcagcaactactttatttcatcagccctacataattgagtactaagataactggtggaaaagcaaatcatcacatgaacttctccccctacaacacataaaatttcaagcagacttgaattttcatgttaatttattgtgccccaatattggcaattttttttacctgtgctaaaagataatgtggtcacagcacctcgggtagaatgagtaaacataactaattcttcatcataacgaatattgtaaacatgaatagttccatcagcacaaccaatagcaactacatctaaagcaggagacgaaacacaacttgtaattgcagaattccatcccttaaactcgaataattttttcttcgtactgatgttccaaagctgtagagaaccttcttgactcccaataagaatctgtttaaaggattgtattatgatttctttttcatgaaatagataaacaaaccattgccctcagaaaaatgattcccatacttgctgaattgcaccaaaacttctatatgaacagaaagagtaccttatttaagtaagtatcaggatgcatcatacaactaggagtaaaattgtcatctaggacgatatgtccaactggtgcaggattctgatcaatttccttaaatgcccatatgaaaatattaccttcaacatcaatacttagaatgtggtctccaaacaatagcaaagaattgatctttgctggatgcctactccaagttgatatctgttaaataaaataaaaacttattgatcttcaagtaaccaaatataacacttggaggaggagcagagcaactaaacatataggatacgtttggttgaaaggaatgaaaacacaggaaggaaatgggaatatgaatgaagtaaaatttaaaatgcataaacaaaaacaataaaaaaattcttgcattggaataatctttacttctatttcaaaatagaatagtaattctaccaaaatggtagaacattccactgaaatgataaaaaggtcattctaatactttaaaatgcaaccggaatgaaaattgattattttctattccattccattcaattaccgctaaccaaacgcatccatatagtttacaaaggaaatcaaatacagtgaaaaccatataggcatagggaaacaacaaagagaatgaggaaatgaaaaacctgatgagcacgattaaatacagctatctcattcccataagcaacaaatgtaagttctctatgtgaagcaagagctctgatcttctttggcagttgtggacctaaacagaaattcatttacatgaatatgttgcacatcaaaataatctcaaacactttgtagaagaaaattaccaattgaaactactaacacagcttcttaaactaacataacaccattgaaaattactcacttttcatcatcaaatgagaaaacttgaaatctgggtttacatcaaaatatgatttttaacaaaaaaaaaaaaaaa

SEQ ID NO: 163713 - DNA, 2367 bp, Cannabis sativa
  modified_base (584)..(592): a, c, t, g, unknown or other
ctaagagatcaaatgcatctaacaatgctctatgagtaaaatgggtaatggataagattgagtggcaataatttgtttgttaatgcaccttgtatttttattaatatttgtaaacggatgtttattggatcacatttaatgtttttaagtttatttagatctcatttccatcaaattatatgttggatgttagattaattttaccatccgatctgatccaattaatttcattcatccaatcaattcaacatccatagatgttggattggatcggttctatgcaatgaatgactctcatatatatatatatatatttattggtttaatttaggtatatctaatattttaaacttagtactttttagatcagatcggattcatttaatattttagatccagtatgtattggattagactggatttatacaatctaagaaaaaaaaataaaattttaatgttaaatttcatatatatatatatatagattttacgtatgacaatataaaatctaattattcattcaaactaaataaaaatactaattagttcgattggatattggatgtattggattttcggacacnnnnnnnnncatccgatccaatccaattagatatttaaaaataacatttaatccgattcgatcataattagatatttaatgtttggcggtcagttgtcatattaaatcggtctattctcattagattggatcaaatttatgcacactcctatataaacagtattttcaagagtaatgatataaatacgtgtctaaaatacgtgtgtatatatatattcatattttcacatcattttacgtcagaataatggatagtgtttagaaaataaagtggctaattaataagatctttgttattagataggagtgttatttagtattttttattggtaatgttttataattagttaatgatattgttaaaagttatttttttaaaattatattaaatttaaaatttaattacatcaataataatatgagaaaaataaaaaatacctacaattctcaattaataacctaataagttatgtggaaaaagagtgaaatgttaataataatatggatggaatactttacgtacacattagtcgaggcagctacatcagaaatccaagctgggattgcaccatcaagatgattatttgcaagagacctgagcagaatttggattaaaattttacatatatttatttatcattactatatatactataagacgatatataccttcttattatcagtgcaaaatcttcgtatgatcttttggtaaaattacttttaattcttttttttattatttcatgacacttgactagttgactaaaatttttattatgaacattacatttatccctttcctatttttatcatacataaagatacttcttccaaaatttatatatacatcaaaacgataaataataattcaacaatcaacttacgtaataaataatgtaattcattataaaagaaaaaaaaaaagcttagttcataataaagactacgattagattaattaattactaaaaaaaaagtttgggccggggccgattatatacttattttatttatcaacaaaaaaaaaagcttatttataaaaaataaacatacttttatttcaaaaaacagatatatagactctatttgattttgaaacgatatgaaattgcatctggatagatgttagttaacaaaagagagcagagagagagaaaaaataaagggttaatttattgttcgattgaaattaataataaagagaatataattaaagagctgagtatttatagagcttgattaatcactaataccgaaccaaaaataacagaacacaactaacaacatttgttacatgacagtaaacataactaatcttgattaattaacgactataatactacaatgtctggttttattattgtacgtacgtgctataattaatttcatagttgaattaaaaatattaacattgggcataaaaacaattggttaaaatagtatgaggtaaacaattggataattatgtgattttttttatatataaatctttcttcataacacaactagttatttaagattataaattttttaaaaataatttacaaggtctaaaatataaaatagattatttaaaatctactatatggtaaaataagttaatttgaagctagttttcaaccatatgtaaatcatttgaaaagtttcaattagtagctatataaaatatatatttagattataatatattgggatattggcggctaaaccacttaaattttacggtttgtaacacttaactacaaaaattgaatttttggcggctaaactacctaaaccctggt

SEQ ID NO: 163714 - DNA, 2953 bp, Cannabis sativa
ttttttttttttttttctttgagatcattttctttcagcacaactctgatttctattgttatgtgtatgttaggtacaaggaaatggaagcatgcgtaactcctgttcctgaggtgagcagtgcaaatgacgaagcagtacaattgaaaaagttccctgctagactttacgcagttcctccaaggatagccaacggacttgtacctggggtcacaactgaatcttacgaagatgacaatacgctttggaaaaagcatgtaaatgcatacaaaagaattaataagttgattggcactgcaagatatcgtaatgtgatggatatgaatgctggccttggaggatttgctgcagcacttgaatcaagaaaatcttgggtgatgaatgttgtgccttcaattgctgagaatactctcggtgttgtttatgagagaggtctaataggcatatatcatgactggtatgtctgatgatcttctgcttcttattactgtcaacagcaacgcttaatgttctagtcacacactgccaatgttgtcacttcttgcttgctcaatcaactcataaatgtcccaaaaggaagaatcatacttgtttatgagtgtattaagtaactaaaaaatgtttctgggaataaccctggagaaaaaacacattcgaaaaaccccaaaactactgaaagacagttaaaaatttatccctcaagattgagatatacgattaggaagcttaatacgttatcttctgtaatctttcaggtgtgaaggcttctctacttacccaaggacatacgattttatccatggaaacggtgtgttcagtttgtacgaaaacaagtaagaaatttctcctcaatgccattgtccatgctcggtttctacttcattagattactcttagattgaaatacaaaataattgaatttatacacaacatactatattttggggttacttcatgagcttaatatgctatatctgcaaaatgatttgtggatatctttgagaaggtttttcaaaaggcttaaatgttcaactctcctataaaaaatcaactaattggggttgcatatttcatctcaactaaagacataatactctttaggatgctagagctagtttctacctcctttcatcaatgcttgtttataaaatatgtattgggttatgcaggtgcgaactagaagacattcttctcgagatggatcgcatcttgagacctgaaggggcagttattttacgagacgaagttgatgttctgaacaaggttaagaaaatcgcagcaggcatgagatgggatgttaaattagttgatcacgaggatggtcctttggtgcctgagaagataatggttgcagtaaagcagtattgggtcgccagcagtggaaacagcacatctaatgatgagcagtaaattaggtataatatgggccttgaagagagaggcattgataaaggagatacagggcagagatatgaatggtttcttgagtggagagaaaccaacatgttctgatagtaagagatgagtttgtttcaaaatttaatgatttgtttatttagtgttcattagagcataatttatatagcttgttctattgatatcacaggaaaatgttgtaacaaggatgatgaataattagttggagaatgtcaaggtggttatttgaagcgtgaaatagagttcattaagttatttttgttcccaatatgaatgtctagctttcatgcttgtttgtataagaagaaaaatacgtaaaagaatagtgttttcgtgctttcatttaagttatcgttattttcttcaaattaggatagctcattgttagtcggacagcagcgttattattctctgatttgttcagaagaagagaaactggaatggaatggaatgcaattttgtaactttttggccctgctaccatgagtttcgagtggtaccggtttcatcggatttggacatttacagctcaagttatgcttgaaagaccagagttgggtcaaaaattaggaaatgactgatatcatcacattatccttttatatccttttatttataagaaatgttaagagtttttttcacttcacactgaaatttttaattttttttacttttgaagcgatttttttttttttaaaaaatactgtataagttttatactatgaactgtgttaagtttttacggttgttttaattattctgttttgttattttattttactaaaaatttaatattttttataaaaacctcaaatgccgagggaaactccaatggaaaaaaactaaatttagtgttaaaccaacactaaagtagtactattctagtactaagtttatatcctatttcaattacaatattaaaaattacacaaaaaagtatattctttattattgtaggattttattatgagatatttttaattaatgtatgtaatatatagtttttcattttcatataaatattaattaaaattaaaactaacattccaaaaatataattatattattttttaatttttaaaaattactaataaattaaacctttttttttcccataaataaactatttcactttaacatatataaatacaaataaacacatatatattcttaagttttgattatatatagattatataattatttgtttttggataaaaagattctttaatcattaaaaagtaaaaaataaaaatagaaatgtcgtagtttataatgtccactattattagtaggatactatagattcctacaataataagattacttttaccatttagttggaggcttttgctgaaaaaactatagtatatttgggtttttaacgtatcattggagatggcctaaaaagtatcaacgatgcttagcaccttctagtgtgtaatattattaatgatagaattaaatatcgagtctcacataatttaatttaataactattataaaatatcactaa

SEQ ID NO: 163715 - DNA, 1339 bp, Cannabis sativa
tatcttgtccaagcgagcccacatttgggtgtacgtgaatgcctacaacttctatcgttgttttcatggaaattactatttcttgtattctcttgttttgctctttttgttctgccaactcaacctcatggttagcagcttttttgtcttaaagcgatcaattcagcatagctaccatcatcttatgcctcctactcttgttggttttcttcatactcgggatcctcagttttgtcttgttcctcgatatctaccctcgaagccgcttcttctctatttggacccacatgacctttaggcggaggaggtcgacgcgagttattcctagtcaacaccatcgtatcaggaatctatttatgattttccttttatggaatgcttagctctcaatgaaagtattaaaatattgactaagatttttggcaactattaattagagctatttcgaatgattagaagaaatttaatacgagatttttttacgtggttgaagtatcaatgagccttagtccacgagtcactgttattaatgtggttgttctttacagagagttttttactattttctccaacccccttgcatgaatgtagttggggtatttatagcctcataaagatggtaaaaaggccaccattgtcgtaattgtatgtacattacttgcacaattcctcaagtttggacaatagggcatgtctgcctattttcatacaacacgtagatttgctctaagtgtttggtgagataaacccttagcttctgctaatgatttgactattcattttgcaaccgtcataaaagatgttggatagtgtgaaatcagagaatgatgggtttaaacctttgacacgtcctttcaaggcaatgtgcagatgttttctctatgctacatttaatgcgcctacaatgacttagatccaagtcctggcgatcggactcgtttgcctttcttaacacatctccggatggacttaattctcaaagctgaggaagtaaatctcactttctcaaagggactccacggacgtggctaatgagttcttttacagttttagaaagatttaacataattactctctaaagtattggtccaggtaccacatgacccgcttgccacgtatacccggagaaattatgggtcacagtcattagtaggtgtgatctgtcacatgttcgtttaggatggaaatttaatttttttcacattgttttgatgttttacagctcacacttatgagtcatttagttaaagatgttaagatttttatccttattacaaacgtcttggattgtttatttttattaagagcattgctattaggcaccagtggtgcctagcac

SEQ ID NO: 163716 - DNA, 1437 bp, Cannabis sativa
gttacaatttctttctctcgtgagtcataatattattattgttttctatatagtttcttttcttacaattttcatgtttaggtgggaatgcgtgtagattaatatcattaaaaataggtgaaaatggtgatatgttggcgggttggaaaggcttgtggtgagtttgaagataagatctctgaagatggtgaagaaattccttgtgataagaatatgaaacgcgtgaaagcatgagatgagtggagataagaaacaagaaggtaattgaaaagacactcatgattgatatgactctccaactccatgacagtgctaagcccatgacagtcctaagcatatactagtgagctaaacacatgacagtcctaaactacatatacttgtgctaagcatatatatatatatatatattcttctattttatagaaaaacattaattcctggcttttctcctatcaataagtttgattcatcaacactatgaagaagaaaattagtatgaagaggattattataacgagagttacggaggaaatcaggagaaaaccagcagaatcttctgttgtaataccaaaaaagaacatcaatgatattctcaggagccacatacttgttgaaatattcgtcagaattaatgattttcaatccctggtacactgtcgtagggtatgcaaatactggttttctctctttaactccaaggagtatcgtcaaggaaagatgctttatcatcaacaaactcaattgttatctccagttacactactctttggaaacagctatatgcatatacattgtgatgaaataccattcttacgtttcttaacaccagaatctcgggctttctatggtaagttttctaagactaatttttttaccaagccaaactttctcatcaatttccttctttcaccatctacagcatggaaaatgaattattacctcaacttcctacaaccccagaaattgtttttgttgtcatctttagatgatttgttgttacttttctgtagtagtaagaagcataagcattttcttatatgtaatccactcactagacaattgactcagctccctatgtactctcccataacatcacaagaatctttaggatctctagcacatgaaggaagtggtggattggttaggagaagtaataataggagtgagataagttacaaggtcatggtattatggtataaggagaacaaggaagaaagaggtactagagtagaatataaggctatgaccttttgttttgatactagagaatggagtagatgggaattctccctcattgggagaaaattggataatgaaaattacatttcatgtaatggaatgctatattggttggagagtgacttggtcacttcacgtgttgagaggattatttccattgatccgtttaaagatccaaaccatcccaaatacttt

SEQ ID NO: 163717 - DNA, 1165 bp, Cannabis sativa
tttttttttttttttgaggaaacataaatttcaattgcagacaatgagagagatcacatgataatgcaacttttttcttttttatttattttttaaataatagaaaaactaaaagttgtgcttaaatatgaattgtatatggcatgtcgttgaaaatggtgaggtcaggtgacctactcgtggattgcttgaattacatgctatatatatatggacttgggtaacatcgatctaacatgatgggctaccacaaaattacctatactttgttatcttacctttgtaatcgtcaaaagtttttgatgaaaattcaaagttcccatttctattttaattactttcatattataattaattatgtttactcaacagggattgagatagttcttatattttaacgttttggtagcaaatctggtcagaattattgtagactcagaatgaacatataattaaatcaaacattgataaaaattattcccaatattatatatgtaataaaaaaaaggttttacaatcaattacaattattaaatttagacccattaatcgttttgaaaagataagtgtgtagcttattataactgtatgtaatatttgatgtatattttggatacatatataccattactaaaataaatacactactacaaaaacctccttttagaggtgatttttaagtcctttcagcatcggttttggcaaaattcgctaccgacgctaatcagggcgacgctaaaaggttttcaaaaaccgacgcaatatatactcctatggcgtcggctattatctagggaccgacgccataggggtatatatggcgtcggttcctagctaatcaccagtgccataggtggcgtaggaaccgatgccatacataagcgtttttcagttttttttaattttatataatttatttaaattatatatttattaatttacatattattttatttaatttaaattacatatttattttttaaggcaaattaaatattatttaaattaattttaaaattggctaaactacataatttcatttcatgacagtaattaaatattacacaaacattaatgtaaaattagtccaaaatattaataagttaataaatctaactacaagttaatctaaaaaaattagataatgaagaaaaattcttgggcc

SEQ ID NO: 163718 - DNA, 1649 bp, Cannabis sativa
  modified_base (1582)..(1598): a, c, t, g, unknown or other
ataataatgtaaatcaaatgccattgtaagaataacatatggaatttgttttcaattaatgcataatactggaaatcattaaaaatagggtttatttatcatgaaacttgagttggaattgacttaagtgatataaatgaaaattaactataaaacatttgatgatatacaaggtggcatactagttgtatcctacaattgtaatcaatcagctcaaatatggtgggtgtggttttaatcttaaggaaaaaaaaatcctatattttttaaaacgcttaatttagttttaaatagggatgaaaaatgtactttgggtattgagttccgcgggtactcgctcccattaagaatttcccgcttaaatgggaaatgaggtgtgaatgaaaataattttatatctacaaatattaaacggatggagatggagataataccctcgcactgacggggactcatttattttttttattttataatattatttttaattattatacattatcttaagggaaatttaaaaaaatactcatttttaatgttttatttacaattttacagttaaaagtttttaattataaaaatacgctcgtaaaattttaaaattataaaaatacactttgtttagcaaaaagtgaaaagacaacgagatcaacttcacaacaactacaaataaactataaaataacaaaaattaccaggaaaaataacttcataacaattataaataaactataaaacaaccaaaaaatgtttattatttttactgaagagatatttttatcaataaaaatattttcatgttgatgtatttttgtaatttttttttttaaaaaaaattgatctattatgtaaatttgtcttatcttaatgtgttttgtagtttattattagtaaatttttcaaaattttcatttcattttagataacattgcctcttttaaatttttaacatttataatattttggttggcttatgcgagctacccacatgatgaagctggttgggtgctctcgcatactctactcagatgttccaactcttattgactttgagcattataggtccctgtatggttcattatgagaaaaatctttcgtccaagtcacagaatctattccacgtgttatctaaatggatggcacatcaccctgtgtagaaatttagataacattttccccttaagtctgcgtaagagcttcttggtcgcacatggtaaatttagataactagattaaagttacggccatagaaattttgtgctcatatatttttctttgtggtaaattcacatgtgaagttctttatgctataccacaatgggtatgaacatactataataattatgattattgaagtaaatttagctttaaatcaatacgtattgatgccaataatggtttgtttttatataaaaaaaaagagataaaggtttttggcatctaattttattattcattaatagacagtaaaaactagaattagttaggggcgattaaatactaatttaacattgttatttttttatatatttagttttgttattgtttttaggcaaattagtaatttttttccctgaacttnnnnnnnnnnnnnnnnntgccccctgaactttttttgccgttaaaaattccccccgaactattgagat

SEQ ID NO: 163719 - DNA, 1567 bp, Cannabis sativa
agggcataaaacccaacactatgcacaggagctgagatgtacaagctggtccaaaaactgagaagaagcaaactgatgatgaaggaaatgaacaggaagaagtttggtgatgttaatggtcgagattagatgtgttacaagctcatgattgatcgtcaggagaaattgagcaaggatccatttaatgatagattaattgtgaagaaaatgcaaagaagataagattataaagaagctcctaatgctttgttgttgtttccacaacaaaaaacaaaggtgcagtggcttaaagaatgggacaaaaatacatctttttatcctgctagtattagagcaagaaggattacaaacagaatttactcgattatggacatgggttgaaaattgtttgatacttcaaaagaggttagtgaggctttttaaaaatattatatgaacctcctcgggtcaactctaaacaataagaaggaagtgatgcaaagtattgtgaatctcgatcctttgatcacagaatctcaaagcaagagattgttggaggtttgcactaaagaagaagtaaagtgggcagtgtttgacatacctggaaataaagctccaggtctacatggatttgagagtttctttgttcaagataattgggaagttatgggggataaagtgtgttctgttatcctttcttttaatcattcgggaaaattattgaaggaaattaattcaacgtttttcaccctcatttcaaagaataaatgtcccgtaaatgtatgtgagcataggcaagtttcatgttgcaatatcatttacaaaggagccatgaagatgatttgttcaagattcaaggagatgctaccaaaattaattaacatcaaagtggctttgtataaggaagattcattgtgtataatatgatggcatgccaggctttggttaaacattatgggagaacatttctcagcctaatcgcataattaaattggatttaggaaagcctatgatacaattgaatggagcttcatagatgaaatacttcatcctttcagattcctggagaaatttattcaatttgacgatgaatggtcaacttcatggttttttcgaagccaagagaagtttccaacaaggagattcaatgtctccactttaggaattcaagtttcatgaaagatgtcgtggtttaaaattaaatcatctattttgtggatgatgttttgttgttttgcaaaggtgaatttaggtccatttacttactgctccagggaccgaattttttttctcaaactttaggccttcaattgagtgaggcaagttcaatagtttattgttgtggaatggagcagagtaaagtttagagggtgttagatgcatttggttttgttcgaagtcggttgccattaagatatttggggatttcaattttttcaaagaggctctcagtagtggaatgttcaggaaattatagagaagatggtttctagtaggggtgttcattggatcacatccaatggatttggacccatccgatccaatccaattatttattggatattgaattttgccatccgatccaatc

SEQ ID NO: 163720 - DNA, 4362 bp, Cannabis sativa
tgatggtctcaacaaggatgctctttaataactaaacaaaaccacaggagtgagattgagttggagacaggggttgctgttctcaagcattgttatatttctagttacgtaatagtattagttggtgcaactgtactgggtaggtatgtaacaacttgataaagttgtgtgtagtaagaagacaaagtattatgcaaattttaattcccttaagtcgtgtgactcatttccatcatgtcacaaggtcacatgaaatatgtgcaccaaatagtaagtgaaattgatgctaaggcataagtccaaaacaagataacagaacagagcattctttctctccgactccaaacaactagagatttctggattctctgttctcttagaccttaaaaagacaacaacaacaaagctaatctgaagtcttagtagtttagtcatcttaaatgtagtatgctttttgtgaggctctaagaagatttcctcgaattatacgggtgaggactggtatggctccatccctgtagagttttggagaacagtttagatggttaataagatgtagagattttgggaaaaacataggttgtacccgaacaatacagcagtgtcctggatcactctaagtggagcaccacttcctatcaaagattttctgaatagaggaaccactccaattatgtatccaataatctacataacagaaaataagtgtgttaagagttgagagagtccataaataaatgatcaaaaatatacagaacataattttgttgcctaaccgctccaatagttgaaggggccaacaatgccttgagatttaactctttaaacagtttaaccaaacgttgttttatccctgaactttctgaattccccacctgcatgcaattaagctcaagaaagatgaataatgtgattaattttgtattagaaaaaagaaaggcttgtcagtaaatattgtagaaccttagcagctgaagattcatcatcgtgtgtggtcttcggcagtactttttcttcacctgcaacatacccaggtggtggttgcaatacatgggaaggaagtactactagttcttctatgaacctttagttggaaggaatgaaaatgtaaaaatataaataaaaatgaaaataggaatgaaattgaataaaaattaaaacgcacaaaaaaaaataataattttttttttcttattttgcattagagttgttttttcttccatttcaaaacgcaagtctttccaatactttaaaatataaccaaacaaatgaatgtaataaaaattatttcattttcattatttttattatctccaaccaaacaccatatagtttcgacccactccaaacgtgcagatctcataaagaacttagataacaaaaaaataacgatttgacattagagtcaaatttaatcgcaaaccatcgcaaaactatcgttacacattattgtactatctttatttctttcagaagatcaagtttgaatgacaccatcattaaaatatcatttatttatttttttaactataaaacaagttttcatgcccattgccaagttcatacatacagttaagacattttttatttttatttttttgaacaaagacatttttgttcattacgcattaaaatgtaatatgttaaaattaaaaaaacacgtactttattttatcgtaaatatatttattctattcttatatttaatttttcttttgttgaaaatatagtataaaatattgtactcttatacgtaatatgtttcctcaatagggaatattatttttattttatctcaaaatggaaaagatttggtagatgagccaactaacactttattggttgttaatgtttcaaaaatggatcataagtgggttctggtatctaggtccaccagttatggtttttaccccatatgttgaaatttttaattttttttactgagggacggaattttaaaaaaagaatactatgtaagttttatactgtgtattgtgttaagttttcattgttgttccacggttattttttagttgttctactgttgttttcaattgttctgttttgttgttttacaattgttttataaaaagacagtatttttgtaaaagattccatgtgatagtaaaattataaatgtttgcctaaaattcagtatttttataaaaactcctctgagtttattatcataaaattgtcatgggtttgggaacccttacacttttcaattccttaaagatattattatccaaaagagaccgaactttatttttctttgttagatattgagtaagcttgatagtatggaaatgacacgtttgcctgtgggttttgagggtatgtttgttgtcgatgttcaagggcatagtgggggattagctttcctttagtgttttgaggatgaagcttctttattgggctttttctaaatcacacattgatttgtaagtttcagttgaagatcggtcaagttggcgtgtcattgggctatatggtgaaccaaataggagttagagctaggaagtttgcttcctagttgggacctgcttcatagtttgcttcctgtgtctttattgccttggtttgtgctaggaagataaaaggggatggtaatccctatcttgaatggcttctttcaagttttcaacaagctttggatgagtgtggtttggatgacttggaacttttagggtatccatttacttggaatgtggtagaggcacaattgattagatagcgattcggttggatagagctcttatttctaaaaattgattggatttattttattttaagttatttaatttggaattctctacttctgaccattttctaattcttcttgatctaactttgagtttttcagtatgttaaaagaacttttaaatttgaaaaggcttgacagagggaaccttacatccatataaatcccaggctctgatggtatgaccccgagtttctactaaaagtgtggggtggtggtgggtgatgatgttgtggctgggtgaataattatttttttgtcaagtgttcttcttaagggtttgaatgacacaagtgttgttcttatcccaaagaaaaagcaaatcgtgactataggagatttaaggcctatttccttatgtaacattcttttgaatttattttgaaagtcctagcaaattgtttgaaggttgttattccaatttccacacagggtgacatgtcattcttctgagtgacacgtaaagaacattataagacctagatgagtagtacggtcctcattatgttgtcgatagtggtttattatcaagaaacaacttatttgaagattaaggtggaacattcggacagggtatatacaactgttcgactaacttcgatcttacaacaagcccgcatacaccgaccagagtaaatgcggctcaagcaaggctttggagatactttcctttttatttatcaattaatccctatttcagtggaattttcacacattattgttgtaaaattagaaagtaatcgagtttcatattttatttattaattgtttttggaaactaaattgatataattttttcctataaataatggagctattccattatacaaggatttgaaatcgttttttctagagatttcttacgctgtcaaattatttgtaaactttcgagagagatcaagatcttacttgtttcttttctcttaagtaatataagtaagaggagagtaggctactaccaaaatcacggtgacaaatctctataaatgattgtgttcttatttgcttaattattatttattattctcgtcgctttaataaactcaacatcattagctaaaaacgtgagcaacaatagtcattcttcctttagtgatttctgatacaaaaagtgcttttttaagggcatttaatatctgataatataattgtttcttttgaaattatggattacttgaagaggaagaggcaaggttgtaatgggcatacgaccttaaaattagacataagtaagggatatgatcaaatgtagtggggttacttgagagcgatgttggttcatatgggttgtgatggtaggttgattaatttacttatgaattgggtagaattgataagtcgatattttgtctcataaatatggttaatttatgtattaatattcttaaattgattctttaaattattgattagcgtgattttatttttttaggctattttaacgactaattatgtatttggagccaatttgagggattttagcatattttggtggaaaatagtggaagccgcgagctcaattttataaggaagaacttaatttcaaatttaaacgacattggaagtagaacttgttgggttttgtggcctaaataaaa

SEQ ID NO: 163721 - DNA, 2239 bp, Cannabis sativa
tttctagttctagttttagttggaggctttaatgagttatgcaaaatgacacacaaaagaaaggtatttggtatccatttaatctttactaataactccaatgagtcatagatagtcaataatacctatttggttactttaggctagttaatacttaataccttattaaatatagtgggagtgtaactaaagtactactccatttttttttaatatgaatttatatagcggttactccaatgattttaaatgttttttttcacatacaaaaacatagtataatgtattgtgtattataaaacagagaactagaagaaaatagtgaatagattgtattgaattgatcaaaagagattacaaaagagtgagccttatataactcaagctctagtccaatataatatcaagagtttgaagttagttagagaaggtaatttaattagtgacgtgacacattaataataatacgaaaacttacaaaattactgaaatttgagttaagttttacaaaaatactgtctcacagaaaaattttcaaaaattctatatttttataaaacagtagtagaaaacaaaacagaacaactcaaaataacagtagactaactaaaaaacacgagtagaacacctgtgaaaacttaagatagtatactgctgtatgaaacttataaaaaaaatacagtaaaaaagtaaaaaatacctctaatagtaaaattagtatatcatctaaatttccctaatagtattattattgtatataagatgaaaagaaaatgtatattattataaacttcgtttataaattttgcttgtgttccggtctaatgggcccaataaaagcccaaataattcctcaagccattattaacgtcggcaaggcccagtaaattttagacatccaattccaaaacgatgacagatttgatactacaaataatagccacgtgtttatgacggttacctaatcgacacgtgtcagacattccaacaatcaaaacgacaccgtatcatcaccgctctctgttcaagtcaaggatcgatccattacaagcggcttcttctctttttttcctttgtagctaagcaaagcatctcaatttcagataataaaaataaaaaataaaaataaaaataaaattcaaagagaaagagtgagagagatctagggttttgattttgaatctacagaccaaaaatggctttggaatgggttgtgttaggctacgccgcggctgcagaggcaatcatggtccttctcctcaccatccccggtctcgatggtcttcgcaaaggtctcgtcgccgtaacacgtaatcttctcaaaccgttcctttcgattgttcccttttgtcttttcttactcatggatatttactggaagtacgagactcgtccgagttgcgaagctgattcctgtactccatcggagtttctccgtcatcagaaatcaatcatgaagagtcaacgtaacgctctgttgatcgcctcggctttgatcttttactggcttctttactccgtaactcatcttgttgttaggattgagcagcttaatcagcgcgttgagcggttgaagagagattgagtttctggtgagagcttaaaccgttgattttaatgaaaggggtttatgatttgatcttgatcgtagggagtgggtaaacttttgtttagtattttgtgcttttgaattgccttaatgatgataagttgttttttttttctgcggagtattagtattttgttgtactgcatttgctttccctaatcattttgaattgaatttgtcacaagtttcatttgaaaaattgctttggattggtgggattggggtcttgaattcgatttcgatttcgatttatccaatgcaagaattcaaagtgggtttggcccttgtattctatttctttcgaaatgatttggctttaacactatcataactttgattgattgtgttacttgataatgcttgataaaatttctttgaaatatgaattggtttgagttgtttgctacacttagattagattagacatgttcaagattcaagttttgcctgaattggataaacaccttatttatttggcttcaacagattctgtaagaagagagtttagccataatatcaaaaagataatttgggttacatattttatctagtcagagttgattggttagtttcaaaatatatgaaccttaattaggttagtcttgagctttgttttgttcaagtgattgg

SEQ ID NO: 163722 - DNA, 2271 bp, Cannabis sativa
  modified_base (1555)..(1570): a, c, t, g, unknown or other
  modified_base (1682)..(1714): a, c, t, g, unknown or other
  modified_base (1846)..(1858): a, c, t, g, unknown or other
  modified_base (1900)..(1902): a, c, t, g, unknown or other
ggggaaggggaagaagattacaagttagccttagttcacctgaaaaaacagagtcatacactcacaacaataaacatcataacatgaatcatatggcatacagtattatgatggttacaacatccatggccagtgtgaatgagactattttggatcccccagtcccgaggcaaacgaatggaacccgcatgaaccatcatgagatccaggtgcagaagccgctaattcttttctttactctttttttttttatttattttttgcaatcacactttgaacccaattttttatttgggatatctgataagataaacaagttgaattcagatatcaaactcttagtttatgtaagcaacgtatatcatcacacaaataagtaataatgcaaaaatgaacctctttttcttaaccccctcccagaaaggaacacaaaaataggatttcgaccataaaaaattcactacttaatttgattaaataactaaaacataataaccccaatttaaaactttctacctaatctaaataagtacataaattcaaacgataataatttgatttaaaagttctaatacaaacagaacgagtctgcaagtaactaaacctcaatactcacgatgaactcccatactctaggaccaaattgaaaccctaaaattaaaattaactaatttcttttacgaagctagtatttactataaaaacatacaaatgttaaagattaaacaagctaatcataaaattgtagagtttataacaacaaaataaccagacagaaatgaattattaaaaaaatgtagatttacaaacctgaaataataaaaagcaagcaaaatcactagttatttctcgttttaactataagagaaaaggaaaaaggaaaaaaaaaatgatcccaaagaataataagaatttctaggcgagaaaattgtgaacaaagaagcgaaaataagaggtagttagaattggccaatttctaagaactttcctgttgtagaaattggttgaagaaactggtgaagacgaagaggggtcctgtttggataaggctaacatacgccgggtggcgtaagctcatgctttctaggccaacgtggtcaaatgaatgcatgtgttgtgggaccctcggttaccctccctctcttttttcacagtgcaaattttatgtggcgcctggaaggagacaattcgcccagggtcgatttttacacattcctcactttagccaccgcgtggattaagttggccacttgtagttgtggaccggttgtagatgagaatgagaaatgtcaaatgccaaatgccaaatgccatatgcaaccaaaagtgatacattattaggataactaaataaaataactaaaaaaataacattaaaccaacaacaaaaataacatacaaataacaaaaaaattaatgacaaattaacaagaatataacataaaaatacataaaaagattaaattttttacaaaaaaaaatattaaaattttgtacaaccgtatttttataatttttttttattatttttgtgtatttattattattattattnnnnnnnnnnnnnnnnttattattattattattgcattttaatattagatcctacacattttaatttaataaacaatataataaccactaactaattattgttgaaatatattttactaggatctagnnnnnnnnnnnnnnnnnnnnnnnnnnnnnnnnntatgaatttctaaaacaataaaacttaaatacttataaagtataagaaaccctacattggttgcagcaaaatataaaaaatatctccttccacttagatctctaacccttattcctttctatcgcagagtannnnnnnnnnnnnagcccgattctccttcagttgtttggattcttcatagtcttnnncactatgattgagtactaacttgctatgggtggacatgcactcaatcactaaggctcgaaattatttgtgatgaacactcaaggattcgaaattagaaagaagaagaagtctcaaaactctctagttgtttgacatgttgtaaactaggtttagagtcattagtttgattatgagactattcttttctttttatactaattcacttagggttaggattgatttatatgaaatacaaaatgataaaaaattgaccaaaaataagagataagtggctggccatgatagtaggccccactaattatacttttgccatttttttaaccatttatctattatttcacaaatgccatatttttttaattttaatc

SEQ ID NO: 163723 - DNA, 1668 bp, Cannabis sativa
ggggaaaacaagatagatgatttagcaaaattaactgattgactagtggctctgtgataagtagataaaatattgttaatggttatgctagacttctcattaataggggtgaacaaaatgttatcatcaacaaagagtaagtgagacataacttgagcatttctacaaatcaccagaccagagaagtctcttgtaataccctactaaactaaaggcatgttatcgtgttttacattagtcgtgcaatttgttgctaattagcgggtttatagaaaattgtgatttatataaacttttacttaattactttttaaatgaaaataaatatcttttacatagtcgggatccttatttaaattatttacaatcataatacaaaatacttgatacaaaagttgtcgcctatcgaccatttaaaatatagattgttgtcctaaagatcgtacgctccaggtctaactgtcccaacatgtataatcttcatcccctcgcactcactgttgttcagccttagcgttgcccttacctacacatgcaagtaataactgtgagtcgacagactcaataagaaaagaataatcataacatagatataaacaggattatgattaggcgcccataccctcaaccataatccttccacgcaccctaggcggtactgagtcaagaacattcaaaggacagcactatcgaccataatatcagcctatacgcagtactctagtcttactctagtcataccaatgtgatagcgtcaatcggtacttaagccaaacatacattcatttatatctaatataattctaaatatattgatatcatcattctaatgtaatctaacatgcttaataaacatgtacgctaaacgtgtaaacacatatgcatatcattatactaatcttatctcgtttctgaattcaggtgtgccggtcaaccaaagtggaacagctggtcgacaatttacaggaccctaaatcacaatattcgtaaaactaataagtgacacgctaaatcactttttagggacttaaaatcgaagctaaaagttttcctatttatggataacatggcataaccctaaatattgcaaaaatgggaaaaactaggatgccttaaaatgccccaaccggtagaccagtttctaaccagaaaataggttctgtggggtttgccaagggatgaaccgaaattccaattcctagaggacatactaaaccagttgactagtttagtacatgaatccaaaacaatcttcttaacaactcaatttgaccacaaataactccaactaataacctctgaaacaaatatcacaattgaagagcaaagcttgagctgtaaagctcaaaccttactcaaacacaacaccaagccacaaatacaactcaaatcagctcaaaaaacttataattaaccttagaaattataaccaaacttaaattacacctaaagtaacctaatctaaaaaatttgcatgaatacctttccataaagcttgaaagatcaaaggaacaaagagagggaagcttacctaggattagaatcactaaaatcttgctaattctgtaatgattgctttagtaatttagattagtaaaggcaattagcactaatttttgttattttataattatttatgaatttatttagttgtggaccccaatattt

SEQ ID NO: 163724 - DNA, 772 bp, Cannabis sativa
gagacgttggtagtcttttacgcttaagaaggcttgctggcctaattcatatttttttgaggagattgaagagcgtgcgagttctttaggtcacttacttttgcattccccttgtcctgtaaaggagtaaaggttccaacatcaacataatttttccttgtatttcctccaacgcactccatcaaggggtcattgtcaaaatcttcctcgcctagatctctgagctttgctcaaaggcgatctattaacttttccatcttatgagaaaacttctcctgatgggctaaattttgtttggtttcgtgtagctcattagacactcagaccacctcagggtcttgatcataacaatagtcgtctttgtaatatctatctttgacgtaattttcatcatcttcttcctcttactattcttgtcaccaccaacatgatcatgatggttgtctagcttttccccttgaacattcacgttggacgtattcctgtatctcgcattactcggctgggcgtgctttggcgagagggggttcacttcctccatgactgtctcgaggccaccctgaagagtctttttaagaattgtctttcgtgtgaacaccatggaagtagcaatgatctacgtctttttttatctctcaatgaagcaccaaaatatttactaagattttcaaaaattgaatatttaattaagagtaaaagaaataataacttgatgaaataaagagatgaatttttttacgtggttcaggtgttaataaactttagtccacga

SEQ ID NO: 163725 - DNA, 1529 bp, Cannabis sativa
aatcaattttcaaaagatttgaaactacattctgatgaagaaattcagaaaaggataagagatctgtaataggggagttcttacctctacaccatttccagagcatgctacacaatctgccaagccctgaagtgtagctgacctgtcttctgtggtatcatttttcgaaccagtatcctttctttctgtacagccagagcaaaacatggccaagagtttcggaccttcaatgagaataattatagattgttagtaaacatgaaactgcaatgttacagaacaagatataggaagcatgaacaagataaccaaacaaataattaaaacgataaaacaagcagatatacttttaagaagagtactaacaatttagtagaagaaacagcagtcgaatagaatgtttttgcacattcaagccagtttcctttctgagcagttttaagatactttcaaacacttgagtattacaaaacctgcatccagtgatacttcattcaggattaaatggcatcaactagcaccttagaatattaaatggaattacaaaaagaaagttctgggcttacttttccctctcagtgtaaggattgcatcttattaaaataatgttcataatggacacagcttccagccttgcagattcttctgtaattctcatggcagtttgaagcattatattaaagagagaaacccagtccacacgagaaacataactcccatggctagaactcaactttcccttctcatatatagttttctcatcagagagtttggtgagtggaagataacccgcatacaaataagagttctcatcctcaataatagatattatatctgtcttttctgcagtcccagatccaggatgatgtgaagtgttgttcccagagcaaagaccatcaaccatgatattatccctgagcagattgtactggaagatcaaatcaaagttcataagcacaagaacaacaaaaatgcaactatgacattaacaatgtacaggtactattttcagagaatatcatatatccacctgcaaaacattagttccatgtcataagatggcaaattatctactacaaccatttccgtttttgttactagaatcaacagtcccttatatgaaataaaggggagtatagaatgttgactgcaagatctcacttcttttcctaacgcaataggaatgcctgtcattataagaacgtgagttgtgttacctggacgctctgaacttggactaaaacagatagaactcttaagtttgctcagggagtatgtgggacattcctccttttggactcttttcctagttgaataaatacgtaactttttattggtagcggtttctttatggatttgtagagtgtgttttggaaacaattctgaactttctcaggtgagaatagacaaggtaagctcagacgaagattttcaaatggctcattggatgattcttttggaagggactcggttaccaactcttttatggcatgtttactaaaggggaatgggaatcaattgtatgggat

SEQ ID NO: 163726 - DNA, 865 bp, Cannabis sativa
aatcaaagaaaagtccctatcagccttcggaccgttgcaaccctgattcttccctattctcaccttttagggcatctccaattggcactcaagcccaattcttaaagtggccttcaaaagagtgttgggcccaacctaaagcccgtgaactcttgatgggctcactcacaatagacaagtaccataaggaacccaccttattcaacccaatcctcaacatagatgagtttagagtctatgaacactctaacggcccaagaaaaaggaaggcctcagatggattcattatttacccatcatctaaaaacgatgcacctaatgaggcattttccctggataacgactctaatcacatttcaaatgcttcgtgctcctcctcgtcccagaataacaaagacaggaatgaacctcaaatccaagacaacttctcactaggggcgaagaatgctgaactcactccaagaagaaggggaaggccgaggaagaacactggctctgctgaggggaagaaaagaggtaggccatcgcttagccagtcgggtctctcatccaccccaagaaaattcaaaaggagtgcgcctaacaacagaaagggattcatttcatccgtctctagtcactgggaaggaaagatggtggatttgaagatagacctcaataatcattttgttgtggttgaaaaatttcagaacctctctaatgggtgccgcattgaagaattacaggaagaggatcatgcagcaccaggtattacaatggaaaatgaaaaggtggattttcagtttggggctatggagacttgccctcaaaagtctccagatacccaatgaaaatactagcctggaactgtcgtgggctcgggaat

SEQ ID NO: 163727 - DNA, 612 bp, Cannabis sativa
gtgatgaagagtctgaggaagaactgattgagccaactgaatttgagctaaagaggaaggagcatctgaggttgataatacatgaatgacaaatgctagtgccaagagaatattatgcacagataagggggaagaaactttagggggaaatatggtggaataggaaaactcaagctcattgaaattgacacttctagatatgtaaatgtggtatggggtgaagacatcgataatctttgtggaagggattgtaaccaagaaagacacatttagcaatcttgaattcaaacttgtgactattatatggtcttaaaaaaagaaaacaagcacaaccaaatatttttaaaaatgtgtagcctggagttgtgtgataaatactttcataaggtgattagtattgactaacaactataggaagtctatcgataagaaggaaattagacacaaaggcttcccactaaaactttagtggcatattggcttaagcaagcatggttagtcccatttcagtgacatggcaatattttctctctactctaaaattgattcctagtttttggagtagaggctgtaattttttatatcccccccccccccacgtctgtttgaggg

SEQ ID NO: 163728 - DNA, 2247 bp, Cannabis sativa
agagagagagagagagaaattgaaggattttgccatctaagagatgacttatatacacaactattagtttgatacaaaggctaaggctaacaaacctaacaaactaactactaacagacttttaacagttaacagaatcaactatctcaataatgatggagtcatacctccaaggtcaagatttgtgggaagtcataggtggtagtgatgtaaacccacctaaagatgctagagctttgaagaaatggaatatcaaagccagaaaaaaaaatttcgcaatcaagacaacaatcgaagattaaatgttaaagcatgccaaaaaagttgaatcaccaaagaaggcttgagacactttcattataagaatgatacaagacttcaacttcaaaagaatgagctcttatcaatctcactacaagaaatgacaataaatcaatatttaaaccaggtaaaatctctttgctgcgagatttctagttaagagcctacttctaaaatgttagactcaagaataagaagaataattatttgtgggtcaaggcccgaatatagaagttttgttgctgcaattcaaggttggccaacaaaacctttctctcattgagtttgaaaacttgctatccgatcaagaatctttggctaaacatatgtttggagtttcaagaatgaagaagatcaagaatctttggctaagcataggttattgttatgtgaattatgctggagatcatgacatgcgacaatcaactagtggctatatgttcaagattggatcaggagtcgttttttggtgtagcaaacgacaactaactgtgtcattatgatccacaaaagcaaagtatagagcagcttctatggtagcacaattgttatgtatatgtctgtattgtacacatgtgctagttaagtctagtcacactctagttagaactagcagacagttatgatagtcaggaacctaggcatgttagttggttcctaaatagctcatgtatataaatagctatatctaacccttttgtaactaatacataattgtaacacttttattcaaaactcaataaaaagagaaccggtatcccaagggaattcaaggccaggtttgattcgattaaacactgtgtgtgtgagtttgttcgagtgttttgatcaaggcttagattgatctggaatctattcaaggtgattgattcatgtgaatgctcagagagttggatcttgaagcttttttgaagttcaagattctggtgaacaggagaagagatgggcagcatgaagtacgatcttgagaagtttacaggaaaggatattttgggctatagagggtgaagatgtgtgcagtactagtgcaacagagtgtacaaatggctttacttggggaagacaaacttcctgctggtttgagcgagaaggagaagactaaaatgttagacaaggcacatagtgcgataattttaagtctgggagacaaagtgcttagggaagtctcaaaagagaagttagcagctggtctttggctcaaactcgaaagattgtacttgacaaaatctctacccaatagattattcctaaaacagaagttgtattcgttaaagatggcacctggaaagagtatagaagatcatttggatgagtctaataagatcattcttaatttagattatatagtaatcaagattgatgatgaagaacaagcaataatcattatcaattcactttcttctgaaaggtattacaagagaattgggggttaatcaaagagtggtgtctatatattgtgataatcaaagtgccttatgtctaagcaagaggcaagtctttcatgaatagaccaaacacatagatgtcatgctatattttattcgggacatcatttttgaaggaaatgtcaagctcctaaaggtgttctcaacagatgacaaccactcagatatgctcaccaagccactgccaacaactaagtttagacattgtttaaatctactcaagatcacttgactgcatcataatgatcttgaccatgagagttctgtaaactattgtgtacagttgcatctggatattgttacgtaaatgtttgtactgtactcatgtgttagttaagtctagtcacacttatgttagaactagtaggcagttgttaggttattttcagtattatttttaggttcatttttagtgtgtttttaatttagttctactcttgtttagagcaattttatgctttttatcttttttttttttttt

SEQ ID NO: 163729 - DNA, 1132 bp, Cannabis sativa
aaccttgttgaatagaaaaagaaaacaaatttaaggtcttttttaactgtgaaaatttaaccatacacccaaaatataaatttaacatattcaaagatttgacaattgtaagcaactaaaaacacactgaccatacagatcgaatgacatgaccaaacccaaatattctcaaatgatatcaaacggtaagagaacataaatagatagcctaattcggggactagaaaacctaaaatattatttctaattgcattaataagttatggtgacttacttattagactagagttggtatatgtttttttttctttaataaaataacaacaaacataatatttatcaaattactaaaattctaccaccgtcaaaatgttatcaaagctcactattcttcttcctactactacccaaccgaaatgagaacttgcccatcatcaccaacaactctcttgggattggtagcaatataagagtgacacttgtaagtgtacgtgtaaactaaaataagggaaaggataaatagtagtggagagattttgtgaggcccaactttggtagtataagattacaaagaattttaaagagatatattttcttcaaaatcttttaaatttgagagaacttacttggcagaatttataggtatctgcattgaattacacaatagccatagatatataaatgaaaaatatatgcacgctctcatcgctacatatccaatcaaattatactcactttctaatacttattcaaaaaatttggctctttttattggacttgtcaatttcaaacttgtcattattttagtgtatattttaaaataattagcaatttgagtcttgaaatgcagaaaaatacacacaatagccacatatgaaatcataatagataaaacaatttaaacttttgtgacacagaccaagatgaatgtttaaatttgtcaggaaacttgttctttaaaatttgacactaagaatagaaacttgacataacttagtatttgtgttcttaaaaagatgtcctgaataaattgaaagctttcatttgctggtaaggctcaactaattcactctgttttacttggccttaggaattattggatgagtatatttgttcttcctcatagtgttac

SEQ ID NO: 163730 - DNA, 982 bp, Cannabis sativa
ctaaaaaaatcaaacaaaagtttttttatttcaaaaatcaaataagtattttgaacaaactagaatttctttttaaaaaatcaaaatattcaaaattaattatatgtaaaaattagaaatctaataaaatataaaattatctaagaaaaaaaattagaaaattaaactatttacaactgaggaaagaacacacaataattcaaggtggattgttagaaactgaggaaagtcaaggtgatatgcatttggtttgcaacaaaaacgacgtcgaattaaggttatgtttttaaggttagtttaatcttaaaagttaaaagttaaaactataaacaccgtcgtccgtacccgagttaaaaacacttgaactcgacgtggaccgaaactcagttcccaccttcccaaacagatctctcacaaaacaaaagaaagacaaaccccataagtttccttattcagttttcttcgaattttgagactttttaccaggtaaatattattggatcaaaagcactagtctgtgggacagggggatcaggtcatgattgatttagtcattgttgatttgtataaatatgtatgtatgcttattatgatttgattttgaaatggttgcagatggagttatggggtgtgcgccgtgtgagctgttgttggggtttaatgattttgggtttgttggtttttgtttgtcaaatgaaagggtcggagggtataagatttgtaattggcaaggaagaatgtttctctcataaggttgagtatgagggtgatactctccatttttcttttgttgtcattaaatccgatacaccctggagctatggtgacgaaggtgttgatcttgtggttcgttccctataactttcacttctagttaccctttcttgaattatatataataggcatttaaattctttggaattctatgcttaaattcagtgcctcttgtatttctatctcgatttgtagcattaggttcctc

SEQ ID NO: 163731 - DNA, 945 bp, Cannabis sativa
gtgagtcgagtcgctttatcaattgtatgagcgacacaattcccagatcgttttacaaaatttaaatgaacaatacacaaatttgaacataaaatcttacaattgtgaataattaaaccaaaaatagaagacaactccgcatagcttgaaccaccaccaaacattccatttcaatgaccactcgttgccaattcatgccttttatccaactcaaaacctcttttaagcccattgcctcagccacttcaacttgaaacaaactaattttgtaccaggaccgaaaagctatgaccagaacacaattatagctatttttttttctttctcaaatattgatcatccacattaaccttgatattattatggttatatattctttttatttatgtaaattaatgaataaatagattgctctgaactttggaattaatgagatcgtgtcccataaattattagccatttaaaacatgagcatttactattattagacaccaatattgattatttttattatgaagtggtgtcttaaaaatagttagtaatatttcataaaaattattatattaaattaagtgagattcaacacttaattgtacgatatgacacctttagtagtgttagacactattggtgttttttagcatttatgtttgaatattctccctcaactttaaatgttagtaatttatgagacttaaattaactaattagaaattttacccttaattatgaccactatcatattttatcctttgaaattttactataacaactccattggaacaaacttcaaactgaaatgacgatgaggatacaatatagaaactctcgcagagttatatgttggacaccacaacaattgaaaatgtaattactttattattgaaaaagtaattacaccaagacttagaacactttttattagaccacaatacaccaaacact

SEQ ID NO: 163732 - DNA, 1489 bp, Cannabis sativa
aattgaaaaattgaaactgattaccctttttcccttcggtaaccctataaaggaaaaaaaaattcttcatttacaattatttagccattcgcatactcagaaaccaaaagcaaaaaaatttcctcaagccatttgagttcttcatttctattcagatcatcttctttaggaagcttcattcaaccagctaaccaatgagtaaatttcttcctcttatctttcttttaactttgtgttctacatgctctctgtcattactggataatcttactgttagaatttagggtttttgaattttcgttcgaatggggtaacccgaataccgagcgttgatgttgatctgaatctataatgattatgtgcaaagttataccccagttctgctcgccttccttatttggctctttggagcttctagggatttcaaaacctcaatttccctttttcttagggattccatcaataggatgttttcctaaattagatctctttatcctctctggttgaagtatctaggtatttttcttggaattacatttcaatcctgttccgttcctcacctctctattcttcttcttttgtagatgaacctaagaaaaatttggggaggtgataattggacaaacgatgacctactccagttactcttcgagaatcaactgagactccatgcaaaaaaatcgtcctcatcttcaagtgcgcggtcttcatcatcaagtttctctgagtggcatgggacgtctcaagttagtctgttgagaccaaagtacaacatcaccattaccccagccaggttggtggagaggagtacggtcgcctaatttgggagatgaatagaggatggagatagtatcttctagcctcattgacctacaaggtccgggtaaacgttttggacacactccatgtaggtcgtgtagggtctttaaagaggtactccgttgttatactcgaaattcagttatgtaccaagagttgacacgtgtcctacaaaaggaatatgaatcaactcaaataatatagtaattaaatgacattattaaatggagttcttcccgattaattggtaaacagctgcttcataaattttttatttattaaaatagttttttttttcaaatagatgtgtttgattaattggtaaacataggctttctgatttttaacatcgttcccacgatcccacgttctaacgttcctttcagtaatgtctttcttcccgttacgaacttcagtgcattgcctatataatgcatctgaaccaacgggagaaacacatctctttcttcactagaaaacatatacgatacatacataggattatattacatatatatattccgagtagtagtcggtttttaggtgtggtattttgacggttctctatcgtgtaatagagttccaatatagtgtgtttaactaggctgttttatcctggggacgacgaggctgatagtctgcttgcacatatctgggcagtgccgcgaac

SEQ ID NO: 163733 - DNA, 1176 bp, Cannabis sativa
acaatagacccattggtcggccccacaaaaccaacttgctcactgcttgtcaaaggcccaatcacaaccggccttttattcaaaagagaatggcccaccaaagctttatcataaccttcaccctttaattgtattcccatgggcctaggacaaatactcagcccatttgatacattgtgacccaaaaaagaggtcccactttcaccaataacatctcccttcggcccactaggaaaaaggcaaagcccacaagtattattaatatccttgtccttatccccactaatatcaacctccttattgaccaaagggtaaaccaagtcaaccgaggcaaccaagagacaagtcgtcttcaacatattagagggaaagaaagcaggtagctttccatccattttgccgtttgattcaaaatcattaccagaatcggtaatgacccgcgtacgatctacaagctgggctttgggattccaagaaaccgtctgcatcttgttcttcccaacatgagcacgagaggtcaccatcttgcctcgaaatgatccacgagcatgtttgccagccaaccgaatagagctaatgccaaccacgacaccgatcgccggagaagcaccagttatcaaccgattgctaaccagtacgtcggacgaagacccaataccattacccattttgcaccagtaaaaacatcctgataattcgaaaccgtggatagccagggtccgtacaagggatgggacaccttctctgttctccaccctcaccggagaattcagagagcaaccactacgaagatggcccaagcagccacatataaagcagaaaagaccagttttctcaaactaaaattgaagccaacgattgacaccagttaccaaatcgaaataacaacccgagataagcggttttgtagtattaacatctacccgcaccttgagataattgttccacgaggcaggttttccttcataatataactatatatagatacagacttagtctggtagtggatactgatcaaacttgagaaagaagaagaaaagggaaactcatgggggtatattgctcctcggagagaggtgaacaacttattacagcgtcgacccactaataataaaaagtcatcttcttcaccttctcacgactccttcatcccaagaaaccgttccactaataaga

SEQ ID NO: 163734 - DNA, 1007 bp, Cannabis sativa
aaaaaaaaaaaaaaaaaacaccgacgggtggcacgaattaaactcccgtcccatttcttgagaagaattccctatacaaaaaggatacttaaccttaaccagatgaaaaaaccatttttactcaaaaacaacttattgctttattattattattttttttctcttttccggcaagcggacaagtgtagtccaatttaggagaaagcggcgacgaggcaagaatggtcagtttagggtaatttccccttcatttccgttcacgggagcacagatctaatttctttcctatcgggaccaaaaacctggcaaatgaaaccacattactttcatcagtatcgggtaatggagaaaaaaatttcttactaatttaattacactttcaagctgtcaaatgttaatctcacctcaagtccagcatctttcacataaatatttgtgaagagttcatgcgtatctggcattggactctcctaaaaaaacaaaatggaaaaagaaaaaaaatcaaacatcctataacgatcggagcaatgaaccaatcaaattatgaatcagaaatatgcatgttacctttgcctttgcaatggcttcgtcaacttcttttcttacttccttctcagtatcctgtaaaagcagaataactgtatcagcagtaacgaaaggttggaattttttaaggatgataattatcatttatttttttagggagcttcattgcatatttcgattatttgttcttcagaaatataaaatatttttcaactttattgtaattaaaatacaaggaaaaattgttaaacttccacggactggatccacagattccataacctactgaaaaagttcagacgaaatgggtataaatagaattctatgaaaacatccaacaacaaaatgatgagaaccaacaaagaaaaagtggttcctaaaaacaagtagacggatgtcaagtttaaggtgattttacaatgcacccctttaaaagatatgtactgatacactctctattt

SEQ ID NO: 163735 - DNA, 1915 bp, Cannabis sativa
  modified_base (1872)..(1890): a, c, t, g, unknown or other
ggctagggccccagccgctggcctagctgtgtgtttagtgttctctagttgagggattgtttgttggtggttctcttgtccatggttccttgcacgacaagcatggggaatctggtgacatggatgcttttctagagttgtcatcgtggggaggtcgagctttttggggtttagtggtctacaacggttgagttttggaggagactccgatgggcctccgacagtgttagtggtcttcgctcggtcgttgttggcatttttggccctctgtcttttcttttgaagctcggggacgggctaagatggaggggtagttgggttttgcgttcccttcggtgccgaaagcctgctggtggcgggatgcctctccctctcccgttggtgtgggttctttggtcttgtttttatttattgttgttgttttatctaagaattactttcagatctaatgcaattgactcaagcactatagcaaaaagctaggggttcttaagcatgtcaagaacattggtataatacttcaaggctacttagccgaatgcaattgactcatggactagggttcattaatatccaaacaacatacacatttctatctctatttcatctagttgatttattttcttagttcttattcattctattatatagagttttcgaaaatcttgttaaacaatatatatagtttgtttatagattaaattgtaagtaaagaagtcatgaagtactttatatgcataaagaattttagataacgagaatgaaatagatacatggtcttagagtataatcattatcgcaaattaaaatttatattattattattatcaatgtattatgttcatatatgcttgaaattttaaactttggtatgaacaatgttgcatatacacacatgaatgattcgataagttggattaatatgaagtttctagaaaccctcatccataatttagaatttcacacatacactctcgaagagtacttatagtaaatatgtgatcataggttatatatggtgatattttaaaagtgatgatattataaacaataatcttatgagatatattatcacaacacaaattttttggattatgtgcatgaggggaagacatgtacatgttacactcttttcttcttagctcaagttttgtcccgctgaattttttttggaaggatttcaacgagacaacttgcaaataattataaacatttgtatgaaaagaatatatgtaatattgcattcctgtttttttagcttaggttttgtcccactgtatgggttttcttgacaatgcttttaaggatataacttttaatatatttgagaaacttgcaattcatgaagaaagtagaaaatgtgtacgattgagattactgacacaatatatttagggaacacgtagattaacaccaaataaaaaagtaaaaacagtcatctatgaagattcttgcattgctcaactaaaatgagagcacactaaaagggagataaaactaaacacatgatttttcaagagaatagctatattggtgtccaacacattcaatcaagtgtcaatcttgcaaatatattcacaaggttattgccaacatcaacattcaagaagatgattctcacaagattggaatgcgtcaattaaaagatctctaagaatgccaaaatgaaagggaataatttcgtattgcactattttttccttgatcgagtttttgtcttactgagtttttgataagtgaaatttttaatgagttagttattataaacattcaatgacatatgtatataataattaccattaatggaaaatactatttacatatttatataaggatcattttttaatgggtattacccatgaatagttactnnnnnnnnnnnnnnnnnnntattaattttaaaaatattaaatca

SEQ ID NO: 163736 - DNA, 1360 bp, Cannabis sativa
agggaaattgcaattccaccaagtggctttattaaatttgcatctgacatatttcctctacttcaggtttgtataaattgaaaaatacactaaaataaaaaacaaattgtgtttatgttttactatctatcctatatgataaaggcaaagcagcttttgaaattctggataatcagacctcatcgataaatttgatgagaacttagcttttgaggctcatgtttagaacgttatttctacaggtctatgctggttctttctttgcaattcctttgtttcggtggtttctagtgcgtaataaaaatgctcagatagaaaagagaaaccgtgcaagagaacaacgagcccgagcacttgagcttccagatatctctttaaggcgaaaggtgagcacttttctgtctgaaacatttttccctttgattgtcgaaatccaaatgttctccctagcttcaaattttttatacatctaaaatgaaaacaccaaactataatgcagctcctcagtgctcgggacatggctcaaagaacagtaataggacaggatcaaatcgtatatagtactgacaaagattttgttgagcaagactacgaggctcgagaatgggatcgaagatttcgggagatagagaagtcagattaagacgaggttccattaagaacataatctcgctgcatgcttcacctggcatttaacagagttttgaagtgtcatatagaggcatagatagcacttgcaaatatttttggaagattagacacaatcccatttattgctgctgtgatagaaattcaacgttgtaaatatagcttatacttttgcataaatctaaaaaaaaaatgttataaatgataggaggaagttttgttctaccttatcaaatgcttcatcatatggacttgggaggaggaatgtcaaatttgaattttggcgtttgtaataaactactatttgtttttatccttaaaggttcgtacttgtatttgataaaagaataaaaacaaagatttcctccaataaacggttcaaaattagtaatttgaatgtactattttgcccatttacttagcataaacccttaagatgaaaatacctaagtaatacttgcctattcaagaagttattatcagagtgagattaattatgtcttgtgtaataagataaaatagggtgttcaatttgaaagtattttaattattatccttcaataaattattattttgaaaaagtaaatggatggattcaaagttattagcggtcacggcgtgattataaatcatccaattcaataacaactaactgattcaattaaaacagaccgttaaatattggatattcaattgtaatcggatcggattg

SEQ ID NO: 163737 - DNA, 925 bp, Cannabis sativa
gtgtcaacattttcttctttatcgagcgcggagagtagcgatcccttcttctagcagcaaggaaaaaaaatcagttgaattccaaataatcccttctaaacacagtgaggaaaaaatatcacttatcaagtgtgtggatgatgagcatgagtcacaaaatgtttgaagcttttgtagttgaataataattataataataagtaacacttttgtcccatttttcaaacatttaaatactaggctattttgtagtaatgcttcaatttagtgtaaaattttacctccaattggattgtatatttgaagttttttttgtacaatattttttaaaataagtaagtgatttaatacatgatatttgatgtatacaaattttaatatattttttgagacaaaaaaacacactttaatatttgagtcttatttagaattttatttgtggtctcattttcatttatttattttttgttttctttctaaaatagtttaaatttttctatttcaaaaacaaaaattctctactgaacaaatggatagacatttatttacattattgaattgttattgcagcttctaatattaattttgttttaattatattgtatgtaaaaaaaaacaattatattccttttaaattaaatttatataaaactaattgtatctacttgattattgtgaaataatgttgttatgaaggttcgatttattgtaatttgatagtctatggcaatgtgggattattggttcctctcaattttattattaaagttttaggatccatttgtacactatatttttttttagacactagttaaatcttttaaagaataattgaattgtcattgtgattaaaatttaaatttgtaccgtttttatttaggcacatataattagtactaggtgattgttacgtgccaagccacgt

SEQ ID NO: 163738 - DNA, 1123 bp, Cannabis sativa
tgacaaataccgaaactcatttctcttccccattttgaaaccctagcacacagccgcccacatccttgtctctttgtttctctctcttctctctatgtgttaaagttctgtagtgtttctccatttgaacagagcgttggattactccttctatttttgagtccattttcgaacactatgggctgaggtgtcttcaagctctgccgtgttcatctttgttttgttcatcttcatcatcttctatgttcaaggtctcatccatggatgagataatttaaggtaagtctttatcttgcctctccttgcattcttcttttcttactccttcacttaatttttgaattaatttctcgttttcatcttgagtattttgactacttagtagtgattttaaatatatttattgtgtattgatcattaagtggccaccaagtgtttgtaataatattcaaatgaaaatataattattatttttttctatttttatgctgcttttaggagtaactcttaagtttcctctgagctagtttgagtagctcaattttcaaaagtacatttgaaatttggagagattagctaagagattgataatggtgaagattttgagtatctggggtacaaagtaataaattgcataattgtaaataaatgtttcatctctcagttgagtaatagagccaacttttagtacaaattgaggttttactttgtgagatatgaccatgttatctatcaaactataatcgtttttatttaatgagatttttggaaactaaatatttgagaactaaggaaataataaactacagaagtaaagagatgaagatattttatgcggttcgggtgttaatttaccttagtccatgagttagtctattagcctcttagagctttttttatttgcttactatattattgcaggaaatcttaaatctatactctcagtttcacttgaagaagaagacgaagagtaatcttggtagagtttcaactatgcaggttctgatccccctttccataaaaatagaaagactatttattggctaaatggcgggtatgtacatgcccatgacccgcctagagtttttactcaaagcccactaatagggtaaattacatgcaa

SEQ ID NO: 163739 - DNA, 1241 bp, Cannabis sativa
aattttagctagacactctatagaaatcaggcaggaatactcttgtataaaatactccatagccaaaaaatttaataatattgactcattaacacttcaaccacttataaatcatcttcttttttatttcttaaagcttaatttgtgttttgttaaataaccattgataccttgatttttgttcattttataaaccctaactctaaaaggttatttcttaaccttaaatttttttccttcctaaccctaacaatgctatttcaatttctaatttaatgtaatctcaagcctaaatttttttatgaaaatatcagggtatcgttaattttataacatataggttaaatatacatcataaactcattatctaacctaaagcaaacaatttgcatatgaaaaatatttaaaatatagttaattttaatatattaaactattgttcaaagccaaatcttttgaaaacgaatgagagacactacaaaataactagtatatcccaagagttctctttgctttattccgcttatgttatgccgaaaagtacgtcaaagggcccaaaatccaaatcaagctataagcatgagaaatttatataaggacttagaggatatagaactagctaatctccgaaaattagtggctagttaccctagttcttggaaggtgtaggctcatctacgaactcgatgtccaagcactaggacaactagccactaatctctggaaagcaaataaggtgaggatgcttaactaggaacttgacttgaagcccacataaaagagtaagatcaattagataaagcaagagcaatctccatttcttaggttaaatgttgatacttcgatagaggaaaacacaagaagaatgacattttgaaaagcttgaacgagagaaagagtatgatcaaacacataatagtgaggaaggaaaatcacaactaaatcaagaaagctacttgggcaatattatataaatggtaataatatcatgataccaagaggatgagctttgttagctaaagctagtgacatgtagatatagagattgattctcaatgtgtttttcaggctattcgtcttgatttgccaattcttttgtgcttgtatgttttttttgaaatgatacatgtgcttgtatgttactatcatatataattgtaaattaattatttggaatatgattttgtctcgtggttgtacttttacggaatgtatttcgtgatgtacgacagccgttagat

SEQ ID NO: 163740 - DNA, 1548 bp, Cannabis sativa
ttttttttacataattgatgtctagtacttatcaacaccactccttgactgttgttaacttttgttaattaaaaaacatttgcagacataataattaaatttacttttgagaaaataaataaattatttatttataagtaaactaaaactacatataatttgttgtgaaaaaaatcagattattataagtatttataaacttattttgtttatacataacaccaaatgaaataatgtgaaatatgattacattccacatatatatcaacaccaatcttctcaattcttcaaaaaaatttgaatagttttaacataaagattagtgaatttaagtgtcaaaacataaaaagtttgggactcaaatgttattatagtaaaagtgtggaaaggaataagaaagtaaattaggtttgaaagttgaggacattttagttttagttttagggtttgtggtcccaaaattattgggacaattgaatgaataataagttttggatggaatataaaaagtctcaatctggtggggagcaaagagcaaaccaacaaattaaaccagtctccctctttaccctcactttcataataacaataatactaataatataattattattattattatgtcaaaagaaaaatatcattaataacaataattataatgatgaaacaactatcttattggagtattaaaatattttgatgttttttcatgagtttactcagaagattttagtgaagctgattttctttaaataataaaaaaataataataaatgttaaattttaacatttttaaaatactagttttccctttagaaaaaaaaaattctagtttttcgataaatataatttttaaaattataatttttttactaattattatttatttattttttaaaaataaaaataattcattatacgacataaagtctaaaagtcacaaaatcaaacaattaaatttataggataagctccaatcaccaaatacgagacccatctaaaataagtacgctctttgctagagagtgagcaatgatatttaaagacttattacaatgagaaaaagataaactaaggaaagatttcttaacatgagatatgttgggtgtacaactaaagtcttatattggatagaaatgagaagaatcttgggtatttaagtatgaacactatctccattggaatgataccttttggaaatgtgcccaaaaataaatttatgaggacttaggcccaaaacggacaatatcgtactgatgtagagatagatagtgtccaacagtcctaacaagtggtatcagagtcagattttaaattagtagtgtgaatgaattctcagaatgccaaacaaaggaggtgaagcttgctcctagagccgtcagaggttcagatctgattcaaagagagttcaaatctagcttgtgaaagaaatcatctaccttattcaaggggatcttgagtgttggaatcgagagattcgatttgcaatttttcaagggagttggaaatatgttcttgagtggtttgctcaaggtttagatatgtaat

SEQ ID NO: 163741 - DNA, 3335 bp, Cannabis sativa
ttttctcaaaaccccaccagaattgtttaatttatccatcaatcctcttggctagtcgtttcgagaattgagttgtctacatagcatagaatgggagagacaaacctttaattaaagtaggcctactagccttggacaaatttttagctttccaccaatgaagtttaaaaatgagattattcaatgcaaattgaaaatcatatttctgtttggaccgaaacagaaggaggcccaagtatttgatgtttccctctaaactattgattttaagggtcaacttattcctcaaattcatactagaactagtattgttactaaaaaaaagactagtttttaatttgtttagccgttgacttggtcagctgcaaaatttatcaagatacccaatagcctttagcctcttcaacagcagctcaattatttaggattaaatcatcaacaaagaagatgtgagataatttaggccctcctctactaagagtaacttctcccttaatggctgaggcattaatggcatcattaattaatcgtgaaagaatctctactacccatataaataagtagataatagattcttttgtctaagctctcacttcggagatagagtttcaatcgtgcagtcatttaagcaaatagttaacttacatatatacttttggcttacaaaatcaatctatcacaagttaagaaaatatttttctttcacacgtcagcttttgaaggagatcaacaccacgattttgactcttatccctaaaattaagtgtcctaacctagtgagtgattatagacctattgtgtgtgacaatgtgatttacaaggtgacaactaagctaatttgtgcaaggctcaaagctgtacttccatatttaattgctcaaaaccaaggcagatttgtttatggcttattggtcacaacattatgatatgtcaagacctcatccgtcattatgaaaggaaaacaaagaaagcgaagtgtatgtttaagctggatcttcagaaagcttatgacaccattgaatgggatttcattgaagaaatgttacatgcctttcaattccctcaaaagttcattgagcttgttatgatttgtgtgtgaactccaaagttctcattgatgttgaatgcctctttacatgggttctttgaatctaggcgtggattgagacaaggggatcctatgtccccacttctttttgtcttaggcatggagtatctttttcgaaaattggaaagaggcaagactttatttttcatgagaggtgcagagaatcggagctaaaccatttgagttttgcagatgatgtgcttctcttttacaacggagatttcaaaagcatttcctaatccctccaaaactgccttctattgcaataacatgagagataatgatattaaaagagtacttgatgcttcgcgtttccaaaagcatgatcctcccttcaagtacttaggaattccaatctgtccaaagaggatttcagcagctgattgtagtattctaattgaaaaaatggtggttaggataagaacttagagtacgcgtaatctatcttttgcaggtagagtagttctcatcaactcagtattaatggccatccattcttattggtgtcaaatcatgatattatcgaaaaaagttgtgaatgaaatagaatctatctgtcgtggttttttgttgaatggaagtcattttctctcaggttcagtagatgttgcctagagttcagtttgtctccctaaatcggcaggaggcctaggtttcaagagcatcacggattgggatctagcgactatgtttatgtatgtttgggccattgcaaaaaaagaagacaacttatgggtgaaataggtgtataatgtgtacatcaaggaggaaaattggtggtcctatagggccacgccaacagtcagcttgtattggcgcaagctggtagccataaaagataaagcaacaagtagttttgatgtatcccaggtgcagaatgacaggtacaaagtggttgagggatataaggctattcggcctattgctagtaaaattgaatgggattcaattgtttggagcacgttaagcatacccaagcatagcttcattttttggctctctatgcttaatagaatcaaaacaaaagacaggttgcagtatagagaacttgagagttctaaatgttttctctcaacattgaagatgagaccgtggcacacctattttttgagtgttctttgtccttggaatgcttagaaaagatgaaatcatcgctgaattgaagaatggctgccactaccttagaaagaattgtaaggtggataaggagggcaaaaataagcaaggtgaagagatcaatttttgttattgtcattgcagcccttgtctatgaaatatggcgcacaagaaaaacatttttatggcattattctaatagaaatatagagattgtaattgtctaagtgaaaaacatagtgaaaaagagaattacatgtatatggccaaaaaaagcaactaaaagtgagaaagaatggtttgatatcttgtaaagttttataaagatttaaattcttcttatttagagaatgttattaggttgtacaaaaagtttttgagcaatacacatacttggtttatcaaaaaaaaaaattacaaaaaatattctcgccaggtaaaaactataatcatacctaagaatttttagcattagtgtcccttgacttatttactatttggcatgagaatttctatttttacttttacaattaattatttgagttttgaaaacattagcaattaagtttttttagtcaatctttttacaaaatgttaatactttttatggataattttaaaatttttctaaattataaatactagataggagttttcatgaattcacattcaatacttttaaccctatacaattcaatttcaatattcattggatgttgaccttttacaataaacacaatctaattaatttgccttaactgatccaattcaatccattagattttcaaagctttaattatgtagggtgaaaatttcaaaaactaaacctttgatgaaagaaattaattgttaattgttactagggatgaacaatatgcaatcaaattcaattaagctgaattgatcaaatccaatctaattataaaaaaaaaaagaaatatcgaattacaattgaattgtattagatgttaaaagttagattctaattagattagattgattattgggtgttattctcaaaatccaattaaaaaaccgatacaatccaattatatttatataagttaaaaaatatataaatattgttataaatattaataattatgtggat

SEQ ID NO: 163742 - DNA, 1866 bp, Cannabis sativa
tttacctcatgttctctattacagaggtattgccttctgaattgaggatttcctttacttgatcagaaacacagaaacttgtcggacctgaagtgatgacacatacattatttccatcaatgtgtggtttaacagaacaggtatcctgagctccgaacaaatctacaatatcagctgtggaaaatcctgcttgtttaattgataccattgtaccagggaaacctttttctgaatagttctcagtagatctatcaggacaggagcatctaaattgacaatatctacactagacattctattgtcattgatcatatttagtaactctggttcaccaggaaatgcatagatcatagatttaatttatacagctaaataaattagtggaatgaagatacaaattattaggaaagtaaaggcttagaaataaaaacaaaaagaaaaaggggttctatatatcctttatgcaccgttaactaagtcaaaacaactacaataaatgaatgcaccgaccttcatcacagtcaaaacttgagaatcagcagcatcaatcatatcatatgctcaatggggagttctacaagctggtcactgactagacatttctttccaaacttcgctttttcttcctcaaaatcatcatctacacatccaagagttttggtgtctaaactctccggcaaaaaactcttcagtaaacgcaggcaacgttcaacctgcccaaattaggaaacaaaagtcatgtcatgacctacaaaataactagattgccattgccctttagttattgaagaaacaaacatggaagcattggaagagtagacaatgtaaagactcagaaagttaagcctaaggtgctcttgagcgacgagcttcaaatttatggtttagggtggcttcgaatgacagtattgaggggtgggaagagctgtaggtggtgctgtgagcaggggcggaggtattctttgggttagggtggccatggccaacctcaatttctcaacaaatattttatctaccttcatgatattattaatatattaaaaacaaactttaaagcatttcaaaaaaaaaaaaaaaaacaaacaaacaaactttaaagatagtcttagattttttttttttatgattgaaaattgtaatttattaaatagaaaacaggtcattaaaattacatttagttttgtatttattaaatgatatttttacgtgttgcgtccctaaatttttaaaaaccactaagctagccttagtggtgagggaagtataggaaaagggagaggtcatgagtttgaacccaaaaactttaagctacaagctattaattttttgtaaaaatactattacgctacactcaaaaaaaaaattagaatttcttcttttatgaaaaatagtattttataatttctactatttatggttacgcaaaatgatttttttgatctccctacagaaacggaaaaaaacaaaatatgtttatttagaaaaagaaaaataaaatataatatttctaagactttccatgaatatttttggaaggaaaaagagtttgactaattaattactaatgtatattgaaaaatatttataaaatttattataattactaaaagctttctgtgtgtgaatttttttttttttttttctgtgagagattttgtgtgttaaatattaattattatataatataattttttttatgtaattactaattatcttactaaacaatacaataaaaatttatatgtaattattatttattatttttacatataaatacaccatttattttaaaatataatataattattagaccgtttaattatgaaattaatatcatagtaattatacaattatatccaaacatgt

SEQ ID NO: 163743 - DNA, 2244 bp, Cannabis sativa
agaaatatgtaccacaaggttactaagtatcttgatttagagaataattattttgtcctaggtcaggaggacgaaggagagtggtagatattcatcattggaaagttttagcatccggaagttcaataccgagttcattactatgaaggccaacgagcactacactgtagccgcatgctttatgaaagtcgagagtacccttgtagacatttatgtggtacaatgaaaagattaaacatgagaagaatacctaatactcttctcatgaagcgatggagcaaaatcgcgaagacaaatctccacctacattttaaccacccggcacaacaacaacagcacatttatgagatggctaggtttggatccctcacttcaataacttataacttgactttcaatgcatcaaaattagagtattcgtataaccgtgcaaaggaagagattgaacagctatcactaatgttcaaggaagaatttgagttgagttccaatccgataggagagatgccacaacctggaagatattgtaacgaccccaacattattaaagaccccaaagttgtgagaaccaagggtatgggaaatccacgaaggaccaaacagggagaaggtcccaagaaacacaagacattgtcgcatttgtcgctcatcagaccatgattatcgtcggtgcccaaaccgtcaacagaataatggatatcaagggcaacaatctgcaaacaatcaagcaagatctgactcattcaatgaccactccaatgcgtatttctcggatccgcctgcctagtgatttatattactatctatttttttccaattaatgttttaacttttatgacactaaacattgcttcaaaaatcctagttttatttacttcatgttatgcttggggtgttaatggtaattatctcatcttcaacaaatctcaatattattattgatgaacaactaaattattttaggtaaaaaaatcaatcttataaggtgaaaaaaatatttctatgatcatttttaatataaaaataattacaataaaataaataaaccaatgtaaaactgaatatataacaacacataattttaagagttataagaaatttttcttaccaatgtactacgaaacataaatgaacgtactcggtacgtgatattttgtatacatgttttacttaacatcatgtaaaaacaataaatgtacacgatacgtgatataatatactcaactaccatcgcacaaacatgtagaagatatgaaggaatgaaaagacaaaaataactttactccaacaatatggacctactctatgcaatacgtttgtactattaactaccaaaaacaataacttcgttatactttttcgtaccttaactaccccaaacaataatttgattgttcctttttattttttaattagaaaatcaaattgacatctggtaaaccaactcataccaaccggttattaaataaacaaataaattgaaacacattattacataccgtgggacctacttgccgtattgtatttttgagtacaaaatcaactgcctatatatgtatattttaaaagaaagttagtaaaatttttaaaaacaccaaaaaattgtgttttttctatgataatataatgtgccaaatttgtttacttgtacacttgtctaatcatatgaagaaaattactttttacactcttttatctttataaaaaaatcaacattaataaaaaaaaaaactaaaaattacaaaccaattaactaaaccggctatagcaattaaacttttttattttatataagctacattgacgtggacctataacttaactattcaaaatagtactactattaactaaaattgcgtcacataatacactaattttaatgcaaatataaaggcgtaaatcaattcgctttcgtacgtagcagttagaatcagacgcctatatttagatatagatataaacataggggaaatctagtgtattcccctttctttttacctcataaattggagtacacttgatatcagtgtactccattacagctaattatgggtctttatttaaataaataaaaaattttgggtcttttaaatttttttttaatatttcaataaaaacaatccattacatttgtaatactataaagggatattgacggctacactacccgaactttacggtttgtaacatttaaccacaaaaactgaaattttggcggctaaactacctaaactcccattccgt

SEQ ID NO: 163744 - DNA, 1698 bp, Cannabis sativa
  modified_base (721)..(725): a, c, t, g, unknown or other
acatccccaactgtttggcccagaaggcgaaaggtctattaggatttaggattcatccggatacattgaagagactagactgtagatatcatcttacgtggcatcctcaagatgcaggccccaccatgtcaggtcaggtattttgtcccttaagtcagacccagggagagcgcacaccaccaaaaggaaactacattttgtccaacgtcatattctctgacattctcggtaccaacacagcaacgcacgacatgtgacatcatcaatcagtccccacttgtacggatgaccgttatcttgtgaattggacctcatccaattgatctaacattaatatattttactttattagtgggcctagctgacacctctaaaccctatcaggtttgggttcacccatacccgattttaacctataaatagaacattatatctttatgcaaagggttggaaaatatttctgctataaaacttaagattttttcagctagagcaaaaacacttgtataaaaatactttagtgtttttctagctcaataatattgactcgtaaattaagactcattaacgtctcaactacgtaatataatacttttttttaatttattttttttacttatttattttataatcatattgacaaataatatataaaagaaatgaaattgtaaacaatactaaaagcacttctataaattagtttttgttgttgttgttgttnnnnnttttttttttttctatattatgtatatatttatatttaaaggaatagttcatataaaattaaggccacaaaataggtgattgtactggaggttagggccagttaattaaaaaggtccttaataatattataacttctttaataataaatctagatgtggtaatgggtaggctaattaataaaaaaaaattgtcccccaaatagtcgtaaaaggtttccattaaagaaggcttttctgtatgtatatgatatgatctacaaatcaaagagagaaattaaagatcgaaacacatgatcagatcataccaatttttaattttccagcttagcattccctctcattacattgagccgccgactatatgtatatatgccttcaaactattatatatactactttaaattaaatttaattactaatttaatctatatccctttgttgaataattaattaataactacatgcaaattattaactcaagaacattctcaatcgtgttcttatcttacatgaatattgaccagtttgatttttgcttggaacacttccaaatgctcaatttctaagttagggtttgcaatgcctcgttttaaatttttattgggtccttaaattcagacttatgatttttatacatgagtacgcactttaactgtttacaaactaacacggtatttctaatatattttgtctttactcgcatgttcttacaaagaaaacttcccatgaagagaccactcatcccaagattactccaaataaaacacatttaacttttgagttctcaagtaatggactaattaataagatgttgatatatagataatattataagccctctttaaatgtgtagtatcatatctatacaatatcagaatcatgccctttctcaaatgatatggggctgcacaactatatagagaataacaaaataggaaatattaattttttaatatttaattaatgattataa

SEQ ID NO: 163745 - DNA, 2169 bp, Cannabis sativa
tcttttgagtaatgatatatgctttgataaacttatgcacttaaatattatacgcagtttttttaaatctggtttgaaaagtattgtataatattgggatttgggatttgggtgtatattttggttcaacatatccttattgttttattattattgaaatatgtcattttacctatggcaaaataatgatgtatttgtgaggtttgtgagatttatttattattaattatgatgaaatgttgatgagtttgttgcaaaatatccatccttgtttaattattttcttttttttttaataaataatacaattttattaatatcaattagctaaaataacagtttacaatcaaatcgtgacattttccctattagagaaacaattaaaattagaataaaaaaattagctaaataattagccgtctaatttctaaattgtttgacaaaaacattaaaaaaaaaaactaaaaaataaaattctattaaaaagatttcaacaccacagactttaagaatacttatattgagttttatctaatgttcaaaagacacaataataaaaactgttgcatcaggttcatttaacctcttcaatcgcatagaacttgttattcctaactactaacaacaatttgatgctagttatcgaagaataaagaagaaccaacaatgaaacaaaacaaaacaaaacaatatcacacatacaagactaaaacaatcaaaatcatgtcttagagacaaaactaaaacactaaaaattatgtctcatagataaaactaattgtgacagcaaaaattgaatcacaatagtaaatacaaccccgaccaagctgcacttgtacttttaatctattttgacgtttggttacctttctctttcatttgtccctgaaatattaaaaatgcagctgtgaagaagtacttgatttgtctaaaaaaaaaaaaagaaaaaagaagaagtacttgattggaaaatgaaaattgaaaatattgtgatatattatagccaatattaattctggtgatgggcctagtcatcaacctaaagctaatgggccgaatgctctattgttaattctgatgatgggcctagtgatggacagggacgtggaaaatgtcgcatagactacaggaaaattgaaaattgtcattttactattcgtgtttccttcaaagccaattgtatttgctaacttcacttatcaatttaatgaacattttctaaccaaaattaatattattcttgtctaactcaatattaatttgccaacgatcaccgaatcccacggatgattcttataaaagtcagctttcagctcaaactaacagtatgtcagatactcaattttctctgctttttcacattaatattgttattattctacaaagttcaaaccaaccattaatattcctaaccatatcttaaaacacatcatttaactcaaatatccaaagaggtatatttctcaacaatccaaatctcaaagcattcattaacacgttttccccaactaaaagtgatgaacaaaaatcttataccacttctctgtatctagttctttttttttttaggaaaataaaaataaaattaaaatgacagcagcttcttcacaatatggataagaatgaggttgccaaaaggtacggatattaattaaccatataggaccagtcatatagtgtgaactgtgaagtgaatttattttgagtttttatagtttagacttctaaagaagaaaaattgcatgatatggtaaatggggaacggttattgggtcccgcagtagaaatagctgaggagaagcttacctaccctaccatgtgatatctacttacactttacaagggtaattcaatagtagaccaaaataccctaaatctccccaagcttttatagaattattaaaaagaaaaaccccatatatgaaagcatgattagaaaagaaaaaaaggaaaaaaaaaatcagttggagagagctccaacagtgggtcaaataccccaaatgtcccaaagcttttcctttatagaaaaatatacttaataattagaaagacgtcactagtgtaaacaaaggagaaatgctaaaagatatagtgtttagtatttttttttatgtgtgaatattgttattggtctaactaagtatcgagtctcatatagtttaatataat

SEQ ID NO: 163746 - DNA, 1355 bp, Cannabis sativa
ttctttatttttttcaaaacgtgttttaaaattttgaaattttagactaatattcaagattattatttttttaaaattcagaactttatctcaaatatctacataaagttcataaaaatatctatggacaaaaagtttccatcatactgaattacagatcaattaatcacatggggtctcatcctcaaactattgggcctatcttaataattttttgtccaacatatcttatcttcattctttcatttaatgtagcatgttcttcaaaactcaactccaaggttttttttttttttttggtatatgattagtttctcaaattcagcaatgccctttttttaataaaaaaaaaaagaagaaatttttagaagtaaatatagaattttgataaatttacgtcagtcaaaaaataagactgtacctcaacaagaatattatttaaagatgcccgaaattggaaatgaacaagatactctagtaatattataagcaatcatattagcagatcgtttaataaaaataaaaaagtattatttaaagatataagaaatttacgataatcttctataatccaaaacagggctgaccctgaaatttagtgggctgtaaaaaaaaaattgagcccttgttttgagaaaaatgtaatagtttttaaaattagcaaaaaaaaaaaatgtgtttaaagaagacaagcttttttttgaactcttaagctaaatagaccttaagtacagacctaattcgcttatgcccaaaatcgagcttgaccccaaaagaagaaagtaaagcaactttaattacattacggaagcaagtcaaatattattatgcaaatatgtgtgacaatgacaacactattaataagttgtatgataataaaaatagacacacataatttgtagggcatactcaaaatcaaattaatgtgaaatttgagtgttattaaagttcgaaattaggacaggttggttgatgatccaatggaatattcccacaataaaagaaacccttttgaaattgaacaagccaccatattacctaaaaatacaaagttaagaaaataatacacattaactgaatctctttatgtcattttccaattgatatgccaaatagtctattcttctctatgcctacttatcattatcattattattatattttcattacataaatcaacacatgttcacactgcaatgcaacacttggctgccttgataaataaataactgtagaacaaattgctaaaagaaaaatactacatggtcaactttttttggtcaagattgaaggggcaaaatcttataaaaaaaaatagttaaggggacattcctatttattcttttttttttttt

SEQ ID NO: 163747 - DNA, 1631 bp, Cannabis sativa
aaaaaaaaagaaaactctgcccacccccacgccatctctgcccggagttgagccatcaaccattaacccattgtaaaccacgaaccccacgaagcccaagagcagtcgtcgaccacagacctaaaactattagacggcatgaacactatcaaacgccattgacctgcacaaatcagagagagggagagagacacaaacaaaaaaaaagtctcgagatatttagattataaaaaaaaattctcatgagatagaagaatatgcacattcatagtttggaaatccctaccattgcgaatccaagccttcgcataccaccatctccggagaacatgaaatctccacctccacagccacaaactgaagctaaagagggatgttgcgttagatgtgggaatattaagcacgattaagaggtcggagatatttagggtcaaaagttgaaggagtagaatgggatgaagatggaggaaaagattaagaggagaaggaggcattcttaatctgaaaagaaaagtaaggagagagagtgactttttgagagaaaagagaaaaattagggtattttttaggttagatcggtataaggaaagagaaattagggtaacctctctcaaaaggaaattgcatgaccgaagaccgtagggaagagttaacaagcgtctgtgcctactaaccatctcgggggtaggagtaggcctcgtcaagagagctatcaaaacagacaaaagcatttgtcataaacttgaaaaacaaagattgatgtaaatgagcatgaagagaacaatcacttacgaagtttgcgaaacatggttgtgccgatgggggaaagacttaacgtccacaagaagttgttcttgaaggatactttatttggcaagtctacaataattttaggctcgataggatgagtaccgagatagaaaaatccccctgaggcattcttccttgatggaacggccttaactgagtaaagatacgcgatctctattggtgtgggacacccccagttcatgattttgtataagactttcaaacaagtgagaatcctataagagataggagtcgattggaatggggcaactccaatgtggtttatataatctttgaggtagtcgccaagaggaagcatggcccctgcattgatatgctcaaggctccaagaacccatactagtcgaaccactagtactagtctcaccactagtcgtcgagttgctgcttgtaaagcgcgcagggggtaacaactgaactcaccctcccgttccaatctaacttggaatgatagcccaagttcgattccgtaggtcttcaacatctcgcatgtgtagcctgagatagactgcaccttcgattctatcaactcagcctcgaaagtgacattggagtcctgaggagtctttgatgtacgtggcttgggaggtataatttcaaaatccaagtcacatggttcaaacgtaatcgtgacgttgggcaaaaacaaaggcttttccataggaataagggacacgctggatgattctagccaagcagcttctcgcaagaatcgatgtttgcctttgaagatttcttgtaagaaacgcctgtagcgactagtaattgttgggttttgtgccctaaataaaaccctttaca

SEQ ID NO: 163748 - DNA, 1545 bp, Cannabis sativa
cctatgtcgtcggttgttttactcctgcagtgtcacctggaatagcgtcagtagagaattttgctaaaggcgatgctaaaagcccttaaaacctacctctaaagtccacttaaaattcttataatcaatgtctttcttctcgttactaccttctatgcatttctcttattgtgcgaatggctaaggacacgcacacttgatccactacacgcatatgcaccgtccgaccgtgtcaagttgagctagttgagctttgcactttattttttgaaaaaaatttatttattaaattattattttattcaattaattaaaatagtttttaaatgtgtttaattaatgggtaaagagatacgtgttctcctccttattttaaacatcgttcccatgatcccacttattgtttccatgatcaacgtctttcttcccgttattactttctatgcattccttatataatgcatcaaaatcaacaggagaatacatctttctcacataaaaaaataattaaatttatatttacgattatattatataagtattttgaatagtagtttttgagtgtagtgttttgacgattctctatagtgtaaaaaagctccgatacagtggtattttgatcggactgttttatcttggggatgactgataatttatgtttggttgcacattcttgggaagtgtcgcggatgtgttaaaaagagcaaactagtccgtgacttaactcaaaaaatttcattcggtaatattgttcttgctttatctttcagtagcagcttgtataacaattttaagacattcactctgttatgaatattaacgatgattttttctggttatactgctgacatcaataagctttttcattttgagggtttgtattttaaacgttgaagaaagaagatgttgtttttttttattatgaaaaaagttgcatttatgttgactattttgaaaccaattgtgtctgagatttcacctcttgccgagaagaatgatgaagtcaagaagtatgaattgcaggttaaggaaagagactcctgagtagagaatgattttctgtgtaagaattttattttgaatggtttgtctgatgatttgtatgattactataattttgaaaaaaaaaattgccaaggaaatatggaaagcattatggaaaaaaatatgataccgaggaggcaggaacaaagaaatatgctatgagccgctacttgaagtttcaaatgaccgatgatgaatcagttgaagcccagtctcacaagctccagaaaatagctcacgaaattctatctgaaggtatgactattgatgaataatttcaaattgctattatgattgataaattacccaatttgtggaaatatattaaaaatactctcaggaaaaccaaatgaactttcttgctcaagctcataaaattagcagcaaagttcatttataaaacttgacttaacattcatattatatccaaacaaacaacaaggttagaacttttaaattcaagcaaaattcaacataaaaacacctagcttaatcctaaac

SEQ ID NO: 163749 - DNA, 1437 bp, Cannabis sativa
cattgatccacatactcgtatgtttaagtaaaatttcaacatttattcacctcgctcttgacatgtcggaataaccatctcacttatacctcacttaacaaataaagaagactgcgagatgcatcatgactcaacacttaacaatttttctacaaagatgtttaagaaagacatcactcaaagggcaagaacaattgagcgtagtcagcataactgcttctggataaagacaaagagcggttagacaattatttataattattccatatgcacaagtatgaaatgtgggatatgtccacgtttcatgaacaattacgaatgatatccctagagaataaatgtcatcttagaaatttataaatagggacataacccagggaaaaggggacgaccaatctttggaaaaaaatagataatattgttattacttattcttgaaaaaatagtttcattgtattttgtatacaaacttataaatcctgaataagatggactcgtagactatgaaggtttaatttcaaaaccacgtaaaaaccttcttattatttattgctatccatattattaattactatataattgattttgcagtttatttattacaaaaatggctaattatttagttaacaaaaatatgtgttaacagtttggtactttcattgagaacttttgtaataaaactcacaaaaattaccctccttaaaaataaccttggaccgttcactcatggcagacgatactccacgtaacaaaaagaatcatccagaagagacaattcatcttcctgggaaggaaccacaaacttcacagccaactaatacggctgaaactccttattctagaagaaatggtggacattttgacccaactggggaacatatccttgaaagatgaagccaagatgcctatgatccaaccagatatgttccattagtggaattgggaaatagacaaccacggtaatgtctggtagagtcaaatcgaaggaacgcagaattaaagcatgaggcggcaatagcaagggctgcatgaggagaggcccctcaaaattaacctgatgtatctgctagacgaccacgagggagacccaaagctctagaaccaggagacaagggaacaaccaagggaatccctcaaacatccaggaagaacaacatgagaacgtgagagatatcccaatggatgaagagaatcctcaaaatcctagaaacacaaaaaatcaggagactcacttgacgacctagaaacttcccgtggatttaaaaaccaaggaaatgtatagcttgaagtaccagagtcccctcgcatgaataaagatgctaggcaaacacaattgggaaaccatggaattccacagcatgatgtgaggagctcaagaaactggcctgggacaagttaacccccaagacatccacaaaggcctaatcgcaatgatag

SEQ ID NO: 163750 - DNA, 1964 bp, Cannabis sativa
  modified_base (1847)..(1862): a, c, t, g, unknown or other
aaaatcccaaaactacctcaaatcaaatccaaacctttccaaactttccagaacacgtaacttaagtccagtatcatatttcaacaaataaaagcatccacaaagctctgactaaaaaactaccattgttgagctaagtttgagctcgaaactcaaacctagctcaaaccttgccaacaacaaacaatctacccaaaaccagctcaagcaaacataaattaatcgctagacttcaattataacaataaccaaactcaacaaaacctttagcttaaaattacataatcaaacctaacttttttctcttgaaatgaagagaaaaaaaagacaagaaacttacctcaaccttggctaagaaaacccttgaattcctatgctgaaatccctactgcttggtctaaaattggtgaggaaaatcttggttttccttggttccttggtttagccgaacaagaagagagagagtgaagaggttggatgagttttgtttgctattgactattctaccttattcctaattaaacatataccttaactaaaaataattctcacccaaaaaattaactaattgatttctatttaagtccataaggacaaaatccacctcttggaaaaatttccaaaattacccttcttcaagcttaagtcatttctaggctttaacggtccaaaaccataactttggataatcctgacatttttaatgtctagatatactatcgtgttagttccaagatattcaatcataccaagtaactctattggccaaatcatcgcattccactgttaccaggcataaaacatgaaaatcataaaatttcatatacattatatataatgcatctagaattcaaatatatctccataattgagaaaatattttcctaaggcctatttatggcaataagccttaatttctactaagagacatataatcataaaataataagtaaatctttaattatctgctaattatcatgatttaacaatgcgatcattacaattatcccccgttaaaagaattcatgctcgaaatcaaatttgaataactttggacgttagttggattctaatactcaagtggtttcctccaccttaacgtttcttcaaacatcttgaccaatactataattctattttaaggaactttatctttatacaacatggagatatcatgtatgctggcaatgctaatcataaggttagataaaaaattaataatctaattttttcaagaagttctaaaaatcttaggaacctaggttatatcttacccttgtccctaaagtaattcattcctatcactggtaacgtacgtagaatgacatgttttcccttacttgggaatttctttacttctgagcttcatattaacgcatctcttactgtctattttgagaagtaacaccttggccataattttctttaaaatctatcatgttcgctgaactgactttggatatatatattttttgtcttgggtttcaaatatgatacttcatactgttcgtatctcataaggaaccgttcttatcataccttgataactgcttgttgtatgagaacttacttaaaaggcatatacttatttcatgaattcttaaaattcatcatgtaaacttgcaacatatctttcattatccgaattatcccttcagactgaccatctgtctaagagtacgtagaaaattgtactaaacttcaatttcgtacttatggcccttcttaaattctgacaaaacttagaagtaaatttcagtttccaatttgaaataataaactttagagtcacataaggtcatactattattggaatttattttaccaggacctagatttactaacannnnnnnnnnnnnnnncctaaatatgaacttctaaaataatataaaatgaaacacataaaagatatgagaagccttacattggttgcagcggaattaaatgactccttctgctcagat

SEQ ID NO: 163751 - DNA, 1782 bp, Cannabis sativa
  modified_base (1736)..(1737): a, c, t, g, unknown or other
aatcggttgggcgggtcaggtcttactcggtactccatcgggcaggttcttgggttagtttttaatggtcgttggatttcgagttggacccaaactcgcccgccaattcggtgaataatatatataattccaattttttattacatatattaattaaaaaaaaaccctaactattactaatctaacctaccactagcccctttttcttttcttcctcaccagccgcacgcaccaaacccagtcacccacccacccaggccattaccagtacaatccaccaagcctgatcgatgatgaccagaagaacgacattaatgacgtcaataactagaaggtttaaaagaacttagatcgataacgaatcctccacgatcgcacgaccgcatgactcctccacgactgcacaactcctccacaagcgcacgactcctccacaatgtcaaccgcactgctcctcctccgctcattcgcgctcaggttcattcagtttttttttttttttgggttaaatgttaatatatataaaaaaatatatattttatttataatttttattaaaatttttatatatattatataatatatttatattctgtaaaatataaaattaatacatattctatacataattttatattagaatttatatatataaattttattttaattttttgttatttttgttagttttaaattttttttatatgcaattgtaaatttataaataagttattaaattttttagaatttagagttaagtaattaaactttagtttttgtctattgttgttaatttggagatttcataattcataattctaaaataaatatgtgtaacttttttaatttatattatgtttgttaagttgttaatttttttaagttttattaattatgttatattaataatattaattattgattagttgatgtgaaaaagattagatgtatttataatttatttatgtatttatgtgtgataatgaatcagtgaatcagtggtagtctgatatttaagtacttattgctcgacgctcactttctttaagtttcctttgctgcctgactttgtattttaaggttagtgtattaaaacattaaaattgttcataaattattagaggagtataaatatcttaaatatttatccatagagaagtaggttatgtgattaattatattgcagtgaatgtgaaatatgcatgttagaggagtttgaatatcttaaatatttatccgtaaagaagtatgttctgtgattagctatgttgatgggttggataattggattaccatttttatattttaaatatataccgttttgttatttgtttaattttaacaggtttgaaaaaaaaaatagtcgatatagtagaagataatattaatgaatctggatcatcaccatctgccaatgagaatgagaatcaatcaagggaaaagaaaaggatgaagaaatcaacatcaaatagaaaaaaccctcctttgcctcctaaacctagtaaaagaaaatagacacatgtttggaaatacttcgaaaagttacccaaagttgatcctaaagattcaaatgaaactcttaagtgtatgtgcatttattgtggtaatgagtttacttgttctactagcaacaagacaactcacttaaacaaccattatcaaaaatcttgtaagcaaagtctgtttagaaatgatgaaggtaagcagaaggtgctaagtttcgagccgcttaaagnnggagaaaaaagtttagttgcggttgcttacaacaaagaagcatgt

SEQ ID NO: 163752 - DNA, 1157 bp, Cannabis sativa
aagaaatcaaagtttaggatacaaaactaaagaggaaatctagttcctttccacaaagcttcatgatctaagtctaaagcatacttatagctatacgatgagcgacttcattagcccctcaaggaatataggtgacagtagctttagagagaaaagatagtaagctttgaatctccgttgcaaacaatttcaaatggagattatgagaagcattgttacaaatatagtgaacaaggattttatagtcgattcaatagaatctggctgaatggaatggtttctacaccaaggaagagcatgctggagtgtgtgggcttccattatcaaaggtgagtggagaccccaccatggtgttgccatagtcaaaagtacttcgctgtggttgttttgaagccatactgaaacctattttgtaattttgttcatcttgagcagtgtccatagtaagctttagttgatagggacggtgtcgctatctcatggtatgatggctcccgtggtgaagtatgaaacgcaactttacgagggttgttgatattttagtaatgccaagtagtcttcagtccactgaattattttgacgggcacgagaatggagtggtgatgtagatgtttgttcctataatgctatattttccaaaccaagcaagcaaaaaattagaacgggctagttgtgaaggtgctagaagccaagtgaagtaagtccacacaagttagagaggcatgattaggtataaatgtagaaaattttgttaatttgcatacctactggatagttgaacaactgaaaattaaagagcacgtacttgggtctcatactagcggttgtaacgacaacagcttggtgaagacaaagacttccttttgtgcaaattatatggctagttgtaagaatatcattgtaagattgccaaagaaagtgttagattttaggagaagttgttgagtccacatcatcttccactatttttgggttgctatcatgttcaagggtgtcgggtcaagtttgtggattaagttgtgtgctttgtgatacccgagttaatagtgtaagctctgtgtggggtaagggactagtaatgggtgtcagatgtagggaaggtggttagcgggatggtgataatgttgggttttgtgccctaaataaaacccattac

SEQ ID NO: 163753 - DNA, 881 bp, Cannabis sativa
tgtgagctgttgggccaaagtgttgtggaataaattaagaaataaaaaaataaaaaaatggaaacatatgcccactcggccaagaaataaattttaacttactaaaatttgttaaataatactaaaacaattttaagtagattgaagattcaaaatttacacgaatcacttaaaattgtttttttatatatatttttattatttttttttcttttttatgaaaattgtcttttttttttcagatttttcatctctttttctttttctttttaaaaacaattattttcacattattttttctgttgcctaaagataacatgatttttaaaaacaacatatgttgaaacaggagatgcattggtgtattctttttttgagtgcattaatcactcattattagagcactcacatcagttactctactctatcgtttaaaatacctcacaaaaactttattttctttattttagttcacacatttatatattactatacaacaatttttctatattttttctctacatcatttaaataatatatgatatataatatattatacataaatatttgtagtgaaaaatttagataaatattaaaataagtttacctcactgctattcattactctatatgtactaaatgtatagctcaaaataaaatggggcaaaatagagaaagtttttaataaattctctaaattttgagctaaaactctattttaccaaatctattgagaggctctattttcaaagtacttttatatagtgtcgtgatgatacaattaattgggccaaaaccacccattaacacttaacaataagaggaaattacactctatattctttttatatagttctcttttatttttaccctctttttta

SEQ ID NO: 163754 - DNA, 1044 bp, Cannabis sativa
aaaaaaaaaaaaaaggaaaaacatacccactatctccaaggacgatgaccttaagcagagtcctctttttcctagaaatttccattggaaaaaaaaaaaagacagagaaagagaaagaggtgaaataataaacaaagaaaaaagaaaaagaaaatagattcttcacttctaaactccagatactatttgaaagctttttttttttttcttaatttagtttataaatattgggaaagtttttcaaccaaaaagtaagatcataattaatgataaaggcataaagggtaggccattttcaatttagttgcttgatccttcttcttcttcccactttattgttttgattacttataaatatatgtataatatttgtttgttcaaatgatgaagtgaggaatcatgtgaataaatctgccaaccagaccagagccaactttacccgccagcttattttaaaaatgggagtcaattcttaatattactatataaataaatatatatatatatatatatgtgtgtttgcattcatggatttgatttgattaaagaaagaaaaagagaaaaggaaagtagaggcttcatatgacagtcgtgcttccctttatcattaaccttattataattgagaggttggtttgttttgacagttcattcaattcatttcacatctacttctcagcctttcccattattattatttgatatttattctcaatttgattactattttatgaggaaaatttgaaaaattatacattaaaaactttaatattttatccttaaaccaatacatttcaaaataaaaaatatatgacacttttatcaaaaacctaagaataaccctcacataacaacaccccaactctctctcttccttcatctctctagcttctctctcaaccgaaccctcaccattctctctacccactttgcacaaaccgaaccccccaccgcccaccatgagtcgagccccactttcgactgagaccagtccgacggagacccacacccgcgtacgacccaggccatcaccccctcaccacc

SEQ ID NO: 163755 - DNA, 1027 bp, Cannabis sativa
ccctgccgctaataactttttttttttatttttattacgcccactaatattagctagtggcagactatactctctgttgctaatgtccctccattatttgtggaatattgagcgttgctaatacttccgcgactattgattaaatttattgtagtgtcggtcaaagaaatcctaattgagagaggaaacaaaaagcaaaagaatgtgctaaaaacctcgggcgagagaaagtcggggtacatgttaagtgatcatgtggtttgttcgtaaatttgcttattcaaaattaattttatctagtgtattaattaaaattaattggatatatgcatcttatgaatagtcatttatatttcaatttcgttgtttcaattaactaatttatataacaaagtcttcgttaagaaaaaaaaagccttccaaataatcaaagtcgatcaccatacgaattttaaattatcaaccactgactttgcaaaaataaaattatcaaccacactgaaattaatgtaaattgaaacgtacgggataaggaatgagaaatgtgtgccaatactttttttaatgtattttaatatcgagcattattattaagtaccagtagtgtctaatagcatctagacgtatcgtcttctgattggttagatactctttaaaagttcttatattaatttatatgagattcgatatctaattggaccaatagctatattgacatgtatgagagtgttaaggtactacttaacatttttctttattatcgagcctcatacattttaatttaataaataatatgagaaaccattaaccaattataagtcgttatattagtgtggtgttaggcaccttaagatgttaaatatcaattctcataagcataagtagctcacgagctggacgtccttctattatattaatggtcccgattaagggattttttctataataaactgaaaatggaaaaaatttacatttatgacctacatagagaaaataaacaaaaatagaaactaaaagttgttattta

SEQ ID NO: 163756 - DNA, 1316 bp, Cannabis sativa
tgactgtgctgggccgtcggctaatcaccgggctggtggagcaaggctcgagatgttaggctcgaggcgcgagatgattaagaccggtcggggcttcctggaatgggtacggtgcagcagagaaaaaaatggactcccaagaaagtgactgggaagggagtacgaggttttaatgattttggaaaaaaggttgatatgaatttgaaaataggagaaaggtctcctgataacttacctaggatagagcctttgactctggagaagatggtgagtaatccgttgggtaattcatcttctaataaggaggttgtccccttgaaaagtgtgccaccttttgctgagaaggatttgtcttttgttcaggggtatgggccttataaaagaatgggaaaaaaggtatctaggaaagtggataaaaactcttttagtgggccttttttggtgggacgagattgtgttgctcctcggtttgggagttctcttgggtcgaagggtactgtggcttctagtgggtcggcggcccgtgggttaactggtttgtgtcatgagaaaattttaaataatggtatggagagtccttttgatgaagagggccctactatgccttcttctatgcaacccgtgggtgataaaactccaaaagcccattttttacttggccagggaggaaatgaacggacttgctctcaaaatgggctagaccaaaaggaagttgatggccatgaattgatcctagtgggtagtggactaggaaatggtttgactaatgaggactcccatcttaatagtgccaaggagagtttggccgtaccctcatatgaggaaggaaaagctttggaaaaattttttaaagctcaagaggagttactttatgattgaaacattttgggaagctagacttgtatgagattaagagcttggggggtgacataggggtgttgactacttcggaaacaaatgaaaggactactcctttcaagaaaagaaaatttgaaggctctgcttccttatgcactagacctcacaagactatcagaactcatcctgatgtggttcgagattttccctgggatagtgaagaaaaggaccgagaatcaaaggtgatttatgatgatccatctgaagaagcgtctgactctgtgagctgcaatgaaggaattatgaagaacccgctgaatggttcctttgtcgttgaagactctggctctagcttatcggtgtgcccgcaaaaccttgtggaggagaatgtcatatctcctccacaggagccatgagagggattgcttggaactgtagggggttagggcagacctcta

SEQ ID NO: 163757 - DNA, 1543 bp, Cannabis sativa
  modified_base (1484)..(1494): a, c, t, g, unknown or other
cagaaataattctcctcttcactctaacatcctgccagattagtgaaggaagatttttctttctggcacatatctctttgacactttcaaaaccatactatgaaataatgtctgtgttcaataggttgcaacttggggaagcgaaatcgacaatcgtgactttgtagctagctaattgttcattggcttatctaagggggagtaattgaagatgtccttgtcaagtagataagtttatttttttagctgatttttatagttcttgacatggaagaggatagaaatattcccattatccttgggagactcttcttggcaaacagccaagctttgatagatgctcaagcctcatcatgaccaaattagggggaacttggatcacttggaagaaggctttcaaacgcctgaacccactggcattgcatctcaaagtatttatgtaaaaggtggccaagaagatcgggtgataaattgaaagttgttttaaaagtaacccttgttgcgtggtgtgtatggagtggtagcattagcatgttagctatgaggtcagacatttaatctattactagttgtatggatttcctagactactggattttttactagacatttaatgcttcctgtgaaagtggagtaggaagatagcaactggaaatgagagaaaaacataatagagttaatttctatgcctcctacagtggctagtagtagcccttttgaatcgaaagtcaagcggtttggtttggtatatcgttggaattggacaattaatactgtgccttcaattgtgcagggctaagttttacttggcggtttccaatttataagttttacattactcctcatttggattttcatatttaatttgtgattatctctgttatgtcacttacatatccaatgaatacgaatcgtatttttataacactggggatttattaatttctcctaatcacagaaatttctagtgcagctattttagtttgaaatgcaatatttcttttgactacattgaaaaatctcggaaaattttgaatgatgaaattgaccgttaaaactaatgctacacatcatcatatcatgcggagcggagcggatcactaaagtagagtttgagtgttctctttttattttaaaaacacacacacacatagggttttagagggctttgagtgaaaataatgaccgtgttgaattaattttattattttggatgttaatgtttacgattggattggcggtgttacttataatactattttgcgatctgcgaatagtattgtccacacattaattatttctattaataatacaagagaatatatttagactaataataataaataacattgtccacttctgcaggtcgataccagaatcatcagatttacgtaggaaaaaatataaaggagtgttactattaattttttttttacaacctcttagttaatttttacgcccgaaaatatatgtcggaatatttnnnnnnnnnnnttttttcacgggggtgttcgttatacttgcaacatcattcctgtaaatt

SEQ ID NO: 163758 - DNA, 1464 bp, Cannabis sativa
agcaatcaatatcaatatgtaaatccaagtttcttgacagataaaattgtaaatcacattcaatttgtttaatgttacaaaattttgtaagatttaaagttttatgttaaacttttagtaatgaaaagttaaaagatgagaatgaagaatttaaaaaataggaatcattaaataaaggcaatcaaatcgaattttcgggttatggaattgattaattacaatcttaaacataagcaaaggaaacaatttagagaaccacatcctataaaattttgcagtttctttctacattttaatccaatttgggcagtggatggattgacccaaaaaccaactagtttggtagaattcagtgaaacatccatacatagcaaaaacactagaaataagtttttaataaacaagaggaaataatgatatttgatggtatacaactatagtttttggtatcagactaattctctttttgtggatgggatggttgatgtagaggaatactatcactccagaagcttagcaaaacaaccaaactaatttgacattgagttggagcaacacaaggtcactgctgccagaaatagtaacacttcaaaaacatttgccgggttagcagaaaagtagatggactccggcatcagcaagattccttctataatgaaattcacatgtgcatagctttggtacgtctagatttactttctttcatcctggggaaagtatctttgagcatcaaaaggctgattacgatttgaattatgagagtcggatgtagcttctccgtgcatcggtgcaaatgctgcaacacaaatttttgaaccagattaggatccatatgcagtggaattttcaatctctattgttttgactttcatttacttcctgatgaaatgtgctaagttctgaatttttagcatatgaagcatgctacatctctacccaaaacattatataccaatcttcagtttgaacaggctagttattaagtagttaggtactaataaaagcaagaccaagctggctaagggatattgttatattagacaatatatcgaagaactcctcccacaaaggtcagcaggagagtcagaaatatattcaactaacctttgtctctcattcttctctccctgtcatactcaaatttatcccttactaggttgaccttttcccaggtatcatcttgcttgtttacaacaaaactccgttccttcaataaaataaaaatatttgagcattagaataaaatcatcatatattctagcacaaaaacaatctaagccattcaaagcaaatgtggcatgatccaatctattttttacaccgtcatttcaaggtaataaatcaataaaaaatcacagtgcaagatacatgaataacatcatccaatccaatgaactagagaacaatcgcaaccctttgtcccagccattgtagcacgtgtgtcgcccagggcataaggggcat

SEQ ID NO: 163759 - DNA, 1310 bp, Cannabis sativa
  modified_base (1268)..(1268): a, c, t, g, unknown or other
attttatgaaaatttataaataatacgaccataaaaaataattaaaaaacattgtatttcaatgaaaaactaaataaatttatatctatttttgttattacatgataaatcaggtgtagattgtttttacaatacatctcaaaattttattgaaatatattacatattagctatttcaaaaataaaaaagaaataataatagcaaattaatggaatatgaataatttgagtgatttagcaataaagaaataagtgagtattatttattatatgacgtatttatgtacatgaatataacttttaaataaaaaaaaatatatttttataggataatgtagctaacagagtagcaagaaacggaattagttatgaattaattgattgagaatataaaaacatgtgacatttatttattggaagaacaggtttaagataggataattgggacaagtgatttttttttctttcgagaaattaatagtactatttattaggaccattaataaggtatgtaagtatatgtatgggaagaagtcatgggcatgagagagtggcttcccatgaaaattgcatatataatctctcctaaatctatatctatgagcacatatatattattgttggggcctacatatccactgacccagccacttggtgctcaacaatatatatttattatatatatatatatatatatatatattattacgattatattgtattagcgccaattcgtgttatcatgacatattcgtgttatgtaagttaatatgtgtaattagttaattctaatttcgtgttatgatcatctcaatcttaccaaattcgatttattcgcgtaacaatatatatatattttgaaactattgtccactatatatttatctttgcaatatatgttgttgatcaatataattagtatttgtatatttaattttatttaattttttttatatatatataattatattaatttatttgactcatttaaataatatatatgaacataaataatattgattaattaaataatttattacaaaatatcagtataataaacaaaattatttatcttatacaatttttttaatttatatatatatttaaaaataaataataatttaactataaattaataatttaaataatatatatttaatataaacatatcaatttgtatgcttttcgttttatatgagttaaccataatccaggaccggccagagggtggggcagccggggcatacgccccaggccccataattttngaggccccgaaaaaatttaaataatatatatacatatataaa

SEQ ID NO: 163760 - DNA, 2301 bp, Cannabis sativa
ctatccctacacttctcttccaactattttctattgtgttggctctattcaatggtttagtgacactgaatgagactctcacaatagggaataaatcaacaatgaccaccttcttgatcttgatcttaatgatgaaactttacttgcttgccatatggatcatgagccaaaaaaatatttttcctttaataatatacatattttgtagtagttttcaaatatactacatattttttaaataaaaggctcaataacttctattttcttaaggcccacacaatctcaggatcagccttgtcaagtagtatgaaaaaccgagctaaaagtgggcgacgacaggggcggttttgtaagttatggcttgatgaatgacacaacagaagcaactttgttttgcttgacgtgaataggacagctatgtgggagagtttcaaacatcctactgaatttaggcctagtcctgggcaaaggcgggttaggtctgtgcctaagacccacctaatttaggggcccaagtttttttttgttttttaaaattacacattttttttattgattttaaatttatataaggatctaaaaatatatttttttcatatgactcattaaattttagaatcgggccctggctcaatttcatatctttgtctatccaatatcataaaacttccattacctactttaaaataggctctaagttatgtattgcaaaatcagatgatgatgttgtctcatcttctaagtatttatctttaagtccaacttagaaatgcctgtccacttggcattttttctcaatctaaatagcaactacaatggctgtaaaccagattttcaacaactatgtgatcatgatggaaataagatgatgatgatgagtatggaagatctactgaaaactgattggcatcaatctgattaggcctgactttgggtataggcaggttgcttagagcccacctagctcatgagcccaatttcttccctttttaaaattatatattttttttattttaataatgctatatatttttttaacataagagtttaaaaatatattttttttcaatgatctactaaattttaaaaatacccctgaatttgattataaacttgagcgttgtgacaatgaagaatgcaaaataattaatttcttgtttgattgcaattgttttgtagacatttttaactttgacaataatcaatgctgaaagaatggactcccactatccattgggagagagagcaagaaactcaaacattgagtggattcatataattaaaacacataaggttattatgtgagagctttatttctactcttgggtggttcttgttggaaaaatgtgaataaaattcactttacattttctccccacattgaatagaaatagaatgtttctatatcaaaggctatataaaaaaaatattaagaactaatattatgattgaaagataaatttattaatttaattggagtgataaaatatgtgggtaacttattcatcaatttttatcacgatttgtatgtggaaagcgtttttgaaaggttttggtattataatgtttataattaactaagaaaaattcaatcatcaccacaattattgtacattcattacgattaatttttttgtaataataatatataatttatgcattatggtctatatgatatataggcagatttagaatttaattcgaaaataaaaatgtattacccattgattttttttaattaaaataacatataatttatgtataatttactatattatatatagactaattaaaatttttgctccttgaactcagtggcggacttaggattcaaagtgagggggcgtaattttttttttgtaagttgggggggcaaaaaagtaaacttaaaaagaaaaaaaaatgcatttaatgggattagaacctttatcctctaacatatatgcatagtagcttaatcattacaccaaagttaatattatgcttataaattgcatatatatttttttcccgattttttttttcagggggcgactgcctcacctcggttgtatgtgggtccgctcctgctagaactttgacatttaccaaatcatgtcccctgaatttttaaggtcgttaaaaatgccccatgaactgtgattattggatttaaggactttttttcaattttaataaaaaagtctaacatgggtgaaagttcagggagcataatctagtacatgtcaaagttcgaggagcatgatttggtagatatcaaagtctagggagcatgatttagtacataaacaatcgctgaaa

SEQ ID NO: 163761 - DNA, 1348 bp, Cannabis sativa
  modified_base (478)..(511): a, c, t, g, unknown or other
cacacacacacacacacacactcgctctcattcttcctatctcttgctctctcttaccgtatcacacctcctccctcctcgttgcatttttagtttagggtttttttcccacaagatctcaaccatcatcaaccatgataatatctcatttttttcactttctctctctctctcatgacttttgtaattatatttgcattttcattattatttattcaatccctacaaaaaatcttatttttagtcacaacgaaatttatggctaaaaagtaaaatagttgtgactaattacaaatcaccattcctatgatgtgactaaaaagtctgcggctaaaggtattagtcacaaaaatcacaaatggttgtgactaaatgtatttttagtcacaatatataattgtgactaaaactaaattagtgacaacttgtgtctaaagactatatttttgtcacaagtaattttttgttgtgactaaannnnnnnnnnnnnnnnnnnnnnnnnnnnnnnnnnctaaaaaattatcactaaaagtaaatgttttttgtagtgaattttgattttgatttcaccacgcaacctctaaagaaaaccaaaaaggcctctgtactctcgaataagaaacctgtaactttcagtatattctatttttgcttttattttttttcctttttgtatttaaacatttagttagctcttaatttagggcgtggtgtgatttgcaaatctaaagagttcggtattagaggtgcttttccaccgatgaaggatttgcacatatttgtcaaatgacttaaagttgttcaacttcagaggaagaagagaatccttaagcagcagttgaaggttccaccttagttcaactaattcaccaagactttggataaaaacttttgtataaaattataatcgacggcaattttaaaccatagtctctaatatagctgacaattttacaccatgcatggcttatagtttatactataggtgacagttttagtccatcggcaaaaaattttactgatgattttttttcgtcgcctatactactagttttgcacggttgaatagacgactattttagataccaatgacaatacattaattgactatttcaaattgtaggaaaaacctaattttttaattgtggtgatgtcaatttatgtgttaaagaagcttcagactaaaaagtggttgtagtgatcttctcgttgtaaattttttagtatactctgtttgttcttcgaatgactacagagaacactacaagaaatctcacttttgccatcatatttttgtactggcaaaagttagtaatgcgatggtaaaatagaatttacttgtgatgtg

SEQ ID NO: 163762 - DNA, 1183 bp, Cannabis sativa
tattattatttgttatttttttgttctttatttgtaaactttctgagttgattattaaccagacttttattatcttatctctagtagagccagttcctcaaagccctaaaattgagcaactgaagaagaaagtagctcagtacaagcccttctatatcgaggagctaaaagttgaaggcttggtcaccaccaaattgttccacgaacatggattgatagttggctttcaaagtattgacaaagtgagaggtaggggccaaagccaagcttccaaagaagctaaagaacaaatagccctcgagatttccaagataataagtgaagttgtcaaggaagataagctcttggaagctgactgggcactccgccaccccaaccctctgtcagaaaaggaggaaatcatggagaggtttgctacagcatgcccagatgaaggtgtccctggagccaacacgtctagaagaggtaacaggcccttccatgtgttttgcacctctagtctctatcgcatgtctcagaaagaccaaggggggtttgatagttactttttaggtctagacactctaaagtatcccatgaaatcatacatcaatagggtagatgagatcgttaggaattcaaataacctaggaatgtctccagatgcaattagagtggacctactctcgaccatgtccttcctagacttcaaagagtacaaaagttttattggacgggaggacataaccttctttgctcagggagaaccatatgattgctcactgaatggttgtacccaccataacaccttcagcttatgctgtcacatgctaatatttgtttaatttgatattagaaggctattttctaattgtgttgttgattgtcgtgttgcaaaaactccagaataaatataatgagttcagtgatggataggattcccaagacagtggctaagacggagggagacaaagggaaagggaatgccaaagtcaaggccaacaagtcccgcaagcccaggcttcctagttccacttcttttttagggacccacaaagcacctcctccggcaaaggctccaggtctccagcctcctactggggtagagaaaaccaaggttacaataggggaggcttcctaagacctagtagcccatggtaggaaaatggtgcaagtgggcccatcccaacagacagcttcgaga

SEQ ID NO: 163763 - DNA, 1265 bp, Cannabis sativa
cattggccatggccttgacgatatcctacttactggtgttgctccacctgagaaattggttaccggtgctgataacctacaattctttacatggagaagaaaggatcaacttctcctcagttggctttgttcatctatgtctgagaccattcttggatccatagcccagcataactcctcctactttgtctagaaggccctcgaacagagatatgctagccaatcaaaagctcatgttcttcaaatcaaatcctaattatccaccatcaccaaaggcaatctttctatttctgataattatgataaagtaaaattgcaagctgattctttgtctattacaggtcatcctttggatgaaagtgatcttgttatgcacttgtttaatggcctatgacgcgaatttgatccagtcgtggtccatgtcaccagtctagttgacaatctttcttttgaatccatttaatcctagcttctcactcaaaatagccgccttgaatgccattacaacattggggatctctcaacaaaaatggctactaatctctctgtatctaatcaacgatcttacaacaatagtgttctaagatcgaatggtttctttgggcgcagttcgaacaattctactaactaaagaccaccaaataggccataaggctgatcttgatccaataatcccagacccttgtgtcaagtatgtcacaaactgggtcatacagtagctgtctaccattatcgttttgataaagattttgttacaccaagaatgggtgaagccaaagcatttcttactaagattgaagaaagtggcactccacaggctcactcctccactacaatccctaattttggtgttgatcatgactggtatgctgatactggtgccatgaatcatattgctcaaggaatggaaaattttgaaactaaaattccctactcaggttttgaaacattagctattggcaatggtaagaaactctctattactcacctcagtgattcattcttacctacttctagttcttctcattctttagaacttaattcaatcttgaaaatccttaatataacaaaaaatcttgttagtgtctccaagcttacaaagataacaaagtctttcttgaatttcactcttcttgttgttgtgttaaggataaaatcacagggaaagtcttgcttaaaggaagggagaaagatggcttgtacatgctctctctgttggaacttattttaccaggatcttagctctactcacaagtatgttgttt

SEQ ID NO: 163764 - DNA, 1048 bp, Cannabis sativa
ccatggaagaaccaaagaagaaaataacgcagatgacattttattggggcaaagacatgactcttctagtcgactcatggaagattcagtccaccatcgcttaccttctcactttactcgcctgcttcctcttctccgctctctatcagtacctcgaagatcggcgcatcagattcaaatctccaacgatccacgctcgatttgcgacttccctcctatttggtgtgaattcggccatgggttaccttataatgctgtcggttatgtccttcaacggcgccgtttttgttgccatcgtttttgggctctccactggttattttttatttagtgctgcaaatgaatatgtagtagttgttgataatccctgcgcttctgcttgaatatttaattcttcaaaatttaactttttttttttttcttcttctttagattattatcaagtggtgatattctaattatttaatttatttaaggctgcgaaaagggacaaaaagagtttgaggcattggcctttaaaaagcataattatatatagggaaaacctttgttccaatccaaacagaaaagttataagtttcaactttgagaaatggaaatagggaaggaaatatagatagatacaatatccaaggtgtggttgagactgaattgggtagtgatcaaattcaaaatattcttccttcattattagtgaaatgcgtacacaaagtttaaaaaggaacaaaaattattaaagtaatttttgaaaccatttcaggactagtttgttggagtttattataaagattagatgcttctttttaggagtgaacaatatgaaatcttccaatatatttcacctacgtactttaataatgacaactttattatttataatattaaactttttcttcaaaagaaaggttaattaacctaattaaacgatgaaataataactgcaattaaatataaaaggctaattagtaatttttccttcacatgtagtaaatcgtgcttctgaatttttttagccgttaaaaatttcccttgaactattgagattgtt

SEQ ID NO: 163765 - DNA, 713 bp, Cannabis sativa
tctgatctttattaataagtaaactgattgtactgaaatgagttttatttagggcataaaacccaacaattataaccatatggaataagcttccaagttcttaaaacctaattaccctaaatctataaaatccatttccccctaaatttgaaatagaacaaaatcaaagcaattaaaattatagagttatctttttcaataagaatctttcaataaggcttcgatgcccagtatcaagagagaagaagaaaatatgttccaagtaaagtcttggataatcaacaacgacagaaaaacaaaaaaaaaaacctaaatctgaaagattagggattttaataaaaaaaattaagacttaagaagaagaaaatatcacattattaccatctgaaataagttttcatgttcataaaacttaattaccccaaatctatacaatctattttccccattttttaaacgggacaacatcaatgtaattaagattatacagctaccttttttaagaagaatcttctaataaaagcttggatacacagcatcaagagaaaagaaaaaaataggttccactcaaaatcttcaatacccagcagcaagagaaaaaaagaaaggcttattagtaatttttctccccgaattttgacatgtactaaatcgtgcctcctgaacttttttggctgtcagaaattccccccgaactattgagattgttatat

SEQ ID NO: 163766 - DNA, 1645 bp, Cannabis sativa
cttgacaagcacgctacgaatgtaggaatataaaaaacactaattaattcctaatataactttgatttttaaattatatatttctttaaaagataaattatttttaaatgtatttgtcaatttaatatattatcatttatgtttttctaaacaaaaatatttttttagtaaatgaaatttcattgaaaaacaaaagtaccataagaaacgcctcgaagctacaatcaaaaaactaatgtaggatgcatgaagataggccaagccaccaaactctagctgaagagttagctaacttaataagggaatgagcaagagtattcgctaatctattacaatgcgcaatcgaaagattagttgaactcttgagcaagtgtgttatgtcttccaacacaagaccaaatccgaaaaactccatcgccttgttcttaacagcatcagaatgacaaaaagataccataactgcatgcaaaggagaagaccctatcgagcagctaaggcttctgtcgcatgaggttgaggtgtcaaattaaaggggaccactaaaaaggccaacactatgctcgaagtgtctcaaatgactaccccaacacacttcttaaaataggttaaattaatgcatggatcaacattaacgttaagcacaccaattggaggtggctactatttcgaagagataagtggagaaataagattcatgcattgcacttataagagtcaagatatcccaaagtactactaaccacataaattatctaacaaaaaataaaccataaaaaacaatattatttcttctattccaaatttaccaaccgagagtaacaaacttttccatttcttattttgacgaaacatcaacaatgtcaataagaaactcataaaaggacattgatggatggtacttcataccattaagttttgggcaaccctataagtcataaattgtcgtcttttcattggactcacacgtcgaacaagtcttgtgaagtttcaaactatgatcagcaaggttataaatcgttggaatctagatcaaagaaaccttccaaaaaaaagggcttgatttttgggggtaagctgcaagaccataaaaatttacaccattcagaaggacctggagaggaagaggcttgtcgaagtcctttgttgcgcaccacaacccaataatcatttctaactaaatacctcccggtcttatccaaacaccaaatcaattgatcataaattctgtacaagccactcgagatagagtggatagatattacctcatctggactgaaacattacatccctcatcaaaagttttaaggcatattatgtaataccctactagttcaggcgtgttgacgtgatttttaacttaattgtgcagctcgttgcttatcaacgagtttattaaaaatcgtgagtaattaaaactttaataaactaattacaaataccaaaataacatacttagattaaactgggatcccgtttacaaaaatatttacaaaagttttattatgcatattacaaaagtttatcgcccagtgactatacaaaatgagcccagctgccccaaaggctgtacgctccaggcctaatcgctccgatatgcacaatctccatctcctcgctctcacagctgctcaaccttagccttgcc

SEQ ID NO: 163767 - DNA, 3304 bp, Cannabis sativa
tgctctcttgccaatgctttcgttctggctgaaaatcgtcatatctagcatttcaacaatatgttgttgaatctctcttatgtttggcgtttgagaaatagtagcaacaaccaccttactgaacaactcctcttccttagctcgtatagcgatttctttggcaagcatagttttgccaattccacccattccatgcaaacctatcttcttcctattaccatctctaaccgctgccattatgtcctccagaatgaccctccttgaattaaaactctcgtacccttttgttgttgttgttactgttgctgcagttgttgtagacggagtgtgtaggtgagggggatatgcaatggtatcgaatttgcattcctctttgagctcgtgtacctggatcgacatcttcgttgctttcctacttaaacggtgtcgcatcagcaaatgaggaggggatccacaagagcacacgaccgttgcgtggtctggatggttgagaaatgtgttagcctcttgagagatttgaccaaaggtggtcagccatgtggtaacatcagcttcgattacttgacagttattttgggcatcctgaacacgatgttgcaatctgttttgggcatcattcaaatgttggagttgagtattgaggttctctacatttcttgtgtagtaaaacagatagcccaactggtgtcccacaggtgcaactatatactcagctattttggctccaattgaaataacaaattccatggtaagcagacacaattgccttctttctttcttcctttctgttattactcaactaattccacataacaacgacacacaacacaacaactaagtattaatattattcaaataatataatatgatattaaaaagaaaatgatcataaaaacagggcaaaaggcacttacctgataatgatagagaaacaagttatgccttatatatatatatatatgtgtgtgtgagtgagacagactgagagagaagtaaaagctgaaatgcaaatgattgaaagggaaacaatttaggagataatccaggattaataaaaataacactaacaaattaattcaataaataagagcatatatgtaaacagatctagagtagaaataaatgaacaagagataattaaagtaggtacctttggctttggtaattatagattagagattgctgaaacaaacactactacctgctccaattccaaatccaaaactaggaattccttttttttttttttttttgaaaatgattgaactgcaagcaagaattgagaaaatttgcaaattattaaaagtatactcttctaaaaaaaaataaaaagcatatatgtaaatagatctagagtagaattagagagagaagagaacataaataaatgaataagagacaattaaagtacgtaccttttataattatagagattagagattgttgaaacaaacactactactgcattaaactagactagaattttttttttctttttttaattttatgaaagaaagtagaacaagtacttttttttttgagattttcttttttgttttaatagaaagaagaatgggtgaaactgaactcaagtgcagaacagagtgaatgtttgagaatttcttctttgttttaagagaaagaaaatggaattgaaaaagaaagaagaatgggtgaaacagaagagaatgaatgtttgatgaatgtaagcagagaggtttttcatgattttgtttaatagaaactctactcactactcttctctaattgttcattaattaattaattaattaattaattaaaaagtacatttaaactaatctgtctgcaacaaacaattcaaattaaatatacattgtttaattctatccaagacacaaaacaaaacaatgtataaaatacagaatagtgtgaaaataaaaaactaacctatgatgggtcaacaaattaaagtgactcttgtttcttaattataaaaataaaaaatacgcgtgatgaataagtgaataaattaataccaaagttctattatggtgattaattaaagtgagtctgccactaataatgttgatgatgaacagaatagacaatgttttagtagcaagacaataaatttcattttgaattagacagacagacagatagacaaccctttgaaaaattctacttgccaatattattcattttccaatttattcacaatgaccacaactgaaccattacaaaagaagcataaatatttacttaggaaaatgagaatgtattgttagactatttttagcatagattctgggtcaattttacagttttttttctctattgatgttattttttggaatagttttacgtttgatttcctttgtttcagattcccaaggcattagagttcaaattctatcaattgttgaaaagacggagcaaactgaagaaaaatctgctgaagctgacaaaaatgcttcagtagtcgcgaccaccacgatctatggtcgcgactataaggcataggcggaaagcagcatttttagtttttgcctatagtcgcgactagactttatgtagtcgcgactatgggctaaacacgagaattttggacagttttaaaatttttccattcagaagtagcaactctaatttctttttaagggctcatgttttagaaaaaaaatagtcagaaattgtacccaaaagtggaaggagacagaggaatcacttgtggcgacccaagcataatcaccaactagttctttcttaaactcttgatttctatgttaatttctattttaaatttgattatggatattattatggattttatgaactaaactcctatttggggagatgatgaatgttgattgacattatttcctaaattaatgacaattactatttctcattttttgattgtgaatttatccatatttgtgtttaattatatgtttgagattgatcaccttttgcatgctctatgatcacaattcaaaatctgaaaagtgaattttgggaatgctaaaattggataaaataggtttaaatgtgaaacgaaagtatttgcataaccttagtgacattgaacctctcaatccgaacctctctccctccccgaagtccaattcaagccgcaaagtcaagagatgcgcattcaacaacacagtacagactctctacacaatgttcaagcaaatttggccaatgcaaatctcaacagcacaagaggttctattaggttatttttagtattaactttagattaagtttagtatatttttaatttagttttaatcatgtttggagcatttttacgctt

SEQ ID NO: 163768 - DNA, 1092 bp, Cannabis sativa
cacatatagcttatacaaattatttttagtaacataactttaaaaattatgctctttcaaacgcaagtaattaagacaaacgatacctgtgatcagtacaaatatgttcgggtgaattataaaccaaacttttttttctttttgggtggaacaaccaaatttatttaatttatagaatattaggtcatgctattaaaagctgatgtaataaatcatctttcatctggattggctatattgcttaatgagtttaataattctatagctttttcttgtaaagtgtagagcctaatgagtccaaatacaatagttatctataatatgtattacataagattgttgatgggatctttgatagtgagaagcatatagaatctaatccctttattagagtcttcaattgaaagcgtttactatatgccaaattgatatgccatccacattttggtttaagggtattgttggcaattggcatattgttatatgtttataactgaaaaaatgatttgaaggctatatgtgtatattgtctcaaattgaaaacattcactgtctcatagactcatagtatagtatattgtgatcatggacagttacatttgtttcaaatggtttgatcaataacatattttagaaggatttaaaacctgatcatgtttgtcaaaagtttggcctttataatcaactaagtactcatcattggaatgaatgagtttaagataataaggatctgcttgatttgtgtgggaatacatatgatatgattggtaatgaagtagtgtagacatagcacgctttgcgtcttctcaagctcagttttcacatttcctataggatatatatagttatatatattataatatatgatatgaaatgcaattgatttaatcaagctactaatctcagcaatatgtcattcttgtataatataatacagtgtgagtgaaaatatatattaatcattttttattttttacttgatctgattttatgcctttaactgatcgcgttttaccacttcacgtgttgaaaaataaataaataaataaaaaataaatttttatttaattaaataatttatttaaaaaaaaa

SEQ ID NO: 163769 - DNA, 2008 bp, Cannabis sativa
  modified_base (1968)..(1982): a, c, t, g, unknown or other
tctacaccaccaaatacgctatggaattttttcattcaatttaattatcatttgtcaaagttatgttggaaaattttgtccaatattcttctataaataccaatgaaattgtgattaattcttcacaacatacataacttattcaattaaaatttaagtgttgagtttaatccacaatgtattatttagaatttattgtgttcatattgggattatggtggggaaattcacaagtgatattgtctcttcgcacgttgcatgaatcagcccttatcgacatgcatgagcaatggatggctcagtatgaacgtacctacaccgacgacatcgaaaagaagaggcgtttcgaaatcttcaagaacaacctcaactttatcgaaaactttaaccaacaacccaatcgaacatacaaggtgggtatcaacaaatttacagatttgagtgaagatgaattccaaaggcacttcactggtttgaagatgcctttggtctcttcgagttcttctaccggtttcaggtacgaaaacttgatggtagaagatatctcagataacgtcgattggcgaaatgaaggtgctgtgactgatgttaagaatcaaaatcaatgtggtacgtatgatcatgagttactatgtacaatttaactcatctcataatgcatgcatgcatctatattttaatttacaatttttgaaatagcttctattcacaataattattacaaaagctttcggaaaacactctcatcagcttttgtattttaaatcacatcagattttttaagtatattacaaaattttatttttttttctcaaattttaacatattttaggaaaattactcaatatattattttttttaaaaaatttatatagtttggattgctctattagtttctcaggttctcaggtgaattctatgttagttgctatgtagattttagttataatttaagttgttcctttgattgctacgtgagtttttatgtagttttttataaattaaaatacaaaaaaaaaagattattttaaaatgtaattaaaactagaaaaacccatatattttatttatttctcaaatgtataatattaattaaggtatacatatattcccatataaaaagaataattcaaatccaaataattaaatatacattttttattctttctttaattgtatattgtcaattattatttattttattttgttgggtacgtactcttgctataaattaattataaaattattatattttcgtaggatgttgttgggcgttttctgcagtggcagcagtggaaggaattacacaaatcaaaactggaaatttagtgtcactatcagaacaacaactagttgcttgcgtaagtaaaaacgaaggttgcgggggtggatggatggagtatgcattcgaatacatagttcaaaaccaaggcataaccactgaaacaaactacccttatcaaagcattgagggaacttgttacactggaataacttcttatgcacagatcactggctatgaaaatgtacctaaaaacaatgaagatgctttgttgaaagctgtttctatgcagcctgtctctgttgggtttcaagttactcagagttttaaattatatgacccatcttctggtatctacacaggcgatgactgtgataatagcccaattaatcatgctattacaattgtgggatatggggaagaagatggaatcaagtattggttggctaagaattcttggggatcaacttggggtgataatggctatgttaagatcttgagaggtggtcagtcacctcaaggtgtttgtcagattaataactatgcatcctatccaattgcttaattatttatatatttatatagaatatgataaagtatattttcacaatatggaattttattagtagtactaagtttatctttttgtgttttttactagtggtgttgtggacattgtcccacannnnnnnnnnnnnnnagaattgagccatatataagaacatg

SEQ ID NO: 163770 - DNA, 1615 bp, Cannabis sativa
ccccagccataatggtagccacaacaccacctccaatgccaccaaaagtaccaacaaggttaaccaatccaaaaccagttcctctaacaccatccttataactatcagctataaaagactgaagtgctggtatgacaatagccaaaccgaaaccattcactgctctccaaaaggcaacttgcataaaccgttggcttactcctaccgcggcggttgatatagcccaacagaaagttcccattgctagaatcacagggcggtcatagttaataactagaacaccagctagaggtgatgctattccttgaacaaagtttcttatgaaggtaagataacccaaatcagatggccctgcattgaaagcttcactcacttctttgtaaactgatgggagaagattttcatctgctctttccattatagcagccatgtttatgagaatgagagagagagagaccccataaattctccttgttctgagaagaaagaaatcaaattcaactactataagggaaaatatgaggctacacattatagcttaagaaaaactattatcacaattgagatttcttttgaacctttttgaaaattcttcctattttgaaatgtgggaaagctatctaataataaacttatttctcaaacaacaaaactcatgtgaatatattcagagactataaaaaagctatagtaagagattgcttaacagtttaaacggttgagtgaatctgtataatatatatttatagaaagaaattcaaagaatccattactatatcaaacagcacccaaagcattaaatttataaaccgaaagcaaaataagcaacatcagacaaacccattgactaattaatcaatatatacacataaatatgatggtaggactcacttcatggtttccaaagttatgggaagaaggtttttgaatcgaaaagcaggagcagagaatctggaagatcttttatggcccataaacgaaaaaacagaagatcccacaaacagtaacaatcctcaaaaagccgaaggcaaagaaaactggtttgcatctatggcggatctgagcttctcatttgccgtgtcaataaaaactctgactttccacggacccatcaggaatttcaccaaaagaaattaaatctgaaacattattaataaaaatttaatttttttatgtaatattttcgatgtattcaatcatattttatagtaacaaaaacaaaacatgaaatcataagaaagactcctttgtttgtgtctgaatctgtaataactatatattatccatataataaccgaagtagtacttataataacgagataattaatgtcactaattttttaactattcattattcattatttaatttattaatttgttttagggtcaaaaattagatgaatggttacctcattttttatttgtttatttattaataatggcattagtgtccaaaccttatttgttccatgaaattacaagtgatggcgggaaacgtggggataaacacttcaactaaaacattttttattttattttcaaaatatcttttttaaaaaaagaaatatatatatatatatatactagcaaaaattacgtgcgagacacgtatact

SEQ ID NO: 163771 - DNA, 837 bp, Cannabis sativa
ctctgtttctttctgggttttgtgagttttttaaggaaacaaaatgttgcagttgaattttgttgaaaagaaaagatttatcaacttacaaaactcaaagcttagtgagttgaaatgaatggtgtaatcataatttggatagaaaaaaaaaattgagtttagcatggttattaagtacttctcaatttccaatgataaatttaaattgatataatttcaacaacttaaataacaaaattaaaataattaaatgagttttgagaaagatttcggcttacttattttcattgtattcatggagtttcaattcatttcacccaaattgcataagtaagttgtaaaactgtatttttttttcaagtttcgtcaatataaaaaaaaaaatagataatgtttgctttggtggaatataatataatgggaatggtaatagaataagaattataattaatgagcattgtaattgaataaattaaaaagtatattgacaaaaatattcttaattttattatttttattattaaaagttaaataaaaataaaaaaaaaatggcaaagcatatcttttctaattatgtaatcactattatattagttttgtaatgtaataaggattacaataaatcatgtaatagttattacattgtaaaaccattacaaagttttaaaagttaaaacaaacaatctaatgataataatgattccattacaatcctcattccatcaaaccaaacatactctgtatgtcaataactttcaaattttcttttattaaattccaaacaaaatccatattgacaaaattgaagaaaaattacaattttacaaatattgaata

SEQ ID NO: 163772 - DNA, 620 bp, Cannabis sativa
tatcttctcaacaatccaagaaagagtaactcacctccaaaccctaatctgagaagaaacccaataagaagctaaaataattaacttgttgggaatacaagagtacaaaaaatatgatggcaacatcaattacaaaagaagtcatagatgactactggccattctttggtgttagtagtcacacatcaagaaatcctgagaagaatcaacacttcagcaaaaatatcacatgcatgcactcagacttgaatcctaaagtcaatgttgcacaaaaaaaggaggtagatggggccacacgagtattaaaacttctatagggtcagtactcacacaacacacgagcactaacactcaagaatggtcagtgctcgcccaaggtgaagaccaagaagaatggtggccaaatggttctctccaacatcaatgatcatttaaaaaatgagagaagcccctagaatattatgctaatgtcatacacgagtactaggcagctctttacggtagtactcatgtaagcttaggcaaaagagatcttaaatattttaaagctcaaaaccctagagaaggtctgccaacatttaataacttgtcaaagacaactcaagatgcccaaatagaga

SEQ ID NO: 163773 - DNA, 1233 bp, Cannabis sativa
cctctaccatttcctttaaattctttcctacattcctacaaaacatagcattaatttcccatctaagatttacgtcaggtcacatgttcatgaaactgaaccacacaaacaaacaattaccagtctccaatattaggttatttagccaagtttagacaccttactatatcattgcttagtaccaaatacaaataagactgttatcctttctctaccctttcgtttgaattctttcccgccttcctagaaaaaacatagcattaagttccccatctaagatctctgttaagtcacttgttcatgaaactaagccacactaacccaaacaaacacttaccatgatgagttcattaacaatccaacaattatgctcgactaagataattaaactaatgataacaaaaccgagacatatgtataaagaatagtaagaactaataaaaaattgaaaccctaccttgctctaatggcgcgcatactagttggctcgtagccagtataagactgagtgctgtactcgaagtcagagtcaggtccaccagggcagtacacgcaaatattaccagtagtggcgatgtgagggcaccggtgaggcttagacatcacggccacgacggcgatgccggaggcggttcgaaccggcttggccctgagcttggggagcaacgactcgcgctccgaatcaggaagtgccgcaatcatctccacgagcttgggcgcacgcgccagaccgtacttgcggcaagcggctgacttgagtgcgttgaggtcgacattttcgcctttgtgagagaggtcgaccatggagcttacgatctcagctatggctctgactcgagcctcttcttcggatagtccatgggcttcgaacccgcctcgccccggccggggttgcttcttgtttggatcagccaccatcgcagtcgccatggaagagagtttgagtaaagagaaaaaacgaacaaaggaacactgaagagcagtgaatggaggcccagagaggtttataagtgtttttacgctgacgcacaaaacggcgtggttttgagggtagaagagttattattactctagtggtccctgactttgaagaaaatatcgctttgatcccaacaattttatatttttttcggtttagccattttttttttgaaacaaagattgcaactttcattaaagccaatcagctaacaaaatagcatccaaaccagaagggacagaccccctactgga

SEQ ID NO: 163774 - DNA, 1075 bp, Cannabis sativa
  modified_base (768)..(790): a, c, t, g, unknown or other
aaaaaaaaaacacttttattactgcatgccatttatgttttaaggatttatcccccgaattatgacccttaagttttgctcccgaactttctctgttgcgaataattttttcttgaactacaaaaatcattgcaaatgtcaccctacagttgtattctattctggtgatttatttaaacaacttgttgacatagcactaacatataacattaatctagcacaattcatgagtctagataaaagtgaatacataattagtggtttaatgatatattctgagagtatgtatgtacattcttagaactattgtttctatgtttaatgtcaataaactagattttaagtagcttaaagtacgtattaaataaatccttgtacgtactacaattatacatgtaactcatagccacacaagcaaattgttataaaaattgagatgaatataactggaaggggatattaacaatgatttgcatagtttggatgtgattattccaagtgagaaaagttcaagggtcaaaactctgcaaagaatattatacttcatagttcaagtggcaaaaattttatttattcttattttaataaaggtaaccgtaataaaaatttagaagacaaaataagatagttgtcgtaatttggggataaaattgttaattattaatgaaaatctcatttttaacaaactataatagttcagatattgcgtatgatattttttggccaaagttaagtggacaatattcctttttattattattattattnnnnnnnnnnnnnnnnnnnnnnntattattattattatttgttagagtttgactcaaattatttattttttaatttatttatctatatttgtaaatattggggtatcaacccaagtcccacattaaaagaataggcaagagtttccttggatagtattcgacctactccattagtatggagccttttgggaaggtttccaaaaataaaaccgtgaggggttagacccaaaacgaacaatattatatactaatgttggagtcaaggtgaggtaggggctcgacaaggtggaagaacagggcccaaaaat

SEQ ID NO: 163775 - DNA, 2516 bp, Cannabis sativa
taaacgtttatatattacatcagcgtttatatatggtcaattgagatttttgttttctaattaggtgattatttatgtgttaaatgatactctttaaattttaatatctactaaatcatactccttaaattttaacatgtattaaattatactctatgaactttcatctatgttagaattttcttattaaaattagacaaaagtcctcaaatttaacaatctcaataattcagagaaaatttttaataactttaaaagttaaaaaaatataatttaatacatgtggaaacaaaaattttaattagtcaaaatatatatgctgtaaggacagggccgatcctaggcataggcgggctaggctcgcgcttagggctcactcattttaggagcccaaattaaaaaaatgcattttaaaaaatatacattttttttttaataatttttaaaaatatcatttatctttatagtaagggtccaaaaattttcttttgcctatggtctattttaactcagggccgtctaggataatatatatatataattattaattacaaataattaaagaaggaatcaaaaattataaattaataaccccataatcaatatatattattatcttctacctatatttatatctacttttgttagtgttttcttcttatgttaattatttgttgttctccatatatatttaattgtttattctttatactatatatatgctgtttaaaataaaagtagcctctaattcactaaaatattatgttcgaattgttgtcacatcacaaaaaacaacaagtatatatataattttagaatttttattttgttttttaaatgataaattagaccttatatttttaaaataatattttttataaaaataaaaaattaataagaatcccatttaaaattattatgataaaataggtatgttcttctagtataaattatcttcaagttggttatattaaaaaaaaattactaaaaattaatgtgagattattattttgtactattttaaaaaatacaaattttaatttatcattttataaaataaatagtccaattattaatttttataaactacaaattcaaaagtatttatcttatattttattctgttttatcttgaaaaaaagagagacagagacaagagagagctatactaaactatgcattgtatttgtatggcattaagtactgtcttagtcttgatgagttaacaccttccttaacagaaattaaatggaatgatctctctatatatatgttgtgttattatatttattagatgatatataatggggttgggaatagtgataggagctatgaagatgaagatggtggtggtgagttggcaatcgtcggcggcatcggcgcaaagggcggcgatgttgggtggtttgatggtgccattgggtgtgaaggtgttgttgaagatgaaagtgtttcggttaagatattgggaggtaattgatgagtcaaggttacttttttttcaattgggtcacattttagttactacttatgatgaaaatagtgatgaaaatagtaatggtcagtcttctatttgtagtagatttttaagggcttttggtttgatttatcaaagacttgttagtacttcatctccaaattctgatgaattagcagctcatcaccaagatagctttaatactctttctatggttgccctttaattaatacttcttcttcttcttcttctctttaagttactcttaacttctacttattatatatatatatatatatatatatatataatctccttggagtgataatgaatcaagttttgatgtgtgttaatttatttatatacttaattatattgtaccatagatctacttaattagagtgagaaattactggattaacatttttttttactttttgatagctattatatattattatatgaaagtgattatacattaaaacaaaaaaaaaaataagaagaagaagaagaagaaaaatttggggtagctaaatatataaatggttattagttaaatagttagttatttgatgaaatggacatgtctcttaataataatcactagtattatcttagattttgatagaatcttaattagaaagaaaaaaaaaatagttcccatattacaaatgttaactaataattatttgagaagaattaggactaaagaataaaagatacataaaaaatagaatcagagtttcattcaactaataagtaagttttaggctccatttgtttaaacttaataagagtttagatcttattgaatcagatttttaattattaagtgcatttatttatttttctttattaattacttctttctacttatttcagtgtttaaattcagatatcatatcttactataaacatttagatgtctggattaaaaaatataaagctaattagcaattttttccctcgaattttgacatgtactaaattatgccccttgaacttttttggccgttaaaaatttcccctgaactattaa

SEQ ID NO: 163776 - DNA, 1329 bp, Cannabis sativa
gcccttaaaatactggtgtgatgcatttcacactgcagtttatctcataaataggctcccaacacccatactccaacacaaatctccatttgaacctctctatgacaagaaacccgactatgccttcctcaaaacctttggcactgcctgttttctgtgtctccatccttatcaatctcataagttccaatttcactttgtgaaatgtgtgaaccttggatatagtgactctcataaaggctacaaatgcctcagcccaaccggtcgtatctacatctctcgagatgttgtttttaatgaattggaatttcctttccaaggtggtttcctcaataactaccaaactcctacacctgtcatcatacacagttcatcatggtcatctttacccatacctcatctcgtttctactcccggttcttcttacctatccacggctgacagtccacttcctcacacccctgcggcaccatctccaagttctcctctcactcactcaccctctacttctccccattcagtttcaggtcatgaaagggggaatgacacctcttctgcacaccagtttgctcacaattttggtgatgaacaccatgtttatcatgacttgccacctcatgaagaacctggtgctgctggtgttgaaactgccccaactattactgttgaacaggttgtaccatcaccctcacatcctatgattacaagaggaaaagcttgtgtttttaaacctcgcacttttctcagccaaagtgagtcaagaaattcaattactatatcggctaatatcatggaagcccttgcacatccatgatggaacaaagccatgaatgtggaatttgtggcactaaaaaacaagagaacatggactcttgtgcctccctcacttgggtacaatttgattgggaacaaatgggtctacaaaattaaaataaatgctgatgggactgttgagagactaaaagcgaggctagtggcaaagggatattatccaaaggccgggaatagactttggagagactttcagcctcgtaattaaagctgccacggttcgaattgttctcaccatagccatatcaaaaggatggggaatttgtcaactcgacataaacaatgccttccttaacgtagaattagaagaagaagtttatatggtccaaccccaaggttttgaagaaaaaggaaaagaagattatgtttgcaagttgcataagtccatctatggtcttaaacaagctccacgggcatggtttgatcgattgaagatgtaacaccctaactatcataggcgtattacgtgatttttaaacatgctgtgcagctagttgc

SEQ ID NO: 163777 - DNA, 526 bp, Cannabis sativa
atttaatatatatatttttttttctgtatttgaccagtcttcacatgttgtttatgtgttttgatgttctaaataaatgctttaattagtatattgtgttcatgattgaatttattggatgatttatatttattataataatactcataaatgttcaagttaattggtattaaaacttcaagtaataattttagagctcattttgttataaacttatttttctgtctttcttagagaagaaaagattttagaatttaaacatcgtattggataaaaatatctaacactcaagatgtgtgcttgaaaagttattgtatttatattattttaataattttgttgtaggttgactgcataaattaaaatagtgttatgttttattactaggattctttcaaccttaatctatcaccctataaaattttattgccagtaatagtatgataattttggtattaatagtttattttattattattaatttattttaaaggaataattcttttagtataatgccctcattaca

SEQ ID NO: 163778 - DNA, 2108 bp, Cannabis sativa
tttgaagtgtaaaaataaaaaagtgccgaatttaaattaacagtgactattcaattgttagattaaaaatataattatgattgttatatttttatatgacttgctctaacatgttactaataagcaatatatttttagacttaaaataattataattaattttttaatttaaatatttcgtaagatatttttcacaactaatgtttataaatattttttattttttatatataagaaaataaataaaatcagattagtatcaggttacagataatttattcattgtttttatttaatttctaaattaatcataaccgtttaataataatccaagaactgaaataaatgtaactaccgtagttatatatttgatttaatcattaaaacgtcattctttaaaataaataatatcatttttaaaaaaaaagtattagtgttttgtcacatcaaaattttataagaacatacaaatctttattaactttttattaatttttttctgtattaactttttaaaaattgtaaacttcttcttagcaatttaattatcaaaagaatacttaatttattatgcatatttattgtgagttaactataattttttttgtgttatttttgtatgtatggttgctattatctgcgtttttggtattggatacgtagactccagattaacattcaagatccatcagtgggacactcatacaaaatgggccaagcccatctgggtgttaccttccagtaacatgttgtgattttgtcctcgcaaagtcttcctccatcaataaatcgagcccagaagacttgtccggcaccacgagaccggagaggcaaggcaccacgtttctggaagacccttccaatttccttttataatcgtgaacataaataaggaaacttcagttgttagattgcaatagtgtatcgaatagatgttcaagggagaacttcctacaacaaatattatgtaattaattcagattaattacccacaattaatgtacgcagtgttgaccaagtcgatcctaatccgatctgcctagtaagctgatcgtcttctccgtgagctagacctcatgagaaagcccaaggatattctttactgtaaactccccagtagagagaaaaggaagacctaatgtaattctcaaactactataaatactccattaatttcatggattaagagttgaactctcttgcatattttgctcaggaaaacttgagaacataaattatgagtattttcatatggcatttacaagcataagcttactgaataggattgacttgtggactaaggcttggtaacgccctaaccacgttaaaaactatttatctcatttcatactttctctattgattatttatttttcagttcatattacttttattctgtttccaaaaatctcgataaatattttggtgcttttattgagagctgaagaaagcaatgagaccatttaaagattaagtccgagtaataatggccctctcctgaaccaaatctggccttcatttcactagtcctaatactagagctggagattctagtgaacctcaggaagtaactagtcgccacaaaagccatcaacacgaggaccagaatctagatgctctcatcgtagaggatgcaaatatggagaacgtagttctgaggatgttaaggttaataccaacaacacatcggaggatatgaacacagatgaacctcaagacaaagttggtaaggacaacgctgaggagaagagctagcctgataagtcaaaccccatggtcatcatggcgtaacaactttaattggctgaaagtaggttaactcggcaggatgacttcaacgagctgctactcgacaagatgaccaagatggaggctgtgatgaccgccctgacaaaattatcccctgatgtactagatcctccaacaacagagtgttggaatatattttacgaggacctagatttactaataagtatagttttaacaccctaaatatgaatttctaagggaatgaaacttaaacacatataaagtatgagaaatcttacattggttgaagcagaattaaatgactcatttttcttagatctctaacccttgttgctttc

SEQ ID NO: 163779 - DNA, 1302 bp, Cannabis sativa
atatatatatatatagctaacatggcaacatgtgctaggccctgaaccaatgatacatgtacaaattacaaatacagaaaaggaagatgaacttggtagcttaacaagcaagtgtatcttgaaaatgactcgaaactataagagtggcagacaagtcaatcacaattagcaaaacaacaaactttagtttttgtctttagtatgccatttttttgaattaagtaacttgatttggggaatggcataatcaaaacaaaacatcacaatcactatagacaaaactatataaaagtatccaaaggctaaagaatatgctgaattcaatattataatatcccaaaaattagaaaaaaaaaaaggaagaaaatttactttgccatcatactctctgcgtgaaagaacctctggtgcaatataagctggagttccaactgtggactttggtcttgaatgaagcaaagatgactacatacacaaagataatttttttatcataaagatataaactttggtcattttctttagttgggtcaatttttttttaaaagaaagatttagatctgaacatatgaaagttaaaaatgaaccttagagtaaccaaaatcacatatcttcaaacgaggagcagggcttccatcaagaagggtattttccagctttagatctctatgacatatttgctgcaaacagtaaataagtactaataaataaagaaaggagttgcagagttacagttgcagaaagggtaaaaaaagtcaaaaaaggtaaaaactttgtgttcttttatttaccagagaatgacaataattgactccagaaatgagttgttgaaagaaatatctagcctgtgaaacaaagaaaactcatttagaaaactgaaatcattgtgagaaaaaagtaaaagtaaagtaaagtaaagactaaagaaaacctcgtcttcactgaatctgccagcattgcaaatacgttcaaagagttcaccaccagaggcatattccataacaatggctaaatgggttggagtcaaaacaacttctttaaaacgtatgatatttgggtgcctaagcgatctgtggttaatgatttctctagctacattctcatcaatcttctgacctctttctatgtatttcatagccacaagctctttagtctctttatgtctcagtaacctagcaaccccaaaattcccagctcccaaatccttcaccacttcatacttttccatttcaaacccccaaaagctagaacagagaagagagaaagagaaagaaagagttttgctttgaatccaatcgaatc

SEQ ID NO: 163780 - DNA, 992 bp, Cannabis sativa
ataaagattacatgtcaattgacgttattgccctttatagaacgattcaacactgatttcgttgacgtggcagcttacctgctactcgttaagcaaatttggttcaagttgacttttatctcatttcattaaccattggttgaccgtttactactcactttcatattcaaccaaccactaaatcattcaataaaagtggttaaatcttcaccataataaagttaattttataaataaattgattttttttttctataaattttttggatttaaagaaaaatgcaactttacttactcaaaaagaataaaaaagcacaatgctcactttggattttattcaattgaattttaaaagccgcctcttttattttggataaagacaatataattttttttcttttaaaaaaatcataatggaaatggattctaactaaatgaataaataaaggtattggaagtagatgattaaatggttatcactttttttttttagttaaaaataaatactgattttgatattatattttataaaaattagtgatcaaattatttatttaaataaataacaaattaaatatacaatttttaaaatagtactaaatagcattttaaattgtatttgtcaaaataaaatttaataataacttaatttagaagtattatgacaaaactagttacatttattatatttgctcgtgttagaagacgtgaattgtcaacaattgtgttcaaagtcttatttatacaattttagaaaatatatggtaaattttattaatccacaaaaaagatccaaccaataataacttttgttctaaaatggtattaaacctttagttacccttttcttttaaagaatatacattttcttttaaagtattctcttgacatttctcaaactaactagatatttagaattaaaatgatagggaaattttataatacacccccttaaaaggggtatatcgatatatctctatctgttttagtat

SEQ ID NO: 163781 - DNA, 641 bp, Cannabis sativa
ctctctctctctctctcttacacccacacacatactattcctaatttttcaaccatatataaaatgcatgagttgctcctcttagtcaattgattttgatatagaacctaatgcacattcatcttaaattgtaacatggtatctgagccaaacaagatctctaacaagtatctaatccaaatccaataacaaatttagtgtcacttttgatcaagccgtccaaaattagagagcaaaaactagtcactatcttgaggagatactagaatatactagaatcccacattactaatatgtgaaaaaaaaagatacgtataggctactctttcaataaccaattaattttgagatgaatccccatacatattcattctaaattctaatatcagtacttgaaatctcatcaatgttgtaatatggttagtgtaatatgcatacaatgaaaatatctattataaaagtttggagtcattaatattataaggagcattgttatctagtattttaagcagtctaacactataccgatgtgatattttataattgattagtaattttagggatatgattttgttccgttattgtactttcacggattgtaatccgtgatgtacagcagccgtcagatgaaggagttattt

SEQ ID NO: 163782 - DNA, 1031 bp, Cannabis sativa
tatcgttgtaaaataccatgatgtcatttctctgttgttctatcttatatatatatgcattcatttagggtactatactttcattttagtttccaaatttccaagttttatatttatttattggtaagaggattgcttaaatgtagggaatatcacaattcagagaagttattgggagttcaactcaagcatctagagttactgcactgttttggggtcctaagaaggttgctgagttaaaagaattgaatttttctctagggagttatggcaatatgcttggcgaatacattctaacaaccaatatacaaaaatgaacctcgaatacaaggtaagaaactaaaacaataaaatgtcatgaatcttaaaaagaaccaaatcaaaacaaatcaaaaaacccacaaacacatgataataaaaaaaaaaatatatatatatatataactaaaaagtaacttatcaacatataaaatcaaaacaacaacacatattgacaatcaaaatgaaaaaataaaataaaaaatcattgaccttaaccttagaaggcatcacaaccttattttcatcctcgaattctaaatgtcctctatcaaactcttcatctttagcttctttacgacatcaggagatacatcaagaacacgaattttttttcttcaatacaaaactcaccgaacattttttcacattatcaacacctttgtcattcattttcttataactccttgcattaattctcaacatccttacccattaaatcgttgctcttcttacttctcctttcattcacaacagctctatccgtggaattatcactatcttctcaacacccaaacatattttcctcacattttcttctccttctccaccaccaccttttctcttcaaacgagaaggccatggagaaatcaagcttaattgccatagaaacacattcaacaccttgtcacaaatgacaaaccctaaaattacctctaacccaaaatatacactccgaaagttgatttaaatgaaaaatgaaaaaaaaaaaa

SEQ ID NO: 163783 - DNA, 981 bp, Cannabis sativa
tctcaccaacccacgaccacccaataacgagcactaccctgttggaccctcaccaacccacgcgacaatgtctaaagtaaaatttccagccctgtattttcgagtttgttgaatttttgggtgtttggattaatatgtttattgatttagagtaaaatttataagtttgttgaaatttttctgtgatctgtaagttagggttagaattagaaacttttggggtcaaatctgtgttctcaggtgaaatctaggtttttacatcaagcccgatgtagggctgatgtactgagttgaaaaaatagactggaggttgaaggtaaagggcttatttttgcccgatatagggctgattatgttggtatttcaaacttaggtcgatagaggacgatgctaggtccgatgtatattgtaatgttttatactttgatagacttttgtatgttcgataaaggacgattgggggtccgatatttattaatactttattgtccaaacagaatgtttgtgtgtccaatgaaggacgatgggggcccgatagtgggttctatatttatacttgtttactgtaggttcgatagtcagtctcatagaggacgattggggcccgatatgggttacgagtgttataacatttttttttaaaatatgcatgtaggtttgatagaggacgattgggttcgatagtgggaccgatagttattgcattttttatttgtattatattattgtgttcgatactggttcgatattttcccaatattggtccgatgctttgctacaaaatgtctaacttgaattttcttatgtattgtattgtagcaataaaatttctaaatctcgccttaatccatgaataataattcttctaattgtagcatctaacatgccagcaccagagtctaatgtagagattttgcgacaaagagattttaccttggtgaagtattggttgatcgtcatgtcgcgctgcctaattgagag

SEQ ID NO: 163784 - DNA, 1547 bp, Cannabis sativa
tggtcggctcattaatgcgaagtgcagagagtttgggagtggagtgggagtgagtttgtaccgttaggttggtatgcatttcaaaaatgaaagatctacttttgcttttgaatgtgtgtgtagtcgttgtattctatgtatttggaacttggaagcagtcactccttttgtcattacactcttttttattttaggctatgtttggtagagaagattagaaggatagagagtggaagaaggatggagagtgtgacggaatggaggagatgataaatgtcctccattacgttgtcatttacattctttattagttcaaatcaatttaataagtcctcatgttattttttattatttgggaaattttgaagcaaaattctgtaaaaattttattttgatttagattagtctttaatctcgagaaatagtagcaatagtgtttaaggtcacgtttttttgtaagtccggtaattctaaatttaactcacccgttaatttattcaacaatgctacgtgttaaaatattattggtcaaaataatagtttaaattagaaataatttaaaattaaaaaatatattttaaaattacaattttttttaatttttttttcttcttcgtcttcttcctccaaccacagtccgacctccacccacccaatcccaactacatttactctagcgagctcttaacggagactgaacaacgagctcttaacggtgactcaacggctagggccatagtggccttgactccaaataatgtcaatgaggtcattagtggcctccatttttgatgacgaggctttgtcggtggcagagagagatagataagaaaatggttaactaattaattagaactaggtgtctctctgtagttgggaatttactctttgtttgcaagttgttatccgtatttatggacaggtcacacgtggcataaaaggggagagatagtctcataatctcactagttaaaattcctcaataaaaccaagtcacggagaagcttcgctaattcgggagtaggtcaagaccgagagatacgcggaggtccatctcacctcactcctgctccccagacacggaagacttattaccactctaagactcgaagtggtctaatctcaaagactaccctaatgatacccaaacaggtattcaaaggacctatcgcagacgttgatcgcccaaaagagttgcggacgtctaccttggatgcaaaccttgatcacccaacgatggttatgctatttttgatacaggatctgatcctttcccctgtgccaagacatggtagtacgcgcacttcacacaccttttttgccagatagtcatttcaggcatttacttttcaaggttaagccttttggcgacacacgtccattacgtacaacggtcccctattatctagctattgctacgcacgagcacaaatccttccaagaggcccaacagcagggcggctctgaaatttagtgggccatagggaaaaaaatatttttgggccctcatttagaaaaaaaatatggtatttttcaaaattgataaa

SEQ ID NO: 163785 - DNA, 1757 bp, Cannabis sativa
ttatgctttgcttaagccttttgatagagaccatgacaagaaggattgataagtacatatatatttatatattttcatgcatgttattaggtatgaaggttttaagattttaaattaattatattagaatattttcgtaaggtctcaattattaggtataccctttttttttgtttatatatacaatttgattttttttttttcaagttataatgtgcaatatataccaataatttcttagatgggtaagtaataaccgtctaaatgtgaaataactacaaattataaattagtaaatgccaaaacaacttaaaagcatatatagtttgtacacaagtaactattaggtaaaaagctagaatacaaaaaaagtgttatgtgtataaaataaggaggaggtttcaattgttaaaaatgaaaatgattgatttaatgttggaatgatttttttttttgtaaattttatggactattattcacgagttttttttaatcatattcgaatactgggtaggtatcattctactcgtatctctctccacacctctcaaaattacttcacgaaattttttatttaggtgcataaaacatagggaacaaattttgtgcttgaaaaatcttaagattagatgatttatcgtttctaaatattgctcgaattcaaaaattcaatttttttttatataaaaatagtacaatgaggtggttgaaattttaactaattttgtcaaaacttaatatacgaaactctaatacctcattcccaatgattgctttgtgaaaatacttcatttaatttcagaatatgaatttgtacccaaaattgattttttcttttgcaaatttcatggattattactcaagagttttccagtcatattcgaataccagatatcattttgctcgtatctcccttcacacctcttgaaattgatgaattttcttttatttaggtgcataagacataaaggaaaaaattttgtggtttaagaatcttaaaattaggtgatttattttcactaaatattgctcgaattcaaaaattcgaaaataattttataaaaatagtacaatgagatggtcgaaacttaaactaattttaccaaacttaatctgcaaaactctaatatcttcttccccatgagtgctatcgtgaaaatgattcatttaatgttggaacgaagattttgtccaaaattaattttttttgtaaattttatggacactcatgagttttttagtcatattcgaatatcagacatcattctgcttgtatctccctccacaactcttgaaacttgatgaaatttttatttaggtgcataagacataagagaataaattttatgctagaagaattttaagattaggtgatttatagtttcttaatattgttcgaatttaaaaatatgaatatttttttacaaaaattgtacaatgtggtggtggtcgaaactttaacaaattctgcaaaatattaatctacaaaactctaatatctcattctaaatgattgctatcgtgaaaatgcttcatttagtataagaacgattttttttttttcaaaattgaattttttgcatatttcatagactattatgtgtggaatattttaccaagatctagattaactaataagtatgtcgactaacatcctaaatatgaattctctaaaacaataaaaataaacacataagtgtttaacaaaaccttacattgattgtagcggaataaaatgactccttctgttcaagatc

SEQ ID NO: 163786 - DNA, 1093 bp, Cannabis sativa
ataaaacaatccctttaattaatatgtggtgggttagttatagggtaatatataattgagtagtatatagtatagtaatactcagaatttttcattttaattagtgcatctaaacatgtgaatgaataattttacttttagtgcaaaaaccgaatcaaagttacataaagatttataattatattaaataaaatataattaattaatatttaacaaatggggaattgttagttctaaatttataccacaaatgattcttttatatgcattattggtgttaattacattcctaaacaatatctttaaagatatgtaaatatatagtaattaaacatatatacaacaaaagtatttaagttatatgtgttgaaagaagttagttatggatgttacaagtgtaacttagcttttcgtattagttagttagtttctattatacttattgtaactagctaaacactatacatagatttgtattctcttttttattcaatacaaataatatattttttagttcttgaagtttgatatggtatagagtttatttaattttgaaaaatattttgtcttcctttgttcaatatctgtatttcatattttttttctattttgctggcaacttcagttccaaaagactaatttcattcaaacactcattgtcttccaagcttgatgaaaataattttctatcatggaaaaaccaaatccttgctgttgtttgagctcattgtctccattgattctttgaactacattctactacaccaaatcttgatacaaaaggaaatcacatcaacaacattgtttctaatgtttacttagattgaaaatcaattacttctttcatagatgatgtccttcatgaatgatgaaatgaacatttgcatgataggtcatgaaactttagctaaaacgattggacagctcttcaagaattcttcactgctcaaacaagcttcaagataagttaatctaaaactaaacttcgtaatacaaaaaagaattctctcatttaatcatcatgtaaaaatttaggtgtttggtaacattttttaatcagttttctatttttaaaattgaaaaagtgaaaata

SEQ ID NO: 163787 - DNA, 2277 bp, Cannabis sativa
  modified_base (377)..(385): a, c, t, g, unknown or other
ctctccctctccctctccctttaccatgatctaatttcataaccatttggaatagaatttagtttttttattatttttttcgcttgatcttcaagttagtgattttcttgtcttttagacaattatttcttccaaaataaagcaacccactcaagcaagcatgctaatatggtctcgacaatgtttttcttactattcatgaactaattttacataatttcacttccaattgttgttttacataattactgaaagtaactagaagaaacttttatttcatgtttttgcagaaagaaaatctaataatgttttgagtcaaaagatcaagatcagtacttcgtgttctgtattgattaaggcaaaaaaaaaaaaaaaannnnnnnnnaaaaagaaaaagaaaaagaaagacatatatagatacagagatataaacaaagccatctatgacctcattcaaaaaccgtaatttcaaaaagaaaaacccaagttcttaaaattgcgtaataaacataaaagaaatatgaacaaactaacactcttcttctaataaattatataagaaattacctatatatatattatattaaccaactatcacgaaagacagagtggaactgaagcagaaccagtaagagaaggatgagagcagccacgccccagggcgagctaccctccgacggtacgtggtgggttctccggcgacggtcccagggtgagatggcaaaaagagcatctgggttttccatagatgagagccaacgaacgatgagcaaaataataattgggactacaaagagaacccaattgatttgttcttcggcggtttcgacggcttcctcgtaagaaaagtaccaggatgtaccaagaaagatgaaagcaactgctagaatgaggagaacagggtacggcagcggtgacagagtgaacccttctaagattgatgtggttgttgagcttcttcttccgtagtaggaggccattgttgaggagggccctttagctggttcttaaattcaaaattactatatttgtgtgtatttgtgtatgtatttatagcaaacaagtatggtgtaaagtgtcttctaagaaggcataaagtattaaagatgttatgtgtgagactgtgagtgtgtgactgactatttcaacatttcagtacaattgatacaaatgcgacatctggcaaactatggttagcgtgtgaaaaaaaagctaattaaaatttctgtttcttaaatttttacatacattaaattatatctctaaaaaaaaaattcccttaagctgtttttaaatctaaccattttcataattaagaaaaatttttaatagccttaaaaattcgagaaacataatttggtatatactaaagtttgtaggcaaaaatttacttcttgatatatattaaagtttggaggcaatcgatggaacacctgttcctctattgcaactttgcgtaccatctttggaggtcctccccgtggggggtgttcccggtccctgacgctaggggtcgtgtttgggactgtgttaatttttttttgaaatttgaagtcgaacggggtggaccctgacaagctcttcctctatgcttcaatcattgtagacacaatttggaagacccgtaataacaaggtacataattctcatccgagtaacattgatatggccattgactctatttctcattgttatacagattatgtttcctgtcttttccctctgacggttacagtggcttccccggcttggacccctccgcctgaagaatggatcaaaatcaattgtgatgtcagggtcggtggagactccatgtgtgtggcagcgctggctagagatcactctggtactgttgtgtgggcggctgttaacatgctcaacttcagagatcccctgattggggaagccgcggcttgtagacttgccttggactcgactagactcaataatcataactatattttggtggagagtgattctgaaatgtttatcaaagcgcttaaaggccttcactctatttggaatattgataattatgtttctttatgtaatcaactctctaaaaactttgtatcttataatttttcgtttatttagcgttgttgtaattttgctgcccataatgtagctaattgggcgttcgcccagaacatctcaggttttgtggaaccctcctcaatttctgatactatcttttgtaatgaccgtgaggtctaattttgatatctatctaacgttttatttcaaaaaaaaaaaaaaagttcggaggcaaaaatt

SEQ ID NO: 163788 - DNA, 1769 bp, Cannabis sativa
tttttgacattatttatttattattgaaagtcagatatgacctcgactttggacccgaaccctagaaatatatctgaccccatactaggatcacaaaccccgaaccccagacccacacctgatttaaataaaagttgaaaaaaaaaattaaatttacaaagtacctttttatttttggttataaaaataaaaaacaaaagtaattataagcatatttttatttttcaaatacaaaatttaattaatattgattttttaatttaattataaaccaaatgctttataaaaatataattttcatccaattttatctaatcagactctattttaaatttatgaaaaacaggtttgaacgtagctcatatttcatttttctgtccaaattcaattacttaaaatctcgactatttaagacactaacaaaatttgtatttatgaaactgaaagaaaattacacttttattaatatttggtatttataccgctaaaaaaatcatttaatttataccacttacaaactcaaatatgtatagatgtttttgtttacacacacataatttggcacctaatttctctcaatcgacacaccattaccaacgtggcaataatataggctttaccacatatcatacccacataaaataaataaaatgtggtccaacccaaaactaattcattaatgttcataaaatataagaaaaatattattataataacagactctttcccaataataataataataatactaataaatattcgaaaaatattattcaatttttacatataatataaattattattttatatattagaaccaataatcaaattgatgtagaaatatatataaaaaattaaattatagtccaaaaaattaattaaattaaattattacctttaactaccttaataaatataatatgtgttttttttttttttttttaaagtatatttaaaatattattattgtttactaaaatttttagaaactcaatatcataaattaagaggttagaaaataaataaagtaacagaaatagagacaggtgtttttacgaattattcaacgagtcagttgtattaggctaaatagccttcaagtattacaccatgttcatcgcaagtttatgaaccctagctttttactattgtattcgagtaataaatttctcccctcttgcatgagagtatgatgcatttataggctaggatccaggtatggatatacccgtgacctactagggtctgcatataaacatggtccacgtactataatttagattatcgttatttggtactagtggcgtatagtactacttagatgtgacatcttgcgattagttagtgatattctataataatttatcagttttactgtgaatgtaacttagggccaccagacacttgatttagttatacatgtactatgttataggtagtatttgaattgtatgaattattaataatgctaccaatattggcatgaatagtactagagtgcttgagttaagttggtattaaatatggttaattatactatacgtataaatcttcggacatcaatttatgaactgctagatgggttagtttggatttatacggtaattaaatgggtgcttagttagaaattatttatttaattatgttgtattacgggtgcttaaacttttgaatttgttgttagacaattattgtggaatatctttatatattaaaagtgcctatctaatggcatttcttggtttaacattcttggtttaacagaatat

SEQ ID NO: 163789 - DNA, 1083 bp, Cannabis sativa
agattaagcttgtatagttttttttccctttcataaattaatgttggcaaatgttactaattcatatattttttttttatatatatgattctgatatagtcttgggcatggatctgtaaaaaaaaaaatctataatgtggctgtgagtgcagttgaatatactattgtttttcatatttgacatacgatacaaattgctaatgtcaggtggaattgtatctattgtaatcgacttttgtgccaaaacatttcacatttaataatattatttttttgaaggatataattgtaatgttactctatttttattacatgttcaattgcttcttcgagctttataaatttatctgctcagtttgagaattcttttattgatcctatagtatgtctttttatgtctttcaacagttcttctagaggtttaataccttttaagattgcggccagcctctcttcctctgtaaacccttttacctttgttgcttctatcataaatttattgatgcaagttctcgaaggttcccttgttatttgcttcacttctatcaagttttctaagtgagatgggagttgctgagaagaggaaaactgtgtacaaaactctaacatgaaagaattccacgaattaaactttcttggagctaatttgaagtactactgccaggcagcctttgccaaagtagctgagaagattttacaccgtatatttacttttaaccgcttgtaagtccatttgcatttcaaatatttaatgtgagacaaagaatcttctttgcctatatacaatttttgtgttggcattttaaacttgggcggtaggtcgagagcgttgatttttagagagaatgatgatcatctagtccggtttaagttctagatctataagttttgagccggccaggccttgagcgaggctcttaattgatttatttgtgcttgtactaatgaatcaacttgactagtctgttaagtgccaaactgacaaaatttcattagtctacctagtattaataatataaatattaaaaaaataatttaaaatataaaaaattaaaatcagaaaaataattaaaaatatttttt

SEQ ID NO: 163790 - DNA, 1242 bp, Cannabis sativa
  modified_base (1157)..(1159): a, c, t, g, unknown or other
ttacactccaaaagtcctgcttgttgatggttcctttaaaaatggaaagtttggtggagcctttgttgccattgattatgataattaattttgggtggggaagtctatcaatgggatgcaaattgatgctactggaatagagttagaggctttcaacatggctttgtgctgggctgaggataataattgaaagaatattgctgttttttgtgactcaaaggtgattattaatgcgcttgcttctggaaaatcgcctgattggaaacattggtctctcttttcggctgttttggcccgaaaaaggaagcttggtgaggctctctttacttatgttaatcgtaatgttctaagtttcgttgataatttagctaaagaagctagagtttctactcttggtgaatgtaactttaaaggagaggaatttccccctgtggatcccagttatcttttcttggattaattgaactgagattctattttgcaaaatatatatatatatagaagggtaaataatattttagattctatgttttgcaaaagttaacaattggaccatctgttttgttaaatgattaaatagaccctgtattttctaaaattgtaaaaataggaccttgagctcaaatttcaataattttattttttaatataaccaactttacgacaatatctaacacaaatagatactgaaaatgtaaccagttttgtcataacatctctagatcagaatattattaagttttattttgacaaaaaaacagtttaggatcctatttgtacaattgtataaaatatagagttgattttattatttaacaaaacagaaggtccaattaataatttttacaaaacacgggatgcaaaagtatttattctataaaaaaaactaattactagtatttgatcatcatagtgcaaaaaagttaaacttaatcgattagtataaaatttgaaagaccgcaaagtcgggcttagtgtttaataaaagaaacagaaatatttttttaaatccacaagcaaatgtttacatttttgtatgactaaccaaacaaaaaaaaatcaataatgattaatttgaatatgtatagttttaatttattttagtgaaaacattttttttttcaatcatattaaaatatatatctattctatataannngtgcctatataactgaattcttggcttatgagaaatttatggtttatgagaaatttatgggtgattttttatttatattaaaa

SEQ ID NO: 163791 - DNA, 1202 bp, Cannabis sativa
tcaaatatatagttgtgctcctttcataaatttataaaatttgctaacatagtatttgttgatgctgaaaattagtttagcaacaaatttgtactatgaatttgaattctttaaacaatgattgatcttaattgaaatggattatgctgatttacataatttccactaattattgtcaactttatctctaagtctcccgtgctccaaactgaaaatagtttgaggatggattccaacagagttacgactagtctggtgtggtcaagaattcgtgcttttttttgaacaatgagtcttctatttataggcaagaatgaccgttgcatctttccctttctcacattcggattggtccacgtgaacttgctctcttcatatccttgtgcgcactttctcctctgcctcccctcttcaaactttgcagactctatttcctaattccccgagctctactctgcctcctaagctttctaggctctgctccgcttctcatgtattcctttttaacaaaatggtgtgtttcatattgttcatggcatgtcgtcctaatcctccagtgattgccactggagcaaatattgaaaatgttattgtcattgctggtgatgaggacataattctaatgattccgtttctaataagatagatgttttgaatatttctgaggatgatgataagtctcctgataataataatactgtgactagtcccattactttcccgaactataatggaaaagattttgctagtataagtaaaataataagacatcaattgaattatagagtgcctccagtaaaattcaaataaatcagtgttaaatattgtttattttgccgaagaaaaggacacaaaaaaaaatgtcattagtttctctaaatgaaatatacataatatatataggacaatcttagataatcatgttttaggtatgtgatgtgtaacgccctaatgctaaggcacactacagtgcttttttaattacagtgcagtctttgctaatcaaagaattttcttaaaaaacgtgtcaaattaaaacttttatattaattaacaaactttataatatattaaaatattcacaagtgtcaggatcctgtttttaaacttttaaacttaatattccaaaatacataatatacaggtcgcacagcgactacaaaatacaactcccagatgtcccgtgaccgaacactccaggt

SEQ ID NO: 163792 - DNA, 1372 bp, Cannabis sativa
tcatacattgaaaattctgaacaataacccaaaaaatcaagctgttccttttcattcttaaaaaaaattctggcccactgatgaagttgtttcagtcaacaaagtaagagtttttatagcaactaaacttgttacggtcaaaattattatccctactacataacaaaaaaattacatatgtaacttaaaaaaaaacagaaatatttgaacaataacccaagaaatcataagaaagcttttccttttctttctttctaagaactttcctgggctactgatgaagtttttacagtcaataaagtaagagtctttattatcattaagcttcttacattccaaattaatataaacataacaaaaattcagacaaaaacatcaaaaacagacaaatgggtgttactaaattcacaaattagaaactatgaattcactaaaactaagagttaccttatcacagacaaagcaggcaatactacaaacagacttgcaatggttacaaatcctcttagagctctcatccttggaagccccaccctgagaagcattaccagaattggttttggaatccttgtcctcccatttgagaggcttgttaatcacagaaggcgagtaattaatcaaaccccaagcttctaaaaaatcaaaaaccctacgaacagaaccaacgtcagcaatcagaatcctccggacttcagtaaaggtaatcttcctcgaaggatcagctctgtaatacttaacaatggagtttctcaggtacttatagatcccagggttcttcctcgaatcgaaaaactccgggagaaacctaacctcacattggtgtatagtatcccaagaaaaccatcctgaaccaaatcaaaagaaaagtcaagtcaggcatgaaattgaagatctgtttagggttatgggaagtgaaagattcttacttgagtagctggggacgagggcaacaacaggatcggggattggagttggttccggaggtaagggattggaggttgcggcaggtggtgttggctgtgaggagatgtttgtggaatcggcgacaggagtttcagactttaccggcggtggcggtgctgtcggcggcggcggttggggttcagatgaggggtcttcttcatggggcgttgatttggtggccatgtgggaatggagtcggtggtgaactggtagagagcccagtttttttcttctaagaatggttttttcaacattaaaactgcgtcgttttgatgtagaaaacgacatcaagagtgaagtcctatgttgaaaacgacaacacactttagttatttaacagaagtttatttatattattattatttaatttattttattttttgttaatttaaaatacatgaaaattcta

SEQ ID NO: 163793 - DNA, 1038 bp, Cannabis sativa
atcaattttacctaaaattctacttggtatcagagcgggaatcatgtcaacagactcccaaaatcctggaaacaatgcctctggtcaagccacagctgctactgcagcttccacaatcatgggagctaactcggccaactctcagctccccagccctgtttctcaccattttagtaccctaaaccagccattctctctaaaactagacagacacaactacagcctgtggaaaacaatggtatccaccattgttagaggccatcgtttggatggatacctcaatggatctgtcaaatgtccaccagagtatgtcgatgcaggcactgtcattgaaagtgtggatggtgatgtctcacaaatcatcaatcctgcctacgaaaattggattgtgaatgatcaactattaatgggatggttgtatagttccatgacagaaacaatagctaccgaggtcatgggtgtttccactgctgctggactttggcaagcccttgaacaactctatggtgcacattcaaaatccaaaatggatgaaacaaggacactaatccaggtcacaaggaagggaaccactcctatgattgaatatttgcgacagaaaaagaactgggcagacttacttgctttggctggggaaccttaccctgaatctcaactcgtcaccaatgtcctctcgggtttggatgtgaactatctctctattgtgctacaaatcgaagcaagaaccaagacaacatggcaagaacttcaggagctgctgctgagttttgacagcaaaatcgaaagactccaagccttatcttcgaacaacaaaaactctcacaatctgctggatccacaagctaactttgctcagaaaccacaaggaggaggacaaggaagaggctcgaatcaatactctcaacaacatggtggcagacaaaccaacagaggaagtggaaatagatctagaggcagaggcagatttggaggtagatccaacaactctaagccaacttgccaagtctgtggcaagtatggccactcagcagcagtgtg

SEQ ID NO: 163794 - DNA, 907 bp, Cannabis sativa
ttttttttttttttttaaattggaagattagctagtggttgctaaaagtagtcttatatattcacgtggcatcaaataattaagattataatgggataagaatatataggaataacacataattgttgagatatgtttgagaaattgttagaggattaataggataatcgttgaagctattaggtggttttcttatccctccactttgactaaattcaaagtatcttatatataataagagtggtatattgagtataaacatgtatagggctgccaggtggaatttatttaagtattatagtaattagtacaatagtattattctagtttaaattcaagagtggtgtatggttaaactaactagaataagtttcaaattccaataattaaagtctataaataggaggcctttcttctcaattctaaagtcacgtactaaaaccttcatgcaattttgttaccttagttatttcatcatttacactctcatctataaccacagtcacatcaccctctcactttgttaacatcaaacccaaagtcacatatatcattactattactatgtattctaattactaagtataaaatctatttgacaattattatttctcaaggatcacttcatcgcaatcaagctaggttaatcttcacatttgaggttaggaaaataagtagaaaaacataagtgttctctaaataacattcatagaaagagtgggaatagtaaaagaaaagttaactgaagtctgcctgactctttgttgtttgttatttaatgtactgtataataaatatttgaataagatgtttataagattcatgttatttatgtatatgtttacagtattagagcatgactattgctaaagatatatatttgaataatatgtttataaaattcatg

SEQ ID NO: 163795 - DNA, 716 bp, Cannabis sativa
  modified_base (689)..(690): a, c, t, g, unknown or other
actccaactctgttcttttatccatcttaagccccttgtattctgatggtttctgcaacctcaggcgaaattacaccccgaaaacatatctggccatggttaagggccacacacgagaataagctaaaacagtttgttgaggcgatggtaccttccaatgctctctaccatcttcaggggacatcaaacctagagatggatcaaaaactatatgtcatgagcataatgccatcgattaagattatgctacgaagtctttttgttttttcttataaaaatcttatctctagtatatttatttatttattttgctgaaaaaatttactattgttttatgagattctcttcgagtgagagagaaaattatcagactgaggccagatgatcatcagccttggaaattattattattattattatatgtttagaaaaggtattggaatattattgtgattgtggggaagagcaataatgagtagtcatgatgatatggtacatgcatttttcaatggatagaaatcgtacaatatatgacaaatattggaccctacaacaacttttgatcatgatggctttaccagtaccatggtacagtaacacagggtattaatagtacacatgacctaatatttatacaattgagtaggttgcttagtggtgagcgagtattggagaacattgtcccacannggttaaatgtaaaagtattgagccat

SEQ ID NO: 163796 - DNA, 2413 bp, Cannabis sativa
ttttttaaaaaaaaaaatacctctgtctgatttcgaatgtgaaaactcaaaatatttagaacacgaaatctattatttacatgttttaccttttaaaccaaaatccacgatttttaaaatgatactcgaggagaacgatgaaaagattagggaacataacgataggctagattgagcagatgtctctgctcattacaagcattttatagatgagattattgagggcaagctccgttgtttatgagatgcagcttgacccgagctgcattatctaattaaatacccttttgcaagaccttaatttttaccttctgttactattcttaaagctcataagtttaggttgcccctttgtggctgaattccccaaacccttaaatttaatttgtggctgaattctttgagttaaaagtcacttttattgcccctatgtagggccttttttaaccacgtgtgacactaaacaagaaaataacttcgtatgttgattcgtaaaatgcgacgagaaaaatttctttccccttgatttcttcaacataaaatttgaatgtagtacaactaattcttctcggagcttggagtgtagaacatattcgagtcgggactatctcccgctaaaatattaaagatttttataactatgtgagtattgtcccttttaagttaattccaaatggatataaagttatgccattttgagttccttttaatgccataatatttttaatttaaaattaaggtggtaaaattaaaaaataaaatattaatttttttgaaataaaaaaacattaatacaatacaaaaaatacaaacgctcaaaaatagaaaaacatatttatttagaattaaattttaagataattacaaatagtgcatagaccatatttatcaactgaagtaggagttaaattctcatttgtaattaatgtggaacttacacaatagctcacaaagtagctaaaacctaacataattcttggttttgtcgcacaattaaaactttcatacttaaaacacatatgatcatttttttctaaatttttcaaaattacattaagatgaactcaaaaactcaaacatagcaaaggcttgcaattcttagtattataaggtgattcacaagcatattttttttagtattagacattagtattttcttgaatacttcccattgaattgcacaaaaattatttttctattaggataacaatgcattttttcaatgtgtgtggtggtgcttgctagtgattataaggagttaattttgtgggtagctagcaacattttcaacttttttgatccgctcgttggagaagctataacttgcttgttcgccctggaatcagctattagttggagacactcttttgtgattattgagagtgattctgagacggtgatcaatacactgaaggaacttattctgtttagggtattaggaacaatgcgcttcattgtaaacatctctcaagtttttttactagttgtaatttttcatttatttctagactttgtaattttacggcctataatatagtcaagtgggcttttacctgtaatgtaacaggtatggttgactcgtcctccataccaaataacttattctgtgatgaccgtgagatctaactcttttgcctaatatatatatgctttattcaaaaaaaaaaaaaaagatatcctctatatatatagtcaccaaccaaagcaaaacaaaacatatcataccacattgtacaatatgccatggtatcatcccatatcatatcatatcttactacgctacaatataccataccataatattaggggtgatcatccaattcaatctaatatttttctcttaatttgatccaatctaattagtatttgaatttataaaatcatcatctgatccaatttaattagaactcaaaatccaatcaatttaattttttaaatggatatctaattacacacttaatttttaatattattttaaaaacatgaagaaaaatacctaaaaaattatatataaaccttcatttaagtttaatactgtataaatatatcatccttacaagtttaatgcaaccaaaaatttgaaataactaaaattaaaactcaaaatccaatccaattttggattgaatcaatgttttaattagatatccaattgcatgcataatctttaatgttatcttaaaaacacgaagaaaaatacctaaaaactatatataaaccttcatttaagtttaatattatattgctaattcagaaattaagactagatttctaagccacactcgctcgctagattggcaagaatgaaaaatttgttaagtagagagacacatcaatttatgataattcacccctatattgcgatagtaatgggattacgtctacttcgagtttttatttatcacgagatggt

SEQ ID NO: 163797 - DNA, 1543 bp, Cannabis sativa
  modified_base (1493)..(1505): a, c, t, g, unknown or other
tgatggacttgaaattgggatgctagtttaatgtccaattttgttggactagaatctacataatttttctaaaaaaaaataataattaaatttaatattataaaaataaaatagaaacaattaataaatcatggataaaaatcttttaactatatataattctaacaaattaatttaaacgaatatatataattccaacaattttttataaactaaaaaatgtaaaaacttaatattcatttacactgaataaatttacactgaataagaaaataaattttacaaaatgaaaaatgaaatgaacataaaaaacttaattgaaatagttaattacaaacaaaatgccattgttacaaaaacaaaataacactgatgtggtttggacaatttttacagatcagcaaaaacaatctcgcccgactcagatcagcagccacgaaccttagctaaaccggccagtaaaatcaacgacgaacattaaatagtgacttgaacctgacgttaatctgaaaccaggaacgtcgacttgaacccgcaccatcgacccctgtaaaaatgagagagagagagagagagagagagaccaagagaatagaaaatagagatcgacatagtgtacttactttatggggcttgttggggacgggaacggcaacggtcgtccaacgttttgtgcacagagacaaagagaaactgatcaacaagcaagaataacggttgtcgctcgatttccacggtcgtcgctcgatttccacagtcgtcgctcgatttccaccattgctgctattactcaactccggtcatcctctagcttatgtccgggaagagccactaagaacaacccctcaccatcgacgcgaagagccactaagaacaacccctcaccatcgagaaccccttcgcgaacaaccgagagagataatagcaagaataactatgaaaaaaaagagatagaagaggcgagagagttgagtttcggattgagattgagaagcctttgtgttttgtttaggtgtgcggctgagtttaggagtgcggctgagtgagaataagattaagaggtagggttttctatgtttaaattggagagagaataagaatggttaataaattacattaaattatttattgtataaaaataataataataaattactattaaaatataaaatatattttccttattaattttttgaaaactctcgtccagcatcaaagatggacgttcttaagtattttttttttaaaaaaaaagaattattatttaaatttattattgtatcatgtccccacttattttttatgtccaatattgttggacataatgtaaatttttttttatgtccaacaatgttggacttgaaaactccacataaccattttatgtccaacattatttttgttggacttgaaaaagggacatcgaaagagtactttgtagtagtctcgtaataggatctgaaaagttgaattaaacacaaccttttctccannnnnnnnnnnnnttaatcacaaaatcattgataatttgaaattcctctct

SEQ ID NO: 163798 - DNA, 991 bp, Cannabis sativa
cattctttgtttaggcggcgagatatacggatcctcgggatgcttgtgctgccattgctggagagtcttacaagctatggttggagcatgaaagccggacagatgacatcacaatcatcattgttcacatcaaaggcttgaatgtatgacctttgtaaatttcatttggtcgcatattttaacgccttctgtttttatttgcccagggctgagttcactttgatttgtttgtatatttcattataatgctttctggtacatgttgcctacaaattcagggcttcactgtggggtctaatgctatgaattgggtcttgtttaaataatttctttttgagaggcattttttgacctcatatatatgtatgtagtttcatttaaatctgatttagttgccttcttcccgcaagatggaaagtggcacagtctacagatgaattgaacagtgatttttctttatctaaatttatatatctacatatttagcacgaacagaactaaaaattgtgtagtgatcactctaattatccattagttacttgtctaccccttgagtgaattaacaaatttattattttaaaaaaacaaataaccagttgtgagagcattgttattctgtctctttccatttgctggattgaatagctaattcttgttctgtttgctttagtcagcaactggttctgcagatggatcaagtggggtcaatggtagatctgcattaagaaaagggaaaggaactttggagatatctgctaccacaggatcagaagtctaccgttcggtaagaaatgatttctcagatctacattcctgtcagtatcatgtttcaacgaatcgaagtccagccattgttgttccatcaccaacatgtcgaaggcccctggaagtggtgggtctcttgaactttgtttaggcttttctgtttctatatgttttctatgacatgatggtgggcctcttaaaaactgtattatacaatgtatctgac

SEQ ID NO: 163799 - DNA, 1261 bp, Cannabis sativa
aatctgatctaatccgaataagatgaattagatctgatccaatctgaataattcgaataatatttgatccgatatgggcagttgatctagtgctgcggggcggggtggatcattacatgatttggaacgggtcaaatcatagctggactagattcgacccgatacatttacacccctacttttggctaaccaaatcactagcggtccttttgccttgtcattttggatcggtagctctttaggctcatagtggatctttttggctccttcttttggatcaattattgaatttggatcgaatccagtccctgagtctaggtccaggtctagggcgagtctaggtctgggtctaggtctcagtcccaagtccggttccaagttgtagatcgggtctaggatccaggtctaggttcggatcaaggtcttgggtccttggtcccgtgtctgggtcccgagtctgatctcaggtttgcatcttgggtttaagacccttcccaagtctgattcccatctcgggtccaagtctaggttcgggtcatgggtcttaggttcgggtgtgggtcctgggccccgatccaattccaggtctcaagttcggtttcggtcttaggttcgggtttgggtcttggtccgaccttgggtctaggtctcgagtccagatctggaaactgggtgatgggttcgagtcagggtccgggttcgggtgttgaattaatatttttatatttaaatcggattggatcaaatctgatttggaaaaaaaaattaggtaaggcagagcaaatttgatccaagatcgaataagtatcctaatttttttgatcgaaaattatccgtcagattggaactctttcccgatccaactatatagatctttttaaaatgcctttgcttcacatctagttttccaagacgtgaactggacatgattttctctaaatggacttagaagaccaatcatgtccattttttttgtagtagtgtcttttgatatgttttcattgcaatgtaagtataagggaaataaaaacaattatactatgagcccatgcatattatttcttgaaaaacattcataatgtgggactctaagattaaaaaataaaattttttaattacacaccaatcatgcaagaatatttttctgttaattacttataatttttttcattgtaataaaattaatttagtcttatactaatatgagaggtttaattttaggatttttttattattattatttttacattttaaaatagtt

SEQ ID NO: 163800 - DNA, 1300 bp, Cannabis sativa
attttaaattatatatcctttatatataaatatataccatgtgtattaattttttaaattactatttttttttctttaaaatatgaaatatatatttataactttttaaatatatataaatagatgtgaattgtattgaataattacatttgtatgtaaatcaacatttaatttgcataagtgtaagattttagatttctcaatccaatcaaatatgtacaagtacagatattcacactttgaggattagattagattggatcctgcagattagattggattgagtattttatgaacacccctactattaagggccgtcatagtttttaaaaatgtaaaaatttcacaaacagacaaaaagggtaaaaaagttaacaaaaatacgtctacacagagtttaaacttttgtatgttattttctgttttatttacaaaaaaaatatggtattagcttgatcgtccctttcctctcttcttttctatcgagaaaaaaagggcagtgatgccattgttattggacaaagctctctgaaaactacaatcaacaacaacatgatacataatcctaaccaaatatctcaattcgattaggcagattgaatagcacgaaagaattcatcaggaaacgtcaatcaaacaacaagttttttttttttggaaaaaatctgcataaaaacaagtataaacagaaacacaaaattacaatgaatagggtaagatctatacttcataaactgaaattaccatttcaatgttaaagataataaagaagttgttaaaaaattgttggttggagcttcctactaaattcaaatttagattttaggtatagtatgggttgtatttaaaactttagatttcgggtgtcagaaatttttcgacacgaatagtcatggccgcagcgagcaaaccgcgacgagaggccaaatcctgaactgcgattttttatctttttttaaaagatgagttatcttttctttcagtgagatattttctagtactataaatagttacttttaggctacgaattgagcgattcaaaagctacaaattagagagagaaactcagagagagagagagcaaggaagagacgatgatggacttcaaagtgttcttcattctggttcttttcttctccttgtactcttaataaatattatgattttcattataatatctagttctcagtagtgttcttttagtgcagggttatttcaaaactcaagacatgaattcttaatttcattattgaatgttaattttaagtttccattatatatcaaactgcttctattcttc

SEQ ID NO: 163801 - DNA, 2336 bp, Cannabis sativa
  modified_base (2297)..(2310): a, c, t, g, unknown or other
gctctgcttgggtccttctccaattggtttgtgttattgtctctagtagctatggaatcggctgtaactctttattttcttatcttgtatgtgctttagttttagtcactggggtcttagttttttttggagttggttttttgcaacttcaaggttttgtgccttgtctggtgttgtttgatgccagttatttggttttgtggcttgtgatggtttggtgtgaaggggattggtttttcttgtttgacaatgaatacaacagattcatgaatgatattttcttttaagtgggttgtgaaaatgtgccctttatgggaagttgtttctattcgccttcaagggtgttcaatcttgaggatagggcagtggttcatctccattctcttgtatttgttggctcattttgtgagtctgctcgatcatgagcttctttacattgagagttttggagtttggcacaaccaagtcttcaagagtccttctcctttcattattcttttttcaatgaaggtcctttcttggaattactgtgggttgggaaacccagagcagataaggccttaagggatttagttacgagagaaaacccagatgtttttttttcttatagagactaaatcgtacacctctagaattacattcctatggcaaagctgtggtttttttttttgagggaaagttgtctccactattggctcttcaagggatctttgtttatgttgtaaacatggtattgatattcatgggatctcttctgaaacatctattaatttggccaaattttggaataccactattgttcagcttgagtggtttgttgtgtttgtttatgggttgcctgtgcgacaagaaagagatcaatttaggagctacatgactgaaaaaaatactagctttaaatggttcttgggcttgtattagagatctagatatatagtcttactcattctaataaaaaagagggtgaccaagattttactctcaatgagggtcaatgattgaaaagtttccttttttactgtggtggtattgatttaggttgtgtgggatttttctacacttgaacaaataagcaagatctagcaagcttggtgtgtgaatgacttgataggaatctttgcaaccctagttggcttgaagctttccctaaggctggggttgtagcaaaacttatcacccactcagacaatgctcctttaattctcgatcttttcttagatagagaattggtgaggtcccctttccgatattttgacgtttggagcaaagacctgggttgtcttgatgttattaaagaagcttggaaaattgaagctcatggggcagcaagttgctgtcttatgctaaaattgggggccactgccaaggctcttcaaaaattgaacaaagaagtgtttgagagatttttcttaagaaacttaaagtcctaaatgacttccttataccaaagtccaaaattgacctcctaatgatgctaatgttgaccttgaggcgacaatctagttagaaatacaagaggttagtcaaagacaatctgaaatttgggctcaaaagtctagagaattgtggttaagaaataaagaacaaaattaaaaaaaattccacatgtacacccttgttaaaagaaagtgcaaccatatttgagaaatttctgataatgaccaagattgactacacagtacgaaagagattagggagtactttattttccagtttaaacatgtgtttaagtctttaagactaggcttctgccctccccttgctaccctaatctaaccatcgattatggatgagatgaatgttgagttgatatgtatcctcttagtgaaagagattagaaagactctctggtcgacacctcctcttaaagcactggggcccgatggcataccaacaatttttttaaggatcattgggatatagttggatcagatgtggtgtgctttatccaaagatttttttggctttgcaaggtttgtcaaaggggtgaatcataattttgtggtcctcattttgaagaaagacaatgctaaaaaatgtgatgatttttgccctattagcctttgtaatgtcatctataagattgtttccaagattcttgctaataggcttaggcctattctttcggagttaattttatcgttctatctgcctttgtgcccgatcagtggatagctgagaatacctttcttgcacaagaaattgttcatgctatgtccaaagagagcaagatcatgaaatttgtgggtataaagcctgacatgtctaaagcttatgtgttggaaatattttaccannnnnnnnnnnnnntaccatgtatgtttcattaacatcct

SEQ ID NO: 163802 - DNA, 2654 bp, Cannabis sativa
cagtgccaattccttgaattgcacgggccttgttgttccctagaagcactgttccactgttcaggaacaaaatattattataaaattattcaaaaattatatatatatatgattttaatataaaattttatatgttatccctcaagatcgatttttgatctcttttgttatggtatctaatgagatattttgaaaaatgatcaagttttagtggaataataaacaacataaattaatgtaagaaaaagataaaattatattaagcattgcataacacatttttgtataaactttcaaagaaagcaacgagtagaatataccaaaaaaattcatttgagttcatatggtatctacaaagtctttcaatcctttaggataggataccaagtcataagattcagtaaacttttgtcctccacgatctttttgaatccatcaatacctcaattcgtacccccaactattttgcacaatccaattgtagacatgtattctccactagcttgttctctgtttatcgttctcttagagtttttgtgaaatactacggcctatttgtcttctcccaccttcaataatgcatgctttctaagaagttattgataaaaaaactaacacattcaaaacagaacaacacgtacttgaacatgatgataccgccgatgaaggtgacccatagagcggcaccccaaacggtggagaagcaaaaaagattagccaatttgatataggtgaagatttttggtgaatggtgaccgtcgaacttggatctaaagctctctggtgagaatatcactccgacaactaaaaaggtcaccgcagtgaggaatcaagataaccaacccaacaagattaaccctttgttaggaaagaaaattgggaagaaggaaaataaaaggagtatgaagaattgaaagagtagggacccaatttgttaagaaaaaaaggttttgactctgtttttaatttttaatttgacttttatttttattattaactaggcaatataggtgagtacttttttttagtattataataaaaataattatttattaatataataaataataaattataaaattaattataatatataataatattaaaattatattattgttatgaaatactatttatatattcaatctaatattttttttatgatattgttataaaattattcaaaactattctatattttgtgcttcaaatttatataaaagtttatatggttcctctaataataactactcgaaagttgttgacatgctaccgtctttatttttgtgaaacactatgacttatgtgtcttctctcattttcaagaatgcatgctttctaaaaagttattgataacaattctcattttctataatgttggtttatatatactccaatatctaaattttaggttaaaatttattcatcattattctttttcatttcgaggcagtatgattattttttaatgccttttgcattatttacatatacttgcactgatagtgatttctgcttataaggttctttaaataggaaagttgcagctacaaatatgaacagagatagcaatcgttcacatagtgtatttacttatgtaattgaaagtagatgggaaaatgattctacgaccaacttaaggtttgctagactaaacttggttgatctggctggatcggaaagttaaggcaacatcatcaggcttgcttcagtaatttgcatgacactttccccactcaccaacttcttccccttccctaaaacaggcagaaaacctctggtgctaagggcgagcgtttaaaagaagctgctaacattaacaaatctctgtctacattagggtacttattttcttgttacattgacaaggcttgatatttgagacataatgattttggtcttattctgttgaagaccaagtcacaataacggtatgtgataacctcacttgagggtgctttgtgcatgcacccgtggtgggcacaacaaagtcgagttcgtattcccctctaatgatcagagaatgagatcttagaaggtcactcatatgtttatcaactgtcactttttcatgtcttctaatagaaaataatgggttgtttggtatgtaggtttcatttcatgggaataggtttaatattgatgagagagtgatgaaggaaattataaacctaggaaagcaacattattgtgtttggttatgtgcagtaatagttgacgtaggaatggaatgtgacaacttattttttacaataatataatgatatgattattattatttttttttttttaaaaaaaaatactaataatttaatatattttttttctttttaaatgttcaaaataattttatttattatttttcatataattttagaacaaaaattaacaataataaataattataaaaaaaaataaaatatacatatataggaatgtcaatcggaccgggtcgggctcaacccggcattgacccggcccgacacgatatctcttttaccattcctatatatatatacttgtcacaacaaataattacaaatttgttaataattttctaagaatcaataatttaaacaacaataaaagctctttaacacataatagtataatccaaatattgattaaaattttaaattctaaaagtttgcata

SEQ ID NO: 163803 - DNA, 1526 bp, Cannabis sativa
cgaccactttaaaagttattaattatttttttgaggcgaaataataagtatacatgattaaaaaaatgattaatgtaatttcttggatcatttgtacttttcgagccttcctttgtaattgtcattccttaaatttttatttttgagtcataatgacggttaatttttttctataacgaaaaattcttaaccctatacctcattcaaaaaattttatttttgtgactcattgtgccatgattatatacatatatgatttttaattttgtgggatggtaataaaaaagaaaaatacttatgggttagttgtttatgttgtaattcgtgagtgatctctttttccttgaaatgttgaaaaaaaagagagaaaaaatacatatttgcaattattataaaaaagagaaagaaaaaaataaaattgcataaaagaatttacaaaatataattgtgggagaaatagtaaaatcactgtgggaaagaagaagaatgaaaagataggtattttttaaattgtatggaaaatttaggagaagttgaaagaatggaatcgatgtatgttatggtgtgatttaaacttaaatatatctttctcatctacatttatgcttacctttacatcaagtctaaaaatatattttgattattgatcattatgtacttatattagtggaaaattattgattaatgcttatggagtgaatttcttttgcttaaaaatatattctgttgtataggaactgatttaaaagagaatgatttgacaaatatagataaatcttgatatatttgagttggtgttataattacgtgcttcttaaatcatttttgaaaaattaaatagtgaacttcacgtgggattaagaacatggaaatctcacttgtgttggcattatttacttgggtgtttctgagagacaatcaagctttcgataagacctttatttagttattttagactaatttgtgttatcattatttttacttttgagtttttgttattttaataatttactaagggactagcaaagttcaagtgcaagggaatttaataagtacatatttgtctattaaattatgttatttttccttattattatcatcgaattaattttttaaatatttgattagtttgattttgatttgttattttggaaggctaatcacatgtttgaaggattttagaatagttttagcacactttggtggaaaatgtcaattttgaagaagctcagttttataagatagaatttgtttgcatattttgacgactttgcaagcaaaattggattcagagatgaacataaaagttttagatttcaatctcaacattttaaaacattttaaatcgtttaattctaagatatgttaagaaagttatggtcgatttactaacatagtacatgacacatttttgcatgggttgtgacacaaatttcccaagttgctcgtgtgattaaaggatagataattattaagttataaaattactattttatctttataattattttttaataatatttatt

SEQ ID NO: 163804 - DNA, 1354 bp, Cannabis sativa
ttatccaattacacaagggaccacacacaaactaaacagccattagcaatacaaaatagtgatcattagcacatgactaattatcatcaagattcttaacaccacccttcaagcgaaagggtgattgtttcactcaaagcttctcagtaagaagcttgaaccttgagtgcgagagagctttagttagacagtcagcaacttgctctgaagagggcacatatctgatgtcaagtgtcttttgtagaactttgccccttacaaaatgcaagtccaattctatatgcttggtgcgagcatgatagactggatttgatgcaactgcacttgcactttggttgtcacaccacactatagaagttgaagacatgggaaacttgatttcatttagcagtgattccagccacattatctctgctgttacatgagccaatgctctgtattctgattccgtactgatcttgacaccacggactgtttctttgaagaccaggaaacgagtgtgtctccaaaatacacacagttgccacctgttgattttctatcattaggacaacaaccccagtcggcatcagaatagccaacaagattcagactgttgcattactgaatgtgaatgccgtgatgttgagttccttttaagtatcgtagaattctcttggctgcactgaaatgagttgatgtaggacatttcaagaattgaattaacttatttactgcgtatgcaatgtccggtctggtgtgaatcaggtattgcagagcaccaatcaaactcctatattgtgttgggttatcaagctttgtaccatccaacaaagacaatggctttcccccaaccatgggtgtaggacatggtttagtgttcttcatgttaaacttgtttagaagctctgcaacatattttcgttgagacaaatacattctagaactgtctctaaagacttcaattctaaggaaatagcccagagttcctaaatctttgagggagaaggtctgattcagctttgtgataaatttcttaagctctgtagtattgtttcctgtgataatgatgtcatctacatatacaagagccatgataattacttgtggtgtcctgtatatgaagaatgatgtatcagctatggaaggctgaaattccacttgaccagagttgttttaagtttatcaaaccaggctcgaggtgcctgctttaactcgtaaagagacttctccagtttacacatgtagtcaggtttacttgggtctacaaagccttctggttgtgtcatatacactcactactacaaaaatgggttttcccgacgcttttaaacagtcgtttaaagtattttcgtcggtttctataaccgtcgcc

SEQ ID NO: 163805 - DNA, 1247 bp, Cannabis sativa
aattcaggtactataaactccccaaaatctgttttaattgtggacacttgggccatgataaaaagatttgtgttagacctactgtatatgcttttccaccggaggggaaggcagtcccagcttttggtttatggattagagcagagtcggcggtctttagttgcttcaataccaggaatcaactggaattcttccgagaagggagggatgccctgccaccgaagtcctcatcggtccggcatcatggaaaccctacggtcagcccgtccattccatgctctggcaaaggaaaagcccctatcacagatccccaaatcactgaccataggcgtgcccctattgataaacctgcaaagaaaatcatacaagttcagagcaattcctcaggtgccatttttggaaagaatttgaaagtggtggaaaagtctcctttggaaccaaggaatagagccgttataccttcaaaggaggacacgacagctatcacaatcgagaagataaatcgggtttgaagagcaaggtcagcttcccctagggctttgcacagaccaaatgcgtataagagtgatgctgatcgagaaaatgagattatcaaaaagttttcctctcgtccttgtcctaaccctatagacaatgggattatcaccactatgatggctaacttagggcccacctataaccagataattgagaaacctcatgtggagttatgcaaatctagacagccccacaagcatcctgagcccactcacttcccctggcccatttatgctagtgagattggtttaactgaagaattaatgggccctcctgctgtggaaaaatttgagcccaccccaacaatatttcatgacccacttgatgtaacagatgaaatccatccttgccctcagcccaggaaaagaaaggcatccttgactcttattccatatgtgcaaagaactcctgaaaacatgtgggagtttgaggcagagaccccgaccttaccacctttttcgcctagcaatagtaacctgagtttcaaggtaggtaacctcccatcctcttcgaactccaagaagcctagtaaaaggaaaagaatgaactccagatcctcaagagcaagcaaaggatcacatgaaggaagagatgcggaggccaatcatattctcactgagacccaggcggtggcaagaaacttagtagatgatttaaaccttgttgaagttcgagtagatagtgttcaaaattttcattcgggcgaggag

SEQ ID NO: 163806 - DNA, 1487 bp, Cannabis sativa
aaattatctactcgaggtttaacacaaatctgtaggaaatcacgccaaacaccccaaaaaatgttaggaatagatttgacaaaagtaccaacataattcccaataccttttataattctttctgacacaaattgactgttatattatgcaattgagcccatagttccgaatttgtaaatggcacaagacgtgaattatctcctggtttgacacgttcaaagatcaaaggtgctcgatcaaacatccacgggctaccctcaattactctttcaacatccatctcatgataaaattaaaataagatagattagggtccaactccttaacataaagtctccgaccaggctaccacaaaaaagctattttgttctacatagcttgaaaattaatggatcggttagtgaaaaaacaaccaactagaaaccatccatcatcaatctcagataagccttcaactcctgcatcaaaaagaaggccctcatcatcatcatcatcatctatcaaataagatgcgaacttcttttccaggtttaagccttgggatttttttaaatccatgataaattagagtaaaggaatgaaagaaataaaaatcacaacaaaagttgaaatcttcagaacgactcaccaaccaaccatggcataagacaagacttttaagcacacaataattgggacatttcttaactttatgatgtaatgtttaattcttattggaagtgagatatacatgtaaatttactacacctaaatagtataaaatataacttctttatgtaatactagttggaacaacacgtgctacgcacgtataattttttttgaaagtaaatatagaacgtttattaattttttaaatcaaaagacaagattgtaccttaacaggaacatcacccttgttgaacactcgatccagaaaagaacaagatgctctagcaagattatgatcaactatgtaagcatatcatttaataaaaaacaagaaaatattatttaaagatgcatgaagtttacgacaatcatttaatgaattttgaatagcttgtactactaccaagcaatctgactccagctctactttttggtatggttgagttttaatccagcatagcatgtgtcatgtaatgtacttaatagtaaaataaatctcgcttaacatattcaaaataaaataaattatcatatggtcattagtgtggcactcacatgatagatctaatggtgtgcatcaaataggttatgcgtatagcttatcttgcaaaaaatttgctccaatatagtatttttaaagttatgccaagattgatacattgcaaaaattatactaaatttagcacataatatagcataatctaaaatttatattaactataaatacactatttttatttctttctatatttttttaatattttatatgactaggccataacgttatattataaactatttacattcttctttattgttttagataataagataat

SEQ ID NO: 163807 - DNA, 1800 bp, Cannabis sativa
ggctcatcatgaatcgtcgtatgatgcttggtgtgccctggctcaaaggttttccagtcaatcaaaagctcgtctccttcagatcaagtctcagttttccacaattcaaaagggtaatctttccatttctgattattatgataaagttaagttgttagctgattctttgtctactgctgatcatccaattgaagaaagtgatctaataatgcatttattaaatggcttgggacctgaatatgatcctgtagtggttcatgttgtgagtctagttgataatctttcatttgagtctatacaattgttgttgataacccatgaaagcagactcgaacgacactataatgtcactgatctttcctccaagatcactgccaatctaagtgtcaatagctcaagaaatgtcactagtgccccaaatcgttattacaattcttagaataggggatcttatggcaacttcaccagacttcctcccaggaatcaaagagttggttctccttcaattccacgattgctatgtcaggtgtgtcacaaacctggccacaccgcagctatttgccattacaggtttgacaagaattatgtcaccccaaaaattggagaatcgaaggcctttcttactgaaattgaagatcaagatcctcctcaggcctactcttccaactctataccagaatttcctgaagattatgattggtatgctgataccggagccaccaatcatgtggcacaaggaatggaacaactggattctgaagcaccatacaatggaactaatgctcttactgtaggcaatggcaagaaacttgctatatctcatgttggtaatacctctctatcctcctccaatcttcctttaaaattataatctatccttaaagttcctagcataactaagaatctagttagtgttcttcaactcaccaaagataataatgtattcttagagtttcactctacatgttgttttgctaaggacaaggttacagggactgatttgctcaaggagagggttaagaatggcctatacacattatctcaccgatccttttccataccagaagttccacttcaatgcaatattgccacatctacacctaggccacctatagcacctactcttagttcgagattagatacagatcccatttgtaataacatagctgctacatcagctatcacctcttgtaatgactctttcattaataaagacaattcttttcagtcttctctttctcatgctcaagctcttacattacaaaaatctaatgttaatttgtggcatgtgaaattgggacaccttgccccaagaatccttgtaaaaattttaacacagctgcatattacacccaaattaaaaaacttctaattttgtgaggcttgcaaacaaggaaagagtcatagattaccttattccctatctgagtctagagcaaaccaacctcttgaattggtgcatactgatttatggggcccctctcacacaccctcaaaagatgggtatagatactacattcatttcctagatgattttagtaggtacacatggatttttccccttacaataaaatcctacctttctttagtataagtcacttgctgaaaaataatttagcttgcccattaagagtgtccaatccgattggggaggtgaatataggtctttggccaagtttctcaaccaacatgggattaactttcagcacccttgcccacatgatcatgaacaaaatgggcgtgctgaaagaaagcatcgtcacattactgaaaccagcttgacactacttgctcaagcca

SEQ ID NO: 163808 - DNA, 992 bp, Cannabis sativa
cagaatgcataaacatgtcataatgaaccatttccatgcaatagaatctcagaaaaacacaaaaatatcaaaatcaccattgttcaaccaagtttgagttcatgaactcaaacttggtcaacaccacaatcaaaacacaaaattacttcaaacaaacataaacaacctcaaaataacctcataaaactacactaaagttcatccaacttaaacagcaactactttaacaacgtgcatgcttgaaccttaatttcaccactaaaacaaaggaaaaagagttctaagtttctaaaatatttttaatcactaaatatataaagtaaataattttatagaattacattcaatttcacataaaatttataaagtacaaacacttaacttgaaaccattcaaatcacatctaaaataattataatcattttaaatcatctttaacatgaaagtaaattgttaccataatcctgaggccagttgtgatttattttaccaagatcttaatttactaacatgtatgtttaatttttacataaatgatataatatcctaaaatatgaaattaacaaaacgatcaaacaacacaaaaatagtttaggatcctcacattgcttccagcggaatattgtgagtctttccgttcaatcactctaaccctagattctctttttgtagcagggtattcctaagtgatgaacctggattgcttccttgaatcgacaagtatcaattcttcacgatcatccataaagatctgagtactaccttgaatagtgtgggttggcactcaactcactgttggaaaaataagagagagttcaaattttagtgttaaaggaaataaaagcttttctaacttttttctttgaatcacttagactagggttgttagacaaagctttatcatatttcttatataggctctcaatagggttaggtttacattaaatgggttaattaaaaaacaattgggctctaaaatcactccatggtct

SEQ ID NO: 163809 - DNA, 1902 bp, Cannabis sativa
tttgcaacagaaaaaatttatctagatcaccacttttaaagctctcatgtgtcctcatatagattttctcttcaaggttaccatgtaggaaggttgttctaacacccatttggtgaatttcatagttacaccttgcagttttggccattatagctcttatagaagcttgtttgactattggtgaattttttttattgtagtgtaccccctctctttgagttaaccctttggcaactagtcttgccttgaatcttcgatcttcaaccccttgattaccctctttcactttcattatccattgcaatctacaagcttctatctaggtggtctcttgactaggatcaaagttttgttcttgattagtgatggcatttcttcccaaattgctagaagtctctttgtaccatctttgctatttatggcttctttgtaggaggttggttctgtagtatcaatatcatctataataaacaatgcaaatcccatgaagtctgcaagtttggaaaactccaatctatctgtacggtaaatccctcttctttccctatctctggcaagttgatatgtctcaagtccaccttgagatggagaaggttcagtggatgtagatttatctgatccctcttctgacccaattgtgtcatggttgatttgaatatgagttctaatattgtaacctgtactttgtgcatttgctttctcaagggcatttcctactcactgaagatggcatcctactagtgatagatcttttgaaacattgttcaagacaccagattttgtaaccttttacccccatcagggtagccaagaaataggcatttgatcgcccttggttagaacttgtcctgcctgatgtgaacatagggagaacacccaaattccttcaggtgatcacagttacaaaccctacaagtccatttttattgaggtgtcttgaaatccaatgcaatagagtgacacctattcaccaagtagcatgctgtcttgacagcttctcccgaaaactgtctttccaaacgagctcaaattaacatgcatctaactctttctataaggattctaaacattctctctacaacttaattctactgagcagtctttagagctatatgatgccttgttattccttccttgacataatattctttgaacaaacatgaacaatacataagaccattatctgtcttatgtttcttgatctttttcccaatatgattttcaattaatttcttccaattcataaagatctcaaatgcttcatccttacttttgagtaagaacatctaaaccttccttgagtaatcataaattatactcaagaagtagcttgctccaccaagtttctttactcttgatggcccccacagattagagtggatgtaatctaagggttgttttgatgtgtgcatgccagttgggaatattatcctacaacttttctcaaagacacattgttcacaaaaatcttgtttcccagtttgtttacctttcataatcccttgcttctcaagtttagtcagtcttctctcactcacatgtccaaacctttgatgccaaagtcttgtttgaccctttaatttgttcatgttagctccattctcaaaacaggtgcctagagtggcaacaccaataacaatttctccaacaagatagtatagaccatgtttgtattctccatttatgactgttagagatccttttaaaaccttgagatgattctcatcaattttgactgtacaacctttagtagcaagggaacaaatagaaattaactttttcctcaggttaggaacatacctgacatttgttgatgttctttgaacattatcatgcatcttgatgatgattgttgacacaataatctggactagacttctaagccacacccgctcactagat

SEQ ID NO: 163810 - DNA, 4438 bp, Cannabis sativa
  modified_base (1779)..(1779): a, c, t, g, unknown or other
taaaaaatgatatttatagatatagtactaagcttggtgtaatgattaaggtagatgcaaatatgttagagggtaaaggttcaaatcccactaactacactttatatttttctttttcaatttatttatgtcctccctccttttacaaaaaaaaaaaattacgccccctctcactttaaattcttggtccagcactgattacaagacataatcattcatgttagctacctctattggtggggggatcctcatctattctatttcttctaccgttattagaggtgaccattgctttttcgattgagtgattagttttatggtttactcctatgaactctcagctttaatttgttgcttctctaataagatcgagtatatatatacttagttttagacaaataataaaaataatatattatcatttgaaaaggtaaatttaaataaatatctactaagcaaacaaaacctagaacttgagggagttaagttagaaaagcaatcaagagaatcaaccacatgccattgtataccaaagttccacttctcggagctgttattttggtaagtccaatcgttttagagtagtatgcttatactaatatttgaagggaggacaattctcaatttggcaaatcaaatagcatgtacatataataactcagcactaatatgtaaataagttcaccatgtagcaaaatatgagataaaatcaaaaatttatcatcaattactttgaaaaatctagcaagaggtataagcattgatttttccagaaaaatatttgataatatgaaaaattaataatttaacattgtaacacgtatcactattgaataacctaaatatagataactttaaaaatagttgcatatttaatattttttattaaaaaaaaatccaaaaattatctatatttgttagcttttttttagaaaaaaattaccaaataaatatacaaacttagagagaacacaccaaaaacatcaaaaagagttaaaatcaaaatttagtttattatttactacatatacatattaaaagagagaaaaagaaattagtaggaccaagacaatggtttgccccttgtgatactattttttgtgtaaagacaaatgtaccgggttggatggccatccaacctggttcttatctttatttaatgccccgcacttttatgtttgaactttaataaataattgtttgcttgcgttttactcacaatttaaacaatcatattttgatcatatacaaagtacttttggaaatttccattctttgtacatttctttaatattaagtagttaacagtctactataccggcgaggagtttattatttgccttgcttttattttgtgagcagttatcaattctgtgtcgtaaaaactgttgtaatccatttcaagcaaacttgaatatacttttattgatcttgtcactttgtatatttttgattatttaaatgaatagttagatcatttattcatatgttggatttaagtactttttccaagacgtcttgatgtctcgtttaatactttcatatacagtgcgagtcgttaatatttagcttcacttgcgagttatgagttatatctcatttataatttttgatttttttttctcgtcagataggtttttaatcagaaagttataattgttcgatctctttctcttcagaaaggtttgatcggtaactttaaaaaaaaaacattaaagtggtgggtatgcattttatcatgtatttctagataaattctggttaatcatacacatatgnccctcaagtaattttaaagggttacacttcataattacttaaaaaaaagaaatgattaactttattcacgacagaagttcaaaatattatatcagtgatgtgagttacaatcattaatttactggtagtaaaatcgcaattgttccacgatccttactatcgtttcaatcatgtaaggaccctcccagttgaattgattattttctcaaccttcagaagcatctggtttttataaaacgggttttgatattaagggtcaattcctatcatatccccatggctccaggtgaactgatcctagtttgccctaaaataagtgatcatggcttcagttgtttgtccttcttttgtcaagactgccattagctagtgactggcttttttgtgctgcagctctatgcgatagcgattgcgagctagcatctgagcaccttgcactactcctacgcccactggtgtttaaaacttcatggttaagtgcttgatcgaactaactgtccctagtctgattaatactcggtgacctagtagtatattctaggctgatggccagtcgacaaccacaaagccttgcatgattgtggtggacaaaggtaccccgttcaaggtcaatttgagcttgattattccttgactggcgacattgtttccaataaatccacgaagattcactatataatgtttcaatttggcttcttcgagccccaccttctttagtgtttcctggttggcgagctagatggtgatcaccaccgggtcaacgtgagagtatctcgcattttcttcatcttcctcaaaaaatataatcggaggctctttattttttactttcttacgttcctcttttgggtgttattattcttctcctgcaatatggtatcccccaagataaccagagtatcctttccttcaataggaggaggttgtagtccctagttgcttgggttgctgggtggattaggctggttatgtacattgccctacccttttacatatgtcttgaagtgtcctcgtgcgatgaaaacctttatttcatctttcaactgacgacactcttctgttgtgtgcccaatatctgtatggcacttacagtatctggttggatcacttttatatcacgcatgcctcatgggcttctgttttgtgaaaacaactttgtgctcatgcatgagatagatattctcctgagtttcattaatctcagtatagatagtgtaaattggtacatacttgtcgtgtttcttttgtttcttgtctttcgacgaccccttagagtcgtctttcccattttagccagaggcccccagctcgagttctccatctgaatcataccccgattgttttccttgctccccgacttgatacctcctgaacttatcctccaactcatctattcaaaatttgatcggatccccttactttggaccaagttgttggcgaagattaggttttttctggttcaagtgttctcgtagatctagttggttatgatggctggcagatctcgttcaactcatagactgtgtcccgctcatggacctcgtcctttagtgacttatagccttacttgtgcctatgcgatgttgatcattgttgcgacgagtattttctcctcctggtattgatcgattgtgggctctcgcgtgccccgaggcaacactcgcctcttcaggccttgttcctcctccttgggtgtggttcgtcgtgtttcccacactagggtttgcactagcccttccttatgggtttgggaagaatattggcgattcctcgctaatgacctacgtgcttcaggttgtctcccaggattttccttatctccgtgaggaatttcctcttccctagttcctggtcgccttctattcttatttttatgagatggttttggttgatcattttgctgctcattctcaggggattcctcagtttccccaagttctctttcctgagtgttatgggggttcccctgagctgtcttcagcaccctagtttgtgagtcgcgaggcctacctcgtggtcttctctctccagggttagtttgattttgaatattattttcctgtgttgtcctggtagcagatgcttcacactccaacttagcattccaacggtttgcctcctctaggcggcatctgagttggtgatgttccaactcaacgattggcatgtattttgttggatcataggtgccatcctcaccaactgggttgggaagaggtctaccaatgctcattctaggttcttcatgccttgttcctagattctgggttctccttgaacttgtggcctgcatacttggatcactctcaggttaggttaccctgagatgagtggttcgttcagatggtgagttgaaaggcctctgggagcccattggctcttttccaggatgataagtggtttcttcgtgaggagtgtcaaaattttctctgtcgccaaccatggagaaaattgttttttttttatttaaagagggttttttgcgggcttttttcacgaaggctcccaatgaaagcaccaaactgctaacgcaaattttcgtttacaatatgtgaggctacaaagtgataaacttgcacagaaataaaaagttggtaaagaaaagataagaacacaaaggtttttacgtggttttgcatttaaaattctgcatagtcca

SEQ ID NO: 163811 - DNA, 1385 bp, Cannabis sativa
cttattaaataatttacttgtaagaaatttaattttatatttatcagctgaacatggtataactcggagcattaagggtaataatatttttgtgctgactctgaatgttgattttttggcacgttgttgggtaattatgaatattctgatttattatagtgttactaagttaagacattttacattaagaaaaatttggtgcagatgctggtgttcgtttaggaaggaggattaggctcgacacagttgaaaaaaaacaaggatattggtacaattcttgagcaggttagtaactcttcatttagttttgttatcatgcttattagaaagagatagtatctttgaattatatggactcaagatacaaatcggttgatctcttaaagtaagataatagtattaatattgtaataattttaaatttttatataattcaaatctataggacacccatatattttgttcaaggccatatactgaaatagaatcacattcactctctatagtttgtcatctttatggtcttgataaaggttaatgaactcatatacatatattaacatagaatcaccacttatatagttgaatgttatgtctatttttgttattgttcttttggcatttagattaatcaattaaaatcatcatagttcttggctgttttatttcattactgttaaataaataaaattatcaatggtttaataagattgcaaattttcttttcaaaaaaaaaaataaaaattatctgtatacagtctacacagtatccaaaaaaaagaaaaataaaaaaaatagtatccatttatcaaaacatttaaataaacaaacaatataccttattgtgatcaagtcctccaattgaagcttgcctcgatttggaacttttccttcaaaaatggcctcacacacctattataaagaaatttatgttatttatcataaatttgaatcagtatccacacatatcatacatacattactatatctaatctaaacatataaatatacattatacctttttgtctttcagtccttgcttttcaaagctcttcaatccaaaaatctttacttttcataataatatatagatatagatattgaggtcggatgatttctatattttttggcagaaatatatcgatagaaggaaggatagatcgacaggaaggatagttatatatatggggagatatttaggttttatttagggttttattatttttaaatataaatatcttaaatatttagggttttatgatattttaatttattgttattcaaattcaaccgcagctaacttttatatattttattatttttatgattatgttatttattcatcctaatatatagttttaaaataggttagttagttagaaaat

SEQ ID NO: 163812 - DNA, 959 bp, Cannabis sativa
ttgttgttagtttaaaattatattggaaaagtataagaataagaatatgaatcaagaaaatgcatgcaaggaaaactagttagaaatcatcacatttaaacaaatatgccccaaataaatataaaaaattaatgaaggaagaaaatgttgtactggttttaatcattaactataattgtttatctgtgctatatggtatcttatagtacctcctatgttataaaaaatgaatacttttgtataaggtaataatattataaggcaaacaagcatgttttcctgccacatattgaaatttgattcgatactggtatatatatcaaatttgtccgaagcaaaatagaagagataattacagtttacgcatggagagactttgccttcttaaaatcgattaaaacatttctgaaaaaatgacccaattctgtaatatactaggttattacttaggcaaccttcaatgcatatgaaaaaacctagttaagtatattaatcattcagagcacatattatttcagatgcactcttggtacattcattttgagccaatgaaggcagaacatttatgacacaacacaacatatccatatagatatagtatatcactatcagaaaatgctaataaattaaaccaagcaaaatgggcaatctattgtttctctcattaaaaactcaattcagaacacctacaaaagtatttaatatgtatataaggaaaagaaaaaaaaaatagggtggtatagagaaaaatacattgcattaaagaaatgtataagcataaaaagctgatttctctttgtcaaagaaggtctcaaactcacaggcacagcaagctatatgtgcataaggaaaaaaattgtgacccgacaattgtctttgcaagtgtccttgcttgccccattttaggaaaccataactggaactcaataaacaacaatacaagagagagagagagagag

SEQ ID NO: 163813 - DNA, 1802 bp, Cannabis sativa
tactgatatcaacataatcatcagctgaagaaaataacacgcattgatgatctgttaccagcattgcaagatcatgcatgaaattgtgcattttgcatttcgtcattttcccggtagagttgtctctctcaacttcttcaaagaaatatcctccaagtaaactcagaaaatactcataaccaacatcctcctgagatttacctagctgctcaacgataaaaccttgagccatccaaagcttaattagcttttggacattgatcacgtaacctttgggaaacaagctacaataagcaaaacaatgcttaagacacgaaggaagatcatcataacacagcttcagtaaactcaacatctcacgatgatcatttgtacttgataaaaaaccgaaaggaagcatgtcatgatgtgattcccctattttcgaaaattctcttttgtaaaaggttcgccactcttccgcacttttagaacgtaacatggctgcagttgctttaatggcaagaggacgtccggcacaccttcttacaatctccatcccgacgcgtatctggcgagcttcaatctcacgacctccaaatgcaattttcccaaataaaaacaaatacttctcatcacttagatctttcagcagataaggtctaatccttcctttgattaagtttgagacagtctcagatcgagtagttacaagcatcttactccctattgccccaacttttaaggaatctgttaaagatttccatttttcaggctcttcgttctgaacatcatctaatacaattaagtacttctttccattcaatgactttccaagaacgacatcttgagactttttgttactaggaagatcctctactattttcccagttatttttgaaagtattcttcccaaaatttgttcaacatcaaaaataccagaaactgatatccaaattcgaggttcaaaattacattttattacctcatcattgaacacttcttctgcaagcctggtttttcctgatcctactcttccaaccaggggaagaacctccataacctctacctcaccaacatgtagcaaaattctaatgatctctgctttatcttcgttcctaagtgtactttccatggatgatgatgatgagcctgattcgttcttctctagccttatatcttttcccacaacaactaactcttcacttctgatctcctccttgaaatcgaaaagcttcctctgttctccaatcttgattagttcctccttaacttggtttattttcagaagcatattcttcttcttagctgaagataacttctttcttgggtggcgtgcttcggtgtagaaactatggagcaaattgtcagcactgtagaggacatcttcaagctccattagccaatctttgatgccgttgtcgctctgactcttcgtctccgcatcaagaattacagaatccagatcttgaatggaacccttcagtccctgcaggaacttcttgtccgcaccatacacagattcaatctctttcactttatcatcagaattcagaaattccaggatccgacttgcaacaacgcatacatttcctgctgccattgcttactgtttttttcttttcttttcttttttcctggtttctaaagacaaagatcttctgagagagtgtttttttatttttgattttttttttttcgaaatgcttcagagtgtgtttactttggtcaatttggcacgtgtgctgtagaaaaaacaaggggacttttatttgcaccccatcaaattataaatgcacctcattattaaaaaaaatataaac

SEQ ID NO: 163814 - DNA, 792 bp, Cannabis sativa
gttacaaaaatgtgcacacatgtattgacatttttcaaaaaaatgctttagtgcaattaaaccgttttcatagataattatttggttaaaacatcaccgacggttgagactggtcattttttcggttctttttaaatcaaacggtcaggaattgcccgcgcgatgtttgcccgcaatcaacggtcaaaattaccaagaagtgaaaaactggaaaattgtttttttttttttatatataattatatttcttttttgttcgcgcgctagtcgttaacgcgtgggaccctcttattgggcaacgctcataggtgaaagaactggggacgcactactacggaggtgtagtccggaggattgagaaagttttggacgaatttacccttttattagaatagagtttcggattatatggtggggccaattcaggtcatcgaaattgtgatacgtgctgactggtatttcgtgggtcaaattgaacagtgggtttatcgattgggcctgtgggccatgcttttgaccaaccatctaaaatgtaaactgttaattatataattatacaggtaattaacgttataattctgttggaaaataaaaaggataacatgattagagtcaaacacacgcccacgggcttcgccgttcatcgtggttaatttgaactgtagaagatttttttcatttattttaggaaatttacatggtatactaatttttgtcatttttttacaaaaatactgaaatttgggttaacttttacaaaaatattgtcacacggaattttttttaaaaata

SEQ ID NO: 163815 - DNA, 2259 bp, Cannabis sativa
aatttggactttgtggatatgataaaaaatttaacgtatcctagagcttggctccacttgaatgatggaaacccatattgcatgtatcagtgtgagcttaatcaggtgacaagagcatggttgtattttgtgagtgcccggctgatgcctgacaaccattttccagatatcctgcttgagcgtttggaggtgatatatgctatccttaagaggttcaattttaatgtttgtggttacatttgggagagcattaagcacatgatccatggtccttctattgggggattgggtcttgaaggcatcattactgaattatgcgatgcctatgatgtgccacaatattcaatgatcataaggtgtcaccccaaaaaaatatttccttgggaacggtgaactgacttagagagccacatccatatggagcactagaagcacctagaccaaagaggcaataatagtctcagcaagatgatgtagatgagttgcctacagctataatgactccccttgaccctgctatgcagtacacacatggttagttgaattatgtaattcaacaaaataatcacatgcaggactacatggtgcagcgtagtacttttgatgagaatcatgtttgtcaattgaatactgtgattgtcaagtggtctttagaggtggaggatgacaactatttagcattgcctccgatattcaactcttatgatcaatcactgccaccaaatcccttctgatgtgggttatcaagtaagtctttttctactagatttagttgtgcacattggggacaatgtgaaaataagagaattcggatggatttaagtatggaaactggactaaaattatcctcatattcacactttctttcttggtataaccctttgctacaagtctagtgttataggttttgacttttccatcttgtcctcttttatttttgaagatccatttacacccaagggctctaaagtcatcaggcataaaaaatacttcccatactatgttggatctcatagagtgcatttctttgttcgttgcttctaaccataatcttcaatcacgactagtcattgcatgttcaaaggtcagtgggtcgtcatcaattgtgtcaccaaccaccaagttgatttcattctcaacttgtgttgattcgacaaagaaaatgggataatcatttacttcagtagatatggatggaacaactctaagagtcaattttaacatcatctcctctaatagtatcttcctgtgtcacatatatagtctttctcgagaaaattagcattcgtcgagatgaatactttcttatcttgatgactatactatagtccaaccctaatctctttggaatagcctacaaaaatgcgagcctctgttcgagactcaagtttcaaatctttcttcttaaggacatgagcgggggatccctagattttataatgatgcaagttaggttgtttaccattccagtattctaagagtgtcttagcaactgacatagaaggaactacatttagaactaatcattgacctcaccatatctagaaaagagcaatttcgacgttccggaacaccatgctattgtggcgttcctaggcaatcaattgaggtagaattccaagttcattcaaatgatctttgaattgcatatctaaatactctctacccctatcagtttgcaagatctctatccttttacttatctagttatgagtggtttcttagtcattttccttacatagagttcacaaattggtagctcactaagagttctcacgtaaaggactatcttatgacagtcactttgtcttatcacaagtaatatgatctagactcatattctataaataatattctttataattattgatctcttttctccttatgtgaacaaggtttagatattaaagagttagtaaaagcaactaatttatcatatcacagaatatacatcccatttaatttctatacatgcaatattataataaaattgatacttcattgcttgaaaattaaaaaaaaaatatattttttcaaatgtaaattggaaataattgtaaaaataaagtcactgtttaataacaaaatttattttcaaataagacagacattcttctagcgtgtactgacactagtgctcctttattgactcttagtttccaactctccatcttctaagtctctccacaattcaagtagctgctaagaagtacttacatggttagtagatctagaatcgataaactcaaagaatttatt

SEQ ID NO: 163816 - DNA, 2372 bp, Cannabis sativa
aaaaaaaaaaaaagaatagcaaaacgtgttcgtgtttgacccatacaaaatcatgttgtatttgtgttgactcagtttttttgatcagccttatcactccctgaaattcttgatttagtggattatttatgtgttttgcactactacctatttgggctatttagagactaatgagttttgcaccaatactaatttggacattcaatttaaaaaattaatttcttaacctcatattttgtaatcttggatctatttatatcaaaaaaatattttcaatctcaaagtcaaattttttaactttattttcaaaaaccataagataccattacttcaacagataatagtgcaaacagaaagtatgcaatggtatgaacctttaaatatgatacaatcttgtaatgctctattttcttgaacactaaaaaagtactaaaaacaacataaattatttttttaaaaaaaactactttgataatattctacttcacctttattcaacctgaagtttcattttcagcagaagaaaaaaaatggtgaaacctcaaacaaatagcttagccactttatgccttgccaacacatttgatgatttaagaaatttatgatagggaaactgggaaagctattgcaacgatgcatggataaagaggcatataaatttgaataatacttaaaagttaaataacttcatagtaaaaaatcaaccccaactacatagtaccaacaaaaactaggagtctgagtctccaactaaaaatgtcaacttccattgtcaccattcaaaattaaggcaaacgagatatgattctaattcattcaaccataacatatttgatgaaactttctactgttgtttaacttcaactttcttcttctgccagagcctgtcgataccgctgtcagcatctccctgccaacaaaatagagtggcagaaattgttaaagtatggctctcaagtatgacaattataagcattcagtttctccagtcacaatccacatttaatagatcgatatatctgataatcaaaagggggcatacattgaaaagttaaacaaaaagcatgagggtgagataagaaagcgaacctgagcacgaacaaaaccacaaagagcgaaggtagagaactggccggtgtagacaccattctcatccaaatgcccaatgttgatctgaacagatgcatggtcctttgaagtgatcaacctgttggttgcagagctgcacccaaacacatgaattagaccataatgcttagctctcactctcaaacaccgcattgcaatattaacaccaaactatgcattgcaatatcagctataatatgatttcgtgggatttaactaccattgagtatgatggattataaaatggttaatactaagtaatagaatacaatttaagcaattggagactagaaaaccatagtaattgctatgtaagtgcccatgaaggactcaagctttttagatcttgctaaaacaaaccatatgcatatacataaccatttaaactaaacaagataataggaaataaaccaaactaagtaccaaaatatattaaaaattaattatgagtggctaatactgatgaacaatgcaatacaattttaagcactacaaaaaaagataataaaaactaaactcaaaaccgaaatagtttatattaatttacataccatttcctgggaatgtagagctctgtgataacaccttcgtcgttctgcatattggcgagtgaacttaacttctctgtaaaatctgtacaaaaaaataggttgaaagaaattcaaaaagcaaccctttgattgttaacatcaaaaaatctataaatttttttctgattttatttaggataagaactaattatatgaacatttacgcatgataaatacatcttttttttttctaaaaaattataataataataacaaatcagataatttccattagaacatacaaaccacacaacagtatcgaaattaataactgagaaaaaggaaaaatcaaatacctagatttgaaggcttaagatgcagattgcagagaagcaaaagaggcgaagggttttacagaagggccggcgctaaagtatatattagcattcgaagatgaaccaattattattttttgtttctttttaattttgatttgcagtgggtgatgagatgaaggatgagagctcatcaatgattgatttgcagtggcaaatccattcttcattcttccacatatattggctctaaccttaacattatatttttcaaagggactgacttgggtaacataaattacctcaccactaatctctagcaaatacattatgtgaatcaaccacaagcaagcacatcagaaactatatagattcatgc

SEQ ID NO: 163817 - DNA, 2715 bp, Cannabis sativa
aattgtaaaacctcacataatcgcatagcgatctagtaagcttactttccgccaaaaaaacaatactcgggttaaactcccgcaagtgggattgaagtgctcttaatgtccaacggttcccaatgccttggacattccaactcaagagtttcattgcgctcggcggccttgttccacaaggctcgccgcttcatcaatacatattggagaaagcaaatccacagaagtagaaatactaatcccatttgcagaattcaaacctgaaatcccagaaacttgttgaattaccctctcggcattgaacaccaaattcgtcgccccctcctcggccgaagcttaaatcttcgagctctccacagatggacacccaacaatcgcgacccccgaattcaccttagcctgtcgccgagctttatttttaattgacactctcttcctttggaccccattcggtctgctagccccctccttagcttccgaaacaccataagcaaaagcaccaatttcatgaattgactcaacatcctcaagaacatgcttccctttgttataataccttcttgctctgtcaatctcgtcagcaccacattctccatgagttttgcgttctttaatctctgaatccctatcctcaaagcctccattcgactgttcaaaaaccttttgagcattccccacatgacctgaacgtggtccttgtaacccagcatcacggcccacttggccaaatgacatttcacttaatttatttgggcttaaactctccacttcacaggcccggcccacattgagctttggtccatttgatttttcagacgtacccaaatcataaccacctttgtccaacctatcacccacgatccccgagttctcagcatcttcttgaatggtcgattccactagcagttctccgaccacctcagcatcgccggacctcccatcacccatctccatcaaatgaacttcttttccaagcttggtgaccaatggaatctccctctccgattcctcctgctcctccgagatatcactagccatcacctggccttgtttgaacgccacaaagcaatttggtataggatcatcttccttcaaccaagggccatatttacgaaccagcagctcattctcatccttttccatcactacttgtttatcacaatcctctttttcatgtccccatctaccacatccatagcaaagcattgataatctctcaaacttgaattgaatccaaaatcgcttcccatcgctcggtagaaatcggcccacgaacaaactcttattcaacagaaaaccaatacgcattcggacatagccattgagaaacattctacgatcattctgccatttaaaatcctcaatctcccctgccatttcaccaatacgcctgacattcctctgcgtaaatagctttaaaggccatcctctcatcttaatccaacaagatattttattcagattataatccctccactgtcccgtatcaagccaagcttctagtaccaataatcctccgttaaaataccatagttgtttagatagcactaattttgcatcctgggaggttttgaaagaaaatcctacaatatgattatccccttcctcttcatacaccttaacttcccaagccttaattcctttccacagtcggccaaacatattcatcaacaatcactcactaatgtcccgcttcgaaataatcctaccaaccaaagaacttcctccaaatgacgccactgcatcagaattttcctcccattcctcctcctgagcaactcccagcttactagtcatagctacaatgtcatcaacatcggctaccgcatcccccatcatcattaaactaatcaacagccacaaatgaaccatgaatcccaggtcaaaaaccagtaacaaagtagtccctcggaccataatttattattttaagattaatcgattgtatttttagagtgagaaaatatcacttttggtaattaatgagattattagatgaaaactcaataaaattgaaaaattaaaggatgaaagattaaatacaaaaaactgcctcattattagtaggtggttatttataagttacttcattattatttattagtaataataatagataatatgttattaatgtaaatattttatatagatttttaacttaaaaaataaatgaaaaaatataaaaaaaaaaatgacaaatttgagaaaattaaaaataggtgataaaactcatataaggtgccacctaaacttgttgatgttttcctttatattatatatagattttgttattttcaaaagaagagagaaaaccaaaggtctctcattctcaaaatcttaaccatagttttgcgtcatcatcatcatcacataccctcttcctctctcaaactcgaagctctctcaacctatctctcttccatatttgtttcatgtttactccattggagctcacaacaagctcatgtcgtaactagctcatctcttgaagaaaacaagcaagaaaataagttatagagttcctcttcaaagtaagtatgctcttgactatttttttattcaaagaaacctcatgttcatcttctaattgtttattttatttttggccattggcatttgggggtgtagtttaattcactataaaaaactgctacttttagtgacagttttttagtcacaacataattttttttgtaattaaatgtgacttttagt

SEQ ID NO: 163818 - DNA, 1670 bp, Cannabis sativa
cctatgaagcaaattctcgaaaaggaaaggttccacccagagttggaactagataagccttcattcatcaccagctagtgctttatgcttttattttttagccaaagaaattctatccaagtttcgaaacaaatccttgagggtgaagtcccttacccatttgtcttcccaaaatctaatctctcaccatttctattttgagttgtaccaagtttagaaaatcatcatatagggcagcaatacctttccaagggcatctatatgacaccaaatatcagcttctcctagctctccatatcaactttttattacttaataggtaatgccacaatgattcagtttccaacaaaaatctccacaagcatttcataagaaatgctactttgcatttttcaaaataacctattcccaatcccccttggagacaagatttccacactatgtcccaagccaccaaatgtcccgatccagaaaaatcaccttcttcccagaaaaagcccctcactggcttttgtaaagcaagtagaactgccttaggtgctttgaacaaggacacaaaatgtgtgggaagctaagacaaaactgactgtataagagatagactacctcctctagacaggtatgtactcttccatccatcaaacctactggcaaatttagccaacacaggctcccagaaagatgtccttgggtttccctactaaggcaaacctagatacttcaatgaccattgtcttgtttcacacccaataacaaaagccataatctcaatacattattattacaaatagtggtgttgtaataattatataaatttatttaattattacagcaacattgtttgtaatattaatgtagcaaacacatcctgactagtcattagcttcatctttttagtaaataaaacttgtggttattttgttaaataaaaagtatcgttttaaaaagaagagaagaaggataaagagactcttaattctcataccatctacacaatcagcagtccgcgccatgtcctacctacaacacatgaatattgataagttctttcttggataggattaacctttgtaattacacaataggatagctgaaattcttgcagaaactctattgaattaatggacaaaattacaaatcacaagctttcgaaaggcttgttctcttgtattccaatttgttgagaggattggagctctccacaatgagcatcaattcttaccaattttctccatacctttctaagagaccctctcatcttatatactttacggtgccttaaataattaccacatcagcccctaaaactaatacaactcagccagtaatacacatcagcttttaattaaaacaaagagagctcacaactaagactaaagtctagttgaatctggtggcttatcaatactgccccctaatacctgcaccttgtcctcaaggaggatcccaactcaaatcctcaatctcgtcagaaactatcaacacattcatttctttgtgttcacagcggtttcccatgaaccatttgtcatcacatcggaagcatatgtcattctccctgtaggaaatcaagctagctgtaaattaagtgtaaatttacatttaatgttttttcatttactctagtgttttaggtgttcacattgtattatatatactctttgtatata

SEQ ID NO: 163819 - DNA, 904 bp, Cannabis sativa
ccataccttattttagtcttacacactgtactttgaacacaagttataactataggctttctctatccaaatttactttgtgttacttctctattctattcaatgtgtttgaaatcacactagtagtgtccatctcaactctctagtctctacagctataaatgatatataatctgaataaactttgaccctattacagatgacatccaatgggaagttactttcaaaaaaaaaaaaaatgcacactatttttaaattctactcaaattcaaaagagtgaataaaagaaataattgacaagaaaacgatatctatggtctattcaaaactagtaaacatggcatgaagacaaggctataatggtggaacatgaatctagtcaaaaggagtgattgcctaggacccatttctattaatacacttacaccttagtcaactgcgtttcaagaccgagtaagaaaatttcatgagaaagatatattaatatacgatcctctaataatatttggaggtattgtcaagtaagatatattaaacctcgtgggaaacttagaccatttgaatcacctcgtaaaaacgttttctaagaacaagctctaaaatttcatgaaaaccaaaggcaaattcatgtctctgctaaataggcatcttagtattccttctttagtgtctaggattaaaaaacaagccttttgttagcaattatttaagtctgcctaattgttttgacagaactaaaagatcttctttctagtttctaagtatagggtcaaaactctttttttttttacgcggtgatcaaaatcacacatgattaacaaagcggtaatccataatcagcggcggcacctcctcgaactaggatagctcatcgtctaaccgaaggacatgctttgccaaacca

SEQ ID NO: 163820 - DNA, 1012 bp, Cannabis sativa
  modified_base (943)..(944): a, c, t, g, unknown or other
ttttgttttgattagaatcattttgacttgataaaactttgcatatgtattgttgtaactattaatagtcaacaatttgggctacttacagtttgagctagggctgaacatcgggtgagttgactagatttcgagtgaaaaaagttgaacctgtactcgtccgttcacatgttgtgggttggtggattggcgggttcggctgtttgtgataaacatacctaattatatataaacatacaatcaaaccattaaatttaataaattatatatacgtataaataaagtgtaaacttatattaatattgaagtttaggtaacagaaaaacaaattgggttcacgagtaacccgagtttaggtcaaacttggtaaaaatatttggtcttagtttgagcattgtattttcacttcttaaaaacatgatttttaaaagaaatttagggaaaataaattttttataaatttttttagattggaagtgaaattcaatgatttttcagtaatagttatagaactcttgcaaaactcgatctttctgtaaattgtggatagaaaagtcattcctatataatattaaacaattattaattattacccttattaaattttaatctttaatgtttaactatattaagttttgaaagtaaagtcattccaatacaattgaaaataatttttaatgtttaactatattaagttttgatcaattttattactacttaatttttgaaggaaaaatcattccaatacaattgaaaacaattattaatttttacctaagttttaatcgattttattactactcaatttttatttatcatcattactctcaactaaacacactttagtttcttaacataaacgttatctattatagaaagagtattactacactttttttttttttttgaaagagaacgaaagttcaaattaaaccgagaaaannttcatgggatccacagggggaaatccctccccttgacaattcagatgttccttggaggaacttctagc

SEQ ID NO: 163821 - DNA, 2319 bp, Cannabis sativa
gttttgggttttttaaaggatcgagtcagaaaaaactccaaggttgggactctaaagtactatccagagctggtaaagaggtgttaatcaagtctgtagtgcaagcgttccccaactatgccatgaatgtgtttttacttccattggaaattagtacagatatcgaaagtactatggcaaggttttggtggaatagttcctcaaaggaaaataaaggcataccttggatgtcttgggagagaatgtgtcatagcaagaacaatggaggtcttggttttcgtaaccttcgtgattttaacttggctcttttgggaaaacaaggttggcgtttcctcacaaggcccgagtctttggtttctcgtatttttaaagcacaatactttcctactggaacctatctctcggcacctattggaaataatcctagctttgtttggcgaagtgtttgggaagccaaatcactagttcgtgcggggattagatggaatgttggtaatggttcttcaatttctgttttgaacgaaccgtggctgcttgatccaaacaagccatttgttacgtcttcaccccctgcccttcaacaagctctagtgtgtaatctgatgtcgatggacaagaattcttgggatgcagaaattctaaaggatctatttgatgatagggagcaaaggttgataaacaagattccattgtgttcaaaccagtcaagtgatatcctatactggtttaaggagccgactggagtgtacacagttaaaagtgcttaccaattgctccaatctttaaaagggttgtgtgatgagatggaagcatcagttttttggaggagcttgtggtctttgaagctgccaccgaaaataaaaaacttgatgtggagggtcggttctaattgccttccaactcttgttcaactcgcaactaagtgtgttcctgtcaatacaagatgtcctttgtgtgaggaggttgatgagtccataacacacatcttactcacttgtagagtggttaaacaggtttgggagagagtcggtattgggaccttgatggctgttgcaggtgatggttttctggattggtgcatcaacgttttcaagactttgacagcagaaaaacaatgccttgctactgcactttgctgggcagtttggggagcaaggaatgatgtcgtatggcaagggaaaccggttaatatttcagctatagtggcttctgcaaaaacctatcttgatcaatggaaacacgctcaaaaaactcaaattgagtcatcatgggctgatctttaggactatgatgggatggagcgttggattaaaccacaatttaatagcatcaagatcaacgtggatgcggctatttttgaaggataaaatcggtttggaggtgcttttgttgttagagaccataacggtttactcattgaaggccatactaagttgcacctaggcaatattgctccggctgttgcggaggctttaagctttcgggaagctttaagttggattaaaaatcatcagccttgttctgtatgggtggaaccgattgtcttctggtcattcaagctttaaggagttcgactagtttgtcttcttactttggttgtgtgattcaagaatgtaaagccatgttggctaatttatgcaatgtctattttttttttataaagcggtcagctaatagagtcgctcatgagtttgcaagggcgtctttattttatcctgattgtatttttcagtatgggaaatattcctactgagtagttgcctatgttggtgacagaatttgaaggttaataaagtttgattttcctttcaaataataaaaaaaaaaaacacaacttgatatatcctttttcaataacacattatttagtttgccaataacacattacttagtttgccaataacacattcgagttcaaaaccaataaaaacaaataataggaatatactgactttgtcaagaatctatattctagatcaataaccacaacttgatatactgcccaaattaataaccaataacttaatatttgaattttccatacgcaatctatattcgagatatatccttttttttgggggtgtctgaccttcgagttctttccatggatttctgatttttgctcacacaaaggcgttaatatcttccaaaatggactcaataaaatcatcatggtcatcaactctacttatagggttcgtttggtattgtatgcaggatcagactggattggactaaaaagaattgtactggactagacaagattagattatactgaaagtaattctgtgtttggtttaagaatagactggactattt

SEQ ID NO: 163822 - DNA, 1607 bp, Cannabis sativa
ggataggcatttttagaaagattagttagccattggtaatacaagttttgagcgcatttgtatctggctttgatgtgtcaagccttatgtggattgctccttttgaggaaaatgttttgtattgagtgtttatggtttctttcattagccaaagggttatcgctttggctagtttttcctttgtattttctttgttttcttggtttcatcgataacttgggttttgtttttcgttgtaatttttgtctatagtttctacttatatcttgtcattgtggtgttttctggttttattgtgttttcgggtcgtatttctgttttacaagccgagaccttaacacttttagttggacttaattgggctcttacatgcagaatcctaattaaagaggtttttttgattgttgtctctggtcacagctataaacaaaggaagagtcttctttaatgagttgggtgtgctacttgaggatgtcatagctttattgttatttttctgttgcttcgtaattatctttttgctgttttatagttattttcatgttgtttattaagttgttcttgattttttttcttttttaagttttttttttttattttactgaaacacgatatttttgtaattttaaaatttaacacagctacaacaccctaatcacaaagcataagattgattatagctcgaacatatggaacaagctcatcatgccaaaacacaggtatacttactgaagcaattaatgacctgttacttacaagatccacttgagcagaattttgagcatcccatcatctcactgtccagtttgtgaattagaagatgaatcccatgattatttgtttatagattgcatctacactaagaaaatagtggatgaaattggctcttagttaggttagttcgtttggccaagaaacaagttggagcttattgtgttcgaagtcacaaagtgggttgaaaaacaaagttattaatgcagtaattgcttctacaatttacatgatttaaaaaataggaatagatgtgtctttgattatgtttgtagctcggttaaggctgtttgtaaagagataaaatatcttgtgaaatggcgtattttaggaattttaaattccaatgtgaaaaagagtgataagtacattctaaatgtaattgagagatgatagtgtgtgtgtcttgttgaggattttttgcctttgttgcagttgcttgttttgttttgaataaatttttcttttgttaaaaaaaaaaaaaaattaacacagtatttttgtaattttaaaattttaacacaatatttttgtattttaaaactttgatacgatatttttgtaaaatttgtacagtaaaaatataaaaattttcgtgttctagtattttcgtaaaattttccccattttacattacttttatttttgtaagttcccaaccaaaaaagaacaattaaacaagacaccatttttttgtaaaaaaattaaatttttaggtttaaagaattttttatattttaatggtttctcgtaaaaataacacgaaaacaataagaaaactacacaaaaacaacagaaaaatagcatccaaataacattaaaataacaacaaaaaa

SEQ ID NO: 163823 - DNA, 1203 bp, Cannabis sativa
tggagtcgaggtcggacggccgttggcgccgagaagactgtacagcttttttataccgaagagagtttggattccgtcgagagtggtggcgtttggaaccacgtagtccactagagcttgacacgtggccttcttactgcaggtgaacgttggcggtgtttgggccgccgattgggccacgaggtgggccgagataaaaaacaggctgaggagaatcgccgggcaagttgcggaacccattcttttttctttctttttttggtttattatttttctggagctaaataattgtatatatagagagagaggagactaagtgggtcccagcggactgagtcagctggagagatatgctagactttctgtgtgtagtttggacttttgtttggttttgaaggtgtgaactgtgaaagaagatataaatgagtgggaaagagacgaaaaagcttggcggaagagaaatatgttatggttatggatggagagatttggtgtgactatttgactcgatatgactcagctgtaatcaaaatatgtagtggcaatacaagtttcatttcacttgcatttactttccgaccaatggctacacgttttggtttgctttttcttttttttttttccaaattccggttatacatttattattatttctaaaactataatattttaaattgataattatttaatcatattaggcaataggcaataggcaataggcaatgcaagtgaagtgcctacactttttcttttcaaactggtgtgagtgtgcgttgtcttttattggtttttttggttttcaatttctattttccaaacagagaaaacaaaaagaaaatatactttagtccttaaataaaattacttagttgtttttggacgaaatttttcacagcaaaaacaagtattggagatttctttagagtttagtatatttcataggagggctttggtaattttctatttgtttccgtaatttaaaaagttttgaattttatttttttatgaccatatacgtgctacttatttagtactatattagtttatagtataaaaaataaaaatagttacttacacgtgtataaatgagtttattttttttattctcagtttgtttaaattagttatcagatttgagaaatttacatgttatactaatttttgttatttttttacaaaaatactgtcagacggtatttttta

SEQ ID NO: 163824 - DNA, 938 bp, Cannabis sativa
ctttctatttgattgtatcgaaattctattacattaacacactttatataaaatagatattaaattaattatttgtgagttctctctttgaagaacatcttatcttttttttctattattattgataattatgttatcttcaatgtggtgctgggagaaagtgcctactgatatgatagcatttgaaagaagctaatattggagatgttcgatatcaaactaacagttaacattgatgtaaaaacatgacattgatgtcatattctctctcttttttctttttttaataaaattaaaacaaataatatttaaaaaataggatttgtgcttgtgaaaattacagagtaattaaaaaaaattaaatattaatactttttttttaaataaattatatattaaatactaatacatgaaattgttagagtaaatatttttagaagtaagtatcaaatataatttaaaagagagaaaaataaaatataatatttttaaattatataaagagttttaataatttgaaagaatactactattaaacatgctctaaataagattattcttccaatcgaaaaagtaataatttttttgaacaatatcattagcatttttctaaggaaaaataatattgttaatttttttgtatttttattattaatattattcagttggtaacttggtaggctttttttccctttattactggtatgatatgaaatttatgtatcggtcttttttttttctctttttaaaatctataatatttatttaaacaaaatttgactatcttgaacaaaacaaattgatccattaaaaaaacaaaacaaattgaatgtatgcgtttcttctataatataataaaatttgactgctttttattttcaaatggaaaaaattgactgtcttaaacaaaacaaattgagctttcaaaaaaaaaaaaa

SEQ ID NO: 163825 - DNA, 625 bp, Cannabis sativa
aacccttttctcctttgaatctataagaagtttgagagtaataacgaaacggctgtggtttttgctgtagctgtggtttttttttccttgataggtatgaataacgaaacggctaataataattagcacatgcgcatgcatgcatgtatgcacgtcctttggtttttcaatgttataatttgtggatatatgagatgtattttcgagattaatgtatacatcattccccataaaatattattgatatcgaaaagaaattaatgttaacgtttgataatataagcaagagagtgcagctaattagttttttcttttcttttaaaaaacaaaaaaggaaaagtccaaaaagtccaaaaataaagcatgcatcccaccaatattcacataaataaaccacaaaattaaatttaatattagcctaaacataagaatcatcttcaactatgccctctaaacatatacttcttaaattataagatatatagattatacatacaattaacaccgtttatatattcctctatgcaaaaataattatatatgctatatattgggaatgcagaaaagcaatattatttatattattaataattatgatttttgttggaaattatttgttctacca

SEQ ID NO: 163826 - DNA, 681 bp, Cannabis sativa
atatacatgaatatgtttatattttgatcctaataaaaaaaatagaggtaaaaatattttatctaataattttgttgcatgtgtactattttagctattataagtgtcaactaagtttgttaacagccaattgttaatatattattggattaggtattaaataaaaaaacttttataattttctaaagaaaaacatttatttgtttaattaaagtaaaactaatttaattttctattgaaaactgtatatttttaattaaaaatggaatgaataataattattaaatacatggtcaaataatatgttgtcacgtgctttgagttagcacttcacagtcaaaaggttgtaatgctccaacaaaattataaaataaaatacttttgttgtaactttttcattagtatcatatgtgtacattagcaaattttatgtgttatgtgttgttcgagtagtggtgtgcataatttccagactataacacattaaagttagtagaacatgtatttttgtatatagtttgtttgatcaatgctatatgaattcttgaacaaaaagatgatatatactgcgaaatatatatacatttagttagtaataagggtgtttattggatcgcatccaatgtttttaggtctatccagatccgatccaatcacatattggatgttagattttaccat

SEQ ID NO: 163827 - DNA, 845 bp, Cannabis sativa
aattttgtactttgcattttctttataataacaataagtaataatagcttcatcgtgtggctatgttatctctaggatattgtgagatttgataatttggaaaatagaaatgttgtgtgctctaatgagattatgttcttttgataaaaagtcatatttgctcagatataaatgatacattaattgttgggtagaagatcgtaatgcatggtggtaataattttttctataattctttcttttatgcttctaatgaaaagagtagaagaatgagtctttggagagatttgttcagccttcaaactcatcttggttcttgaagattttaatgcgatactctctcaagaaaaaagaattggggatagagtgtgtctcttacattcaacaacttttagtgttaatttatttgattgtggtttaatggatgtgaagcatagtggcaattattatacatggacaaataaacaatacgcccggacagaatcttagctaagtgttgcgaaaattaatatacgtaaggatacacaatcacacaagtaataaagtgataagtaagattgtctccacagggattacaaacaaaataatatgtaaaaccaactaatcacaacttaaaataaataaaaataaagagaatgatgtggtaatgaattttaatcaaaagaattgtaactcaacttactataaatatgactgctattacaataaaaatacttgcaagaattgtagtatattaaaaagtgacttgaataactaagagaatatgctgcacccatgttcaacgagcttaatcgacccgaaattcaagcacctcactttaagctcaagtttgtcatattctaaat

SEQ ID NO: 163828 - DNA, 1290 bp, Cannabis sativa
aaatttgctaaaaatatgtacaaaagttggtaaaacaagattttttttagtatttttcttatttatcgacaaaatcaattaaaatattgaaatgtattataacaaaaaaatactgacatcatcctctaaccattgcccgaccaccatcaacttcataaagaaactcacatcactgacacgggtgtggatattattatgacgactatttgggatgtccccaagcacccgcctctagaatgtacgtagaaatctatggtcttctggtctttctagatctacgttctccggaagaaacaatttcttctttttctcctttgtggagtctagcaaatagaaaggatttgacctctctctcacaaatggtaccccttctacgggtccagtcaggagtaggacataatcttatgttagtgtttaaccaatggttgtcattatggcatccgttggtctagatggtgccttataatcatctttttctcaatcttttaggatcacattcttgatattagctctcacgaggtcagtcatctgttggttgggatgttgtggttccttgtccttctcccctaataatggtatcatgtgggccaactgagccactaaaaactccttcactgctttctgactatccagaaagtagcgcctcatattggttttgctattcactatgtcagtctctgagagtataatggcagcctgttgagactcaagtctatccatcctctttgctaccactttaatgtctaatgtattagctgtaacggtcgaagaagatttctcatctaccgtctccatccactatctcttcaatttccttctcaaaacaaagagggactttaccctcattgatagacttaaaatactcctcctcactttgtcaaggacataagatttcctttataacaaactgtaaacaaaagtttaaaaaagttaaatgttgcaaactaacattgatctatgttgcaaactcaaaatgaattaaaataccaacatgaaataaatataaggatttatcctttggttgaacagttgtgcaatgtcactctcctttatgtcctatttctgctggccctccttggttttccaatttatcatcctaggaaacctggtgtcgctataatcagcatacttctttctcactttctctatggcttcatatgcctactatggtatggcaagtgcatagccatgtacggtatacttttcctcctaagcaaccttcttgccattctgcttatcaatattctccttgtaacactgcatgtccttactcatagaccacatcaactt

SEQ ID NO: 163829 - DNA, 2592 bp, Cannabis sativa
agaacttgcccccaagagtgtcgaacttgcccccgcaagtattaactgataacaaaaaaattcccatggcatagttagggagtacttgtgcaattgacttcaacagcacttctttttctgcacgagaaagcatacgtcctttccaaccttgtattcttttccttaatacgtctttgaggaatctaagtatagcatttttattctaattaccaaccgaataaggtaagcccaagtaatagctattttcatctgtctcataaataaccaaagaatcacaaaccaagtccctcattatagtactagtattagtactataaaaaatagaggatttagagaaattaattttttaccctaaagctagctcaaaagtattcaataacttcttaataaactaaagaatccctcagtagagagaataaaaagataaggcgacgaaggattgccttgacgtaaccctctttaagcaacaattggacccatctcttttccaccatgaataatcgagtaggaaacagatcacccacaatgtattactaaattaatccatctaccattaaactccatcatttcaagtattgctcgaagatagctcaaatattcgagcctatcataaggctatttaagtaccaaaggcttcaaagactaacatgaaaggacccaaaattatgcgggtactaaaaagaacgatttgttttgtaggtatcaataaagaggaaccaaagttggctcttgggtgttgatgcttaaagaagaatgccaagttcctacattaccaacaagtctaaaaaaaataatttatcaattcttggacacaacccaaatgaacaaatttgggaaccggtgatatcactcctattcattctacttattttgatgagagtatgatgcgtagattgaaacgtctagatggaaagtaagtgaatttgatgtcctttattaattgacttgattttaattcttttctgtcattattttatgcatacatgctttattagtatgtcacatactatttctatgcataaattttgtttagttaagttttgatatttttgaactatatacatgctgaaaaattcagataggtcattatgcaaatttttggtgacttaatttggacataattttgaactagtgaatatgtaaatttttacatatttggatagtatatgattttagatgtttggacatgtccaaatgagtgtatttagcatacctaaaggttttttttattgaaatatgccttgaataaaattttggtatgttatttgcttatttttaactttttaaggccatagtgggtgaaatttgcctaaatttcatatctttgagaaaattattattttgaaagtttctacatgtgtaaatactcatatataaactgtgtcaaaaagattttttcaaaaataattctcaaatcttgattttagtattatcttgtataattttaactttttaaggcctaaaagagtatatttaccacacttgctcaattttcaatatttttttaattctgtataagtttttacacctcacatctaacattcttgaactattagaaaaataatttttttgatttggttgcatagaactcatttttttttatagatttctagttttgaagaaaatcgaaaaacttaccaaaaagttttgatttttgataatttttctattttttttgtttgatcatgtttggtttatcatatatgacatgttaaaaaagattttgcttgaaaattttgcataaaattaatttttggtaagtacgttgtttaaaataatcttctatggccaaaacgagtcaaacttgtcaaaatttctcatttttttatttttccagcttgtacactttatattaatcatgtttaagctgctgaattttttttttaaaaaaggatgcataaaactcatctttggtacatatgttgtttttacttaaatttttgaaaaacttactaagaaatttcaattcttgtcatctaatcgatttaagtgcatgagcatattttgttttatcatacttgaggtatgagaaaaggtttgaaatcataactatgtcattctttacttgtctctcttactttcaatgattttgacataatttttggtagattgaatatgaactttcatctcttctgcattttgaaatttctgtttatctattgtgctttattggtataaatcatatcttgtatgattaagggggagacatatattttgtttgaccttgcttcttatgctacttttctttatgaaatcaaaaggaggagaaatattagaattgattattttggcattaatcatattatactttcaaatattaacaagtttatttagtatatatatgattaacgaggagttttttatgtcaagaaaaagtaacgatagatataaaaagataaaatggtataaatcaatgtatgcatatattaaggggaagctaaactcaacatgtttcaatttactttttctttcttttaaaataatcaaatatttgaatatcattaaaaagagaaaatgttgaccaaaagtcaatcactcacttattttgatgataaacaaatatttaattattatttgttactaatcttttct

SEQ ID NO: 163830 - DNA, 966 bp, Cannabis sativa
aatctgtaaagatgtttttacctgtagcacaacggagagaatcgttacaggaatttccactaactacagctggtaaggaaaacaaataaaaaaaaataaaaagaaagaaagaaaaagaaaacccatgatctggaaaactcaaacaaagccttaagccaaagaagtctttctacttaagggattgttacctataggtaaaagtaatcactacctataagtattttttatatttttgaaagtcagttaaattaaaatatattttgacaactaaactgccaaaaaaagtttaacatttttgttacataataagttctaattgcattttttttttaatgaagaaatataatgtagttacatacatgggactttccacaaattttcaaaaaattcagaataatttaggacgccgaaatcatgattgaaatagcttactatgaaaaaatattaaaacaaatgcacgatgcaatcagctatttgaatcataatttcgacatcctaaattattctgagaacccctgtaacattatgggctgtttggaaaggaataacagaattttttaaggtactgaaattcagcagaggatttataggagaagatcaggttttggacagctacttgggtttttaagaccaaacactttgagtagttatcattctctttttttttcgagagagatctcattcttagatatgtgtagagagtggaaaactcatgtagttttccgatgtaattatttcttgtttccgttttttcttttgcactgtattgtttgttaccacggttttcttctgccataagtgagggttttcaatatattcgagttggggccagtctaagacaagtggtccctttctcttttcataggaaaaaaattacaatttatccatgtgctaaaaatactgaaagtacctataaatagtgataagaaaaagcaatcactacccaacaatttttcatgacctata

SEQ ID NO: 163831 - DNA, 1070 bp, Cannabis sativa
ggaactaattcacatatatattgaatatgtagttcatccacttgctttagcgaatagttggtcgagcaggcacttgttgatctccggtagatatctcattttttctaaatatcttgcttctaattatacgataaaacccatattcaatatggtatatggttcagaatatgttatttattgttctattgcaatgatgcttatggtagagggttaatataaattaatagttttgagtataaaaccatctttgtggtaattgaagttaagcttacatggattggtagctaggcatgtctttgaaaagaggaacaaaataataagaaaagtcaatgtgagataattcttctaatataggttcacttgtatatagaaggaacctctaattagctggtcaattatagcactttttaggtttttctttttcttttttcatttcttacatgtacttaatattgttacaataagaaagattggtaatagaagccgaaattaggagtgaggtaagaactgctgcaacaagccaaacagaacaatcttgcacgattagcattgccaaagacttttccttttaaacttcttattgtttcagtttttattttttatgaattttattgtcaagtgttgataggctcatgcaacataatgactgctgtaagttcttgagtacggttgtgaacgatacattatggcgttcttcttttatataaatgcatcattggtgagatgtttagttaactttgttttttgttttaagttttaactaaatttatatttatagcctaaaggtaagttaaattaataaattttatcaaataagtactactcagactcaactctaccaataacatattctatatctgttatatttctagattttataccaatcacatattcatgtgtttaacactcaacaatagtttacgaaccaatcacatattcttaaacatgtttcagatattaaatttaggggcgattatattggcaccccattcattaaaatgtattaaacaaatttatttatcaaaagtagtttacgacaatgtttaaaaaaacgcaaatgagccttgagg

SEQ ID NO: 163832 - DNA, 3948 bp, Cannabis sativa
agatgcccagtcggcatcacagaatacttcaagagaaaaatccttgactggttttagcatcagaccatagtccaaagtgccagccacatatcgcaatattcgtttcactgctgtccagtgagaaaggagaggttgatgcatatattgacacactttgttaacacaaaatgctagatctggccgagttacagtcgcatactgcagtgccccaactatggatctgtatagagtcacatcttgaacgggttcacttccataattggagagtttgaggccactgttcatgggtgagttttgtgtattgacattttgcatgtcagctttgcaaagaagctcttgaagatacttggtttgggacaaaagaattccttcagttgtccgagttacttgaatgcccaagaagtaatcaacaagaccaagatctttaagtgcaaaagtactattgagttcagcaatgagttgattagcaagtgtgtcatcacttcccataactaatatgtcatccacatagacaaggatataggtgcaacttgtttgagaacatttcacaaacagggactggtctgacttggaaaattgaaaaccatgctgaactaagacagttgaaagtttctcaaaccaagcacgaggtgcttgtttgagaccatacagcgctttgttgagtttacacacatggttgggatgttcaggatcaacaaatccaggtggttgttccatatagatttcttcatgcaagtctccattgagaaatgcattgttgatatctaattgtcgtattgtccacccttttgtgattgctattgtgagaacaacccgaatagtgacagcctttaccacagagctgaatgtttcagagaaatcaaaaccagctttttgatgaaaccctttggccacaagccgagctttgtacctgtttagtgacccatccttgtttaatttgaccctgaatatccacttgcaaccgatgggaactctgtctgcaggtcttggaacaactacccatgttttgtttttctttagagcaacatattctgtattcatggcattattccaatggggttcaagcatcgctgcttttactgttttgggttcacacacagcagagaaggctttaggtttccttataccagatttgagtcgagtttgcatagggtgtgtggatgtggaagtaacagtgggagttgtgattgtggggagagggatgatggtagaggtagtgttctggtgggtgggaagttgggaagtagtctgtgatggttggacagggacactattattgttggtttgagaggaaattggtggactgttggtgggaacagtaggagtgagagatggtggaggactttgtgttgttggttgaggttggagaagagaggaaagtggtggtgcaccagatgtatgggaatgcagaaactgagaagatgcatgagttgtagcagcagtgttggcataaggaaagtgcatttcatcaaatattacatctcgagagatgtaaattcgcttgtctttggacatgcacttgtaacctttgtgagagagactatatcccaaaaagacacaaggagtggatctatactcaagtttatttctattatagggtcttaagtttgggtaacataggcacccaaagactttgagcagttggtaattgggaggagtgtgaaatagtgtttcaataggtgtagagtattgaagaataggtgttggcatcctatttatgagatatgcagcagatcggaaagcctcatcccaatactttaagggaagagaagcttgagcaagtaaagtgagcccagtttcaactatgtgcctgtgttttcgctcgacaaccccattttgttcatgtgtatgtggacatgcaagtttgtgaacaataccagatgtctctaagagtgtggtgaaggacctaaactctcctccccaatcagactgtaaagtcttgattttggttccaagttgaagttcaacttgagttttgaatttgatgaatgtgggaagggcctcatctctggtccttagtagatatagccaggtatatctagagtaagcatcaacgaaactgatgtaatacctataaccatttgaggagtttgtaggtgcaggaccccacaaatccgaatgtaaaagttctaaaggtgcagagtaagttgtggtggaatttggaaatgggagtttgtgtgatttaccaagacaacaagctttgcaaacatcaaagaactttttattggaaacaggtatattacatttggataaggccgttgtgacaattctagcagcagggtggccaagcctgctatgccacaaggagaaaacagagttatttacatcagtttcatgactgttacattgagagacaataggggaaatcgactgagatgaggcaggcacgggtagagtgtttggcgtgtgagtgagctgactggtttgaaacttgtagaggccattatcaaggttcccaaccaacaaggtcttcttggttgcaatgtccttgacacaacaagaaaatgggtaaaactcaaaaaatactgcattatccagagcaaactgagaaacactcaacaagtttttggttatagaagggacatggagtagatttgtaatatgcagctgtttagaagtaaaaggagagtttatggaagagttacctatgttttcgatgtttaaccccatgccattgccaacataaacttgctcattgccagaataagggttgctggtgttcagatttgtcaattctggtgtgagatgatgtgttgcccccgtatctggataccattgttcatctgagaccgattctggtgtagcatagagagcttgaatctctgctatattagccgttggactgaagttggtgaagcattctggccctgtaaaagacttgtcgaatcgataaaaacactgtttgacagtgtggccaagcttatggcaaagctggcattgtaccttttgtccccagttagtgttctgacccctgccataaggtgcagaattgcctctatttggtgcatttgggaagggaccacttgagacacggccactggactgtccatttctagctgctgaattgttgtatgggggaccacttgaggtacgtcctggaccattgtgaaagcctggtggtatagctgggggttgataggatgaacgaccatagttgttttgtccagggtatcgagattgggacagatttgcttcagcttttgatatgtcaagagacttggcgtttttctctattcgaaccgactgagccattaaaagagcttccacttctgctactgtgtatttttcctttcttgttgtaatcgacgtgacaaagacatcatattccggaggtagaccattgaatattgcctcgatatgatcttgagtggtttgtgtttggccaatggttgcaagtcgatccacaatgcccttaatcttgagaagatagtcgccaagagaccctgtcatctttgtgttccgaagctgggttttatatagacctacatttgctgcattcaacgctgtgtagtattcagtcagattctcccagatctgagctgtggtgtcgcatccgatcatccgattggtcgttttctcagacattgaagacaggagccaagaaatgagaagattatcttgttgttcccattcttcaaagtctggattaattctgttggatctttcatcagtttctgtgagaaattttgctggagcacgcgaatcatcaagaaatttctggagtttgcttcctttgattgaagccataacctggtgtttccagggaagaaagttgtgctcatcgagctttatggacaaagaatgattgaagaagatcagttgcgatcttggtaagggaacttgctgattgttgagtgtttgagcattgttcaatcttgatgccccacccgttgctgagtttggattctccattgaagaacgattggagctctgataccatgtcaatgt

SEQ ID NO: 163833 - DNA, 1916 bp, Cannabis sativa
aattatgttaatgcatgtatttagatagctggtcagctctaccgtccaccagtagaagttgctaggagttgctgcagacaaataagaaaaggataccaaaggactgaaagtcttaagtatttcctcaatttcattggaagtaatgaagaacaagaagagaagccacaagaaaaagaagaagaagaagaagtagtagaagaccagcaaaagcctcctcaagttgtacaaatggatacagagagtcctgttctataccaaaaggcttgtcttgaatgttatctacaaaaacctgtgcaagtaagtattacacaccaattaataataatgtaccttaatttttagaacactaattaatgttttaatgatgtttggtgagacaggttacaggagatgtgcgtgttatatttaaccaaaaaatgaatggtgggcgtctcttctatgtttgcttcaatacagctttcattagaaacagccttctacaagtactactatttcatacttttgtgtgtgtgtgtgtgtgtgtaaattaaacttaaatagatgtgtgtatataacaaacattatggttaaaactgtaacagttaagtgttcgggagttggacaaagttgggagcaaaggaagatcaatatgtggccctgcattttgcctagagttgctatttggtcctgctaatgcaaagcatacatgctcaacttgtccatctgatgatgatgataatgataacaacaacaacaatggtgataatgatgagtctggcaatgcttttggaatgtctgaagagactgttgatagcaaattttaaaagacaaaagagagattgagattgagagagttgattttagtctctcattctacagctcttgatttaactaatttgtatgtctgtctttatattctcataaccttattatacaccaaatttaacaatcccaaaaaccaaacatatgtagcttgaccattaagttgtctttgaaagttttgtactttaataggacttaaagagccattttggcccttaaaaaatcactttgtgttttgatcttttgggttctaattaagatgcatatatggtacaaaacaaactctctttattacaataggtgagacttattttgttatttgtacagaaagatgggtgcatgcactccactccacaccatatggaacaaaacctctttttgacaatagttaaatatgtattgcttattattgtttttgacaaatttgtatgtatatatattgctgaatatttcttgagaaaatagattcggatgcgtgtgtatactgaaatatggatgtatataattgagttgagatttggtgggaacttgccttttgtagatttccaagtttctgaaatgtgtagaaaatcgacacttgaggctagttcaagtagccataggtgggtgtgtgtgttttggaggtcctgggttcgagtccaagtaaagcatagttgtaatatataaacgcttaaattaaaaaaaaaaatatgtagaaaataatagttaggggatatcttcatttttttcaaagaagaaacggagataattcattaacagacacaaagtctaaaaaatctcaaagtacaagtaaaacacaaaagattaaacaacaaaatttatagaaagtctcggtcactaaacacgggactcatataaagcaagtgcattctttgcaagagaatagacaatgatattcttagacctattacaatgagataaggaaatactttgaaaatattttcatacattagaaatatcattaagaacaatatcaaactcattataataaatatttttatcattgacagcgagaaccatacgtagacaatcgaaaaaggctataacacaggtcattgcctccgctcagggccgtctcaaggtgatgagaggcctagtgcgaaatttgaaacaag

SEQ ID NO: 163834 - DNA, 889 bp, Cannabis sativa
tctctcactgaagatggtctaacattagacagttttagaatcggttgtatacctatcacctgaactaataaaagttaaagaaaaagagcagtcaaagaaaagatgagagtgactttcgtattcaaaccacaaacaggataatcaaagaaatcaatgagaaagttgaatctagataacaaatctctagtgagtaagtgagagttaatagcctatcaatgcataaatttatgcttaggaaggcttaaccgacaccaaattgcatgtgtataagacacttgttgttgatgtagaaaactattgtaaagctttcttactctaagatcttccaccacatccaactgtaagaacacttttcttactaaaagtcttcctaagatgacaaaatttacaccaataccaactagagtcttgatagagagtgtaatcccaaaaatcagagcactttaaatagattgcattaacttagttgacccaaagtaaatcatgttttttcagtatagtttaaacatatttttgcaaggattgctttgttccaattcgagccttccctcaaccccaacccaccatagtatctagggagacaaatcttcgtccacgaaactatatgaacattactattgctgccattgtgccccaaagagaaccacgacaaaacttcttaacctccttaacgaaattttgaggttagacaaagatactaatctaatagttacggagtcccaataacactgactgaataagttgaaccataccagcaaaagatataagtatcgagttgcccaaatttgtagtctcaactttatcttctttagaataagaccacaatctttcatacgccaattagtaggtcataggtgttgagttttgtgccctaaataaaacccattac

SEQ ID NO: 163835 - DNA, 1213 bp, Cannabis sativa
ctagtaaaatattcccaacaatctagtgttcatctttggacaacctcctggcttttgtggcttcgacgctgaacctctgaatataggtctttaggctcttggtctctccttgcttgatattggccaaccacatccttggaatgatatagtctcgggaggcatggtgtttggctaaaaactcatcagtaaactacctgcatgaggtaattgagctgggggccaacctcttaaaccatttttatgttccgcctctgaaagtcattgcgaagaattgacatctcaccttgcttgtaacctttttcattttcatgatttcatggaaggagcccaaatagttcttcgggtaagtgattcatatattagggagtatgttaggctctttgaaattgggaggtagttgttcaaattaaatctctctagagaagggtgattcatcataaaaatcatcttcgctctaactaccttcttttaacgctacggatgctatccttcaccgaagatcttccatttccttgtccaacttctactatcttatgtgaagtttttctcaaaagtctaatgcagtgcattttgtgccatctttaggacaaggggtcactagcaacgatacctgcttctcgatggtggattttcggttgagttttcctctttaattgccctggactacctgtaattagattttctttggctaaaatgagggttccaggtccttttggggtgacccttctgtggtgaggactctggtctgttattcgtggagtacttcaacatccccttctcctctagctcacctttagcctttttccaggcttcgtgctatctttgtttgattaaaggttcttcagacgcccttccaagagttcctccagcaccttttgcttgtttgcaattttttcttctaaccgcaagttattcatcttcaactcgttcatttcttcattgtgtatgcaagttcaagagtttgaggtcacagaataaactcacttctcttttcctgacctatggtgcgaggttccacaatcttttggtatgggtggcagaggatgccttatagtcgatggggccttatgcctttgtgccccaccttcacactcgattgtgatggaggcagtggctttattacactgctcttctatcgagatctcttcacggtgatggtctctttgccttctaataagcagatctataatttaccaagtaaattcactaactt

SEQ ID NO: 163836 - DNA, 1340 bp, Cannabis sativa
ttattttgaatttcatgctgatttttgctatgtgaaggaggaagtgagtcatactactttgctgatggggatgcacaagaatggcctatatacttttgatccctctcaaattggcacaatttattcgagccctattcccaccaatagcagccagtgtactcagccaaatcagtgtgaaaccactagcagtctcaactctccaatcaacacttcagttgccactttagattctcatcccaagtcaaagtgtacatttgttgtcaccttaaataatgcctctgtagtgatttcagattgtttcagatgtaatacaagtgttcaaaacaatttcactttgtggcataatcggttgggacatccttctgagaaggttgttcaaaccgttcttagatcttgtaatatcccctctgtcaataaagattctcaattttcaatttgttcagcatgttgtcttggcaaaatccacaaatttccctttcctaaagtctcaagcactattatttctgaaccacttaaactcgttgtatcagatttatggggtccttctcacaccccatctttcaatggatacaagtattacattcactttgtggatgcatattctaggtttacctggttatacttgttgaaaaacaaatctgatgctcttaaaacctttcaacacttcaaatctgaagctgaattacagttaggaaagtccattaaaactttacaaactgattggggaggtgagtaatggtcattcacaagtttcttagctgctaatggaattcaccatagacatccttgtcctaccactcaccaacaaaatggcttggctgagagaaagcatagacatattgttgaaaatggtcttgctcttcttgctcaagcctcattgcctctcaagttttgggatgaggcatttcgggcagctgtttacatccataacaaactccctacacccttattacaaaacaaatcacctttggaaaccttgtttaacactaaacccgattactcaacttttagaacatttggttgcaaatgctatccaaatattagaccttacaacaaacacaaacttgagttcaggtctgccccatgcacctttttagggtatagtctcaatcataaaggatacaaatgcttagattccaagggtcgattgtacatttctagggatgttgtgtttgatgaattttcttttccctatgagaagttgcatgacactattgtcaaccatgttacaccagatatcctaccccctctctcggctgtcatacctatttgttcacacctaaggcaaaattataccattactgatttaactcagcatggttctgttggaaattatttta

SEQ ID NO: 163837 - DNA, 2208 bp, Cannabis sativa
gtactctactcgttccttgaaggtggcaactgtttgggctcttaaaacatcttgaaactctgaaatcaatgcttggacctctctcggcaaattgtcctcccaactgttgttcattatgtcttgcgagctgtcaactttgggtatagccgtgaggcgacacacctctcgaacatcaccttcattgatcagtgagtgaaattgagtaaaagttaatggatctacacctaagtttgcagaaccagccaacttcaccgtttttccttgccattgaaactccatagtgaaagccttatgatcatgtaagcatggactgagggtttgtaaccattgcattcccaacacaacatccaatccccatataggaagcacatacaaatcaacttggaattggtgtccctatagccacaactcaacaacataacaaattttggaacacaacagagaattaccattgcctgtataaactttgaaacacttattgtcctcacatattagtcccaaccgatgagctaagttttcttgaatgaaattgttagtattgcctatatcaataagaacttccaaggattcttttccctgttttgcacttaagcaaaaaatgcgagggttagtcgagtttgatagtgagttcaagcttacctcatccaccagtgaatcatccaactcgctgcaattagtattctcagctactagtgatgcttctgactcgtcttcctcttcttctcaacaccaaactaagattcgattcttgcacttatgcccgaaactgtattttttgttgcaagtgaaacgtagacctttttctctcttctctctaatttcagttggagtcaatttcttattagggaaagaaactggacttgttttaactgatttcgaactaggtgtgttagccgatgtgaatccaagagaagccgagctacctgaaggctggttttgaggtggagaatacgtagcagattttggagaccaccccaaacaaaatccaccccccttggaacaccccaacagatcatcattcaaatctttagatagttgtgccttagccatagcatctgctaaatcgacaggtttagccattaagagttcccgtcgaatttccaatttaagaccccagacaaaaaaaatcatgaaaaggtgttccaaaaaccctgtgattagagtcaatagatcttcaaattcagcccgatactgttccacacaacctaactgtgtaagctttgctatacgacccaatggatcatcgtacactgatgcaccaaatcggagttgcatcgcttgaataaacgaatcccaatctacaaaggagccactcttctccatccattgaaaccatttcgaagacacaccctccaaatgaaaaggaatcaccatcagctgtatattggaatcgatgtgatggagatcaaaaaattcattgatcttgtaaatccaatcatcgacattggacccgtcaaaccgagacactttcactcgtaaattcttaaggatggaattaacttcccaacattcagtatccatgtttgaacgatgcctttggattcgaggaaactcatgaaccgcactgttctcccccaggtccggtgatgtcgaattcgactagcgtggcagccactcctcaagtcgttcatcgataactatttgtagctatgttcttagctcaatcatttgagattgacctctttgctcccatttgagatccatcgcctatagcattgcagcaaggtcttcgttcttcaacctgagaagaagcagaaaataatgaaagcaccaattaatggattaaaatgtccttttcgagacaggatcaatctccttaagcaaatacttgaaaattcattccaattatccccaaaattattacaataagagtatttatattgctaagaaaaaaaaaaaaaagaaatgcctcttaatagaattagttgctccaccagctccctttcagtgcctctctatcatcacgaagtcgttgagccacttgggtctcccacgcactcgattcccatgtgctggaagctcctggttgatcactgctgcttctccctcattctcgttcatggagttctttgttgcagttgatgcttctacctcttgcttttgggctacctttttaaaccaatttttcacccttttgtaataccttaggattatgagaaatggattagaaaaaccctaaccagataattatgaataattgaggaatta

SEQ ID NO: 163838 - DNA, 996 bp, Cannabis sativa
ttatggtataaatttatattagttgtagactaaaatagatattatgtggctattgttaaaatgatgtgacgttatttttaatgatatttcttgccatctagcacctagcgtgccgaaaaatggggaggtacttacggaacttccaaaagtgtaatacaaggtattttcaccgctaaaatattattgagaggatatgtccatccttagacactaggcggagcatatgagatttaaaaattcttatgagcatttttagaatttatctaagtgtccgtgtgagagagaaataacttctaggacaaaggtcctagccttgattaagcctattgtgtgttcttgagtgttagtgttcttcttattctcaagttttcttgtaatcttgatgtaatacttttatttatattttaagtattttaattgtaatctcctattcttttgtaataaaaaaaatgcaacaagcaataaattacaaatttcttgataataaatttttatttagtttgtaaggtttagattttcgaaaacaaaaaataaaaatgtattgttacaaattcgtacattttatttacagcaaaataaatttcgtattgacaattctcactttgcatttttgaattttttttttcaaattaaactctacttttaattaaaaaaaaaaattacataaacataaaaaatttatatgtgaagaatgctattagaattaatgaatgcttcaacgctacaacttacaaaaaccaaattaactaaacaaaatctaacacaaacacgacaaaagataaactattcattatactacataactaattataacattaattagtaacacacattttgccaaaataatcataataatataaaaattaaaatcaagttaataaatttttttttgctgaatcagatactttgtattgcataaaattagactttttacaacttaaacagcaccatataaaggcctgaataatactgtagttacatgtataaagaattgaa

SEQ ID NO: 163839 - DNA, 2684 bp, Cannabis sativa
ggtaggtgaagagaacaatggaacaactgtctcgaaaagagaaacaagtataaagtaacagactgtgactgtgaaaattgaaaaaggtactgacagtagagaagaggagtttcttgtggccaactcctaaaaggaaaatatctcttgataccatatagtagtagaaaatgtaaagagaatgaatggattgtattagtggtggaagtaaagcaaaaccgaacaaaccaaatagaaaagtgagcttaccgaatcccatttgatccttgtaagaagaaaagggctcagtgtcatctttcttgggtgttatgtccttcacaagttctgcatatgctttcctctctgccatttcttgaagcttttctagtcttgccttgagctcctcactctaaaaccagcaaaaacccaaattaacaaactaatatgcttcaaaaccacacttataaaagattggctaacaatttaaaattagtaaacctaatatgtgtttgtagtaatttagggcaaaagagtagaagtataatgtaccttttctcgaggtttggggcttgttagaacaaactttgagccggaaaggagttgaatcaagctagggcggtcagtgatgtcagaggaagaccagatggttcggagagacttgtagggaacatttggttttgaagagaaatcagaagcaatttcttgaagctcctgagaaagtttgtgatttgtggaagctgatgtgaggaatgagaggattggttcagtcatagatataaccaatccaggtggtgggttttccatttcagattggattctctgtgtttaaatggctcacaattaaaaaaaaaaggctgtctttccaaaaagaatgagtacaaaatctgaattgaattgaatacttttcttaactctggaaacaaatgcaacaatttccaaagccttaaatgattgaggtttgataagaagttgggaaaggtgatcaagagtgagatctgtacaaagaagtatagactaattaaaagaaaacaacatatataaatatataaagataagtataaattgaataaatcaaattgccatcatatatgaatgaatatgcatatggttcaatatttgcagtttcttgtattgtgatttgaaactaaacaaggatctttataaaggtaaaagctagaccagaggctacccatttgctcaaaacctaataagatcaaattagcatcaatggtttgagagtaataactcgaaatgactcatctgaaatgagttgagttgtccgaatattttaagctattaagatttgaggtatacaaaacctattatatacatatgttctctaatttctctcctcattttctttttacacaaaggggatttgaacccctcccccaaatccacacacacccaaccacttttgagctaccctcaagtggcttatgttcttagatttctcacataataagtcaccaaacactgaaaacttcaaaatggtgtaactaattaaatgtacaataataatccatgcaacacaaaaccataaattaggctgatgacatttcataaaacagctgctcatcttggttttgagaaacgtttcatgcatcaaaaggaaaaagacaagtcattacagtaaatcttaactagaaggatctgaattaagatactctagagtctagattttgatcactgatcacagattcattcatcaaacccccagaaataaataaataaatagatgaaaaggatagtagcaacagataactaagatcgaatttgactaaactaatacaattgattaattgtccacttttaatcatataatatatataaaagtatataataaattcatatctaacaaattatcaaaaaaaaaattcatatctaacagaatttcttatggtttatcataatatttttaaaacttctattagtattaacagaaacatgtcaaatactaacaaaaatgctgaagagatgcaaatgaataaaaaccaataattgttgacaacttctcaaaacaagctattagctattcaatgaagcattgcccattttggttcaaaacttctctaaataaaccaataattgttcacaacttctctaaacaggctataaactatccaatgaagcattatctctccaatcaacaacacatgtagttaaaataattacaattcaaattgccttgaaaaactataaattagattttattagaagagaagtttcccaatgttaccaaacacttcaagatatagaattatcccaaacttaaacacagtactgaaataaaatatatatatatatatatatatttgtaggaacatataccatataaatgagattcacatgaatgaagataacagaaatttctttgttaaaccaaaatcagaaaattataaaagttggccctggcccttaggccccttacgtaattataatttattaacacaattactaaatcttagaactaaacattatgaacttatttgacaaacctaactagtattaaaaaagaagagagagaattggataatatagctaaatcatatacctgtagaatggtttgtatagagaaaactcaaaacaaacaaccagacaaagcattaattacagtacctgttgtgagtgaatttattgtatatcaggccaaggagtgaaatgaaattcctcctctccgatctctgatctccgatctccgatcagtt

SEQ ID NO: 163840 - DNA, 2114 bp, Cannabis sativa
atttatatattttttgttttaagaaacaatatattacatcactgtgtataataatatatatacatatatagggtgaactttatacaagtcgattaaataagctggagaaagacgtgaaaaggatactggttggagaggaaaattgtttagctcaacttgagctaattgatacaatacaaagacttggattatcttatcgttttgagaatgaaatcatttctattttgaaagaaaaattcaccaataataataacaaccctaatcctaattatgatttatatgctactgctctccaatttaggcttctacgccaatatggatttgaagtatctcaaggtacgtacgtatatttatatatatatatatatatatatttatataagtattatttatgaatgagtattattagaaaaattagcttttatgcataatttatttacctaattatatatgttttttcatttttacattatataagataaaaaaaaattaagttgttccatcaattgaaaaaaaaaattattcagcaaaaaaaataaaataaaaaaagttaaatagtttgacttagatatttttgatattatgtaaaataaacataattttttgatattttatctaattaaataaataaattaagcataaaaatttaaattgttcattcattattcacaattaaatccaaatttaatggttaatattaagaagtgttctacatatatattaaatatataatttgattgttattattgcagaaattttcaataatttcaaagatcagaagacaggagagttcaaggcaaatataagtaatgatattatgggagcattaggcttatatgaagcttcattctatgggaaaaagggtgaaagtattttggaagaagcaagaattttcacaacaaaatgtctcaaaaattacatagagaaaaacaaattattagatgatgatgataatattattgcattatttgttaaccatgctttggagactccacttcattggagaataaataggttggaagctaggtggttcattgatatgtaccagaagaaaaaagacatgaatttcacattacttgaatttgccaaattggattttaacatgctccaatcaatacaccaagaagatctaaaacatctatcaaggtatttacataattttttttttttttgatgaatcagatcgttgtattgcacttcaacgagactttacatccgatcgaccaatatatttatttgttagagaatcctacattgcatgtatctttccagtactaactgtcaatttagtgataatgaaatactaattaattgaggatattattaatatttatatatattgtcaattaagtttggtattaatacattgtttatataatgaattttactaaactaaaaaagatatgatttttctcatatatattatatgtaaatatattagatggtgggagcaatctaaacttggggaaaagaaaatggaaaattatgttagagatagattggtggaggcttttttatggcagattggagtaaaatttgagccacaattcagtcagtttagaagaatatctgcaagattatatgttctaattacagtaattgatgacatatatgatgtgtatggaacattggaggaattagagcttttcacaaaagctattgaaaggtaattttcatgtatataagaatatatatttatatatatagaatactttttaatggtaatatttattgatgagtattactaactaaatttaactataaacattaatttttaaaatattaaactattaaattgtaatccgatgataaataataaaagagaaatttgaattttgatttttagatgggatgtgaaagccataaatgagttaccagaatatatgagaatgcctttctttttcttattcaatactgtgaatgaaatggggtatgataccttagcagacaaaaatttcatcaacattgaatacctcaagaaatcggtacgtacttatatatcacttttattcttatcgtaagaaaatttattatttttggtatagaggaattgtaagctgttatatatatatatatatattaggaagaggtttcaatggttacatttttattgt

SEQ ID NO: 163841 - DNA, 1381 bp, Cannabis sativa
  modified_base (1309)..(1337): a, c, t, g, unknown or other
caaaaattgatcatgcttttgtaaatgatgattgggggaatctttttcctaattccacagctcattttggttgggaagttatctcatatcactactcttgtgttatcaatgcaaaggctgctgtgaatataggtgttaaaccattttaattctttaatttttgggttgatcactcaaattataagactctggttcagaccaattggggtaagaatggtgctgccactgatttaaaaagtgtttatctaaagttaataagagtgaaacaccaactcaagaaattcagtagggaaacttttggtgatatgggaagaacttatcaaaaggccaaagatgattacatggaagcaaaacataaggctcaaatgaaccctagagatgcttgttgtcaagagcatgagaaaatagttgctggtttttcaattttcaagaaaaaatgtacaaaaagtttttaagaaaacgttgtaaaatcaagtggcttcacaatggagatgataatacctttttcttccatgcctgcctaaagaagaagaaaatagacaatataattgtctcttttgttactaaacagggtgatactagtgattgtttccctgatggtgttgctcacttcttagaccattttaagagttttatgggcacaaaaagtagagattctagcaatataaatcttgattgttttaatcagggaaatcggctagacctaaaccaacaactcaagagagaaatttcagtattctagatagcaaatctcttggtccagatgctttggataaggttttttcaaggataattggactgaaataggtactaaatttgtttggcagtaactgatttttttgatatagggaggacgcctattgagctacattctattgtaatctccttaatccgtaagcttgataatccagggaaggctgtggactatagaacgattgccttctgctcaacaatttgtaaatgtatatcaaaacttttgtgttctagactgggcaatgcttcttccttggatgaacgctccctcattttggttaatcaaatgggagaaagtatgtcatccaaaggcttatggaggttcggggtttaaagatggtgataagtggaatcaagccattcttgccaagtatgtttgggctatcataacaaagagagatattctttgggttaaatggattaattacatttatctgaagaacatctcttactggtcctatgagttgaaacaagactcaagttggtattggcgcaagctctgcatattgagacctaaatattcagaggctgatattatttgttgggttttatgccnnnnnnnnnnnnnnnnnnnnnnnnnnnnnatttacttattaatatagatccgaaataacatttaatgttgcat

SEQ ID NO: 163842 - DNA, 1514 bp, Cannabis sativa
  modified_base (1484)..(1488): a, c, t, g, unknown or other
tcatcacttgatgatgaagatgacccaaaagtggcatctaacgagtcaaataatgcgctgtagtaatgtaagctcccaaggaaacggtccaccaaacggttcaaattatggtcagcttcttgctctactaatagtaccacttttggtgacattgacttaaccatggttagaaattgactcatttgctgacaatctttgatacccttattccttttccccccaaattgtgcttctactttatcatcttcggccaataacacatgaagacttagaatcgatactatagccaaagcttcccctggcctagctttaatcatttcgcttgttaattcttgtaaaggaatgtttagagcgttgtattcaaaagaaaagcccaaggcctcggcctctttagcaaggccgaggcccaacttatccaaaatggctttgttgcgatgaacaaaagtaaagttcaagctgagaggcccattttctcgtggctcaccgaggacggcgagtctcctcaaaatcgggatccacaatcttaagtcgccggaaccaaaatcaacgaagtggattgcgtcttggtgggagagggagtggaccaaggtccgggcgatgatggagtaggcgatgcccaagcaaggaaaggtgggaagggaagcgagttgggctcggcccatttctggtttgggccacagggccttgtgaaggcccggccagcgcttaacgaggcggagagccaaagccgaggcgaagcgggccgcgagtcgttgcatggaatcgccatcgacggaggcgagttcagatatttggctgagacatgagtcggcgtggcgtaggtttccgcaagcggcgtgcttggcgcagctgaagaggagctgaatcagaacgacgcctcccttttcggcttcggctttggtcaaggacgacgaagacgacgtcgtttggaggtgattatgattatgattatggtcgtgtgagtgtgaggaagttggtgaaaacgacgtcgtatttgattgtgatgataagttgagggaaagagttacgtcaggctttaataattgtgatgaatgtaatgaactcattattagaaatttagaactacgttaattaatcaaggagaggtttattctctttgtgttaatataagtggagatgattatttgtttatataatccatttaagattgtggtaaaggaaatattgttgtgatcacatcttaaaattagtttttttctcttgaattatgtgaaagttctagatgaaagagtacaaagaatatgttagtgttgatgataataataagaattatatggattaatattatatcttgctactttgacttttctttttgactttcttagttaaatattcaccgttttagttgttgtggatgtttttagctaaaatttctctcttttcatcgtgatcaagttactttttttagccttattaatttgatttcttcactgagtactgcacatatctttatatattaaaannnnntatctaacggcatttcttggtttaac

SEQ ID NO: 163843 - DNA, 803 bp, Cannabis sativa
  modified_base (739)..(763): a, c, t, g, unknown or other
aagatcccttttcttgtagtgatttgaacaacaacaacaacaaacctccatacaaacacaaaaaatgagctcactttaatatttgagtaactactcaaatcgagtcctatcaaattatcatttacactaataaaataaataaaaatactagattataagctaaatctatgataagttgacataatctagtgagaaagagatgagagattactgtaacggtgacttgggctgttccaccatctactgctaattatagaggtggtggcagtggagggattataaactcctctacaagagtctacaagtggcaaaaaattgaagaagtaagaaaatcttaggcttagttttttcaatcccccatacaaaatgattcaaaaatatttagaaactaaatctacaaagtcaaacactacgaatgtaattggaacaagaagtcgaaactttgaaagtgaaattcaaacttcaaacaatcgaagtggaaggagtaagagcacaacaaattcaaaatcgaaatcaatggcgcaaaaatacaatgttatttacttactagtggaatattctaaggcttctcctaacgaaggtggaggtgttattccattgatgaggagtttggatgcaaggcgcttatcgtataaaattgaatgttgcttgatctagtcgattatccacaacttcatctcgaaaatttgaacccatagctttattggaattagtttaccagggtcttagatctactcannnnnnnnnnnnnnnnnnnnnnnnntatgaacttctaaaacgaatataaataaacacatataaag

SEQ ID NO: 163844 - DNA, 1867 bp, Cannabis sativa
ttttttttttttttttgataatggaatttgtctagtacagttattccgagttatatctatataatatatacaaattaaagtaaaaacatatggtatatatggccattaatttacatattatatatgtatagattataatattcattcgtccacaaacaaatttcttcataaatatatatattataggcacttttatattattttgtttattattattattattatttttcaaggaaatctctatatatatatacgactcgatcaatacgtatcacaagaaataaacttacatattattaaatataagaatattgcaatcaattatttaggtataacaacaccaacgaccagattttattcaattatttcattgaatataatacatattagtatgatttttatttattatttgcttcctggtgaattatataatactgtacagcgcactgaatttcactttctttttatgatcaatgtataaattacatggagaatattttaaccaaagtaaactataaagtcattatatattactatatatacaaacataaaataaaacaataattggccggtcaaatgattctatcaagtaattaatatacaatacaaaccgcgtggtaggttacactctaggtcatgcctatatttataaatgtatgtataatatttatgtaatattgatttataatattttaagttccatacttcatgttttgtaatcatataaatacataacatatgtagtacatacatacatatcaaattaagaatatgtgaccataaaataaaatgtcagaaaagccatactggttattacaacatggggtgcaagatgtaatcttaggagtaacagtaggaattgcagttatagtaacacaactccctaatgagaaagtaaatggaggattagtcccaacaattatatttaaggctaatcctcatcccttccatgccttcatcttagctctcaatttcgcctttttcggttcgtttgtaacgatcaatcttcgccaaaggaatccgaaaatcgcaaggttttctctcctgttttctatcttctctttgtctttagtatttacaatacccctttgtctagttttattaccttcttttgatcatatacttagtgtatattattattcctatagtctgtaaaattatatatactaataaaagatatcattattattattgtgacaattttataattttctcttaattatttttattattattacattttaattttaagtgtacttgtaaaagtgtttaaacaaaaaagtgttgtaaaagtgtgcatgattactgtctttgtttttctgtcagttgtgatgtggcttttgtcaaaaataaaaataaaaatacatgatgtgtttatttattttaaacatttggtttgagttaattatatatataaattatgtctctgataatttctaatttgcttacaatttcaccattagtattgcaagtgatccctctacaacagacttctgatctaattaaacataatatatttatgatatttttgtcaatatatatataatagaattctaccctatatatggactgtctctatttttacatttacataaattatatatattcatataacaattttgtatattgtaattatttatagtgtctcctacaagttttccataaactttgaataatttatatgcaacgtcaaaaataggttctaaaacaacttatttaacgcacggaaataattttgatccctctaatttagctaaatttcactttgaactctcccttctcataaatacttaaagttagcgagggagattagacttaggtttaatttttttttttttattgtaccgggtggaacacattaagggct

SEQ ID NO: 163845 - DNA, 732 bp, Cannabis sativa
tctctctctctcaatgaacagaggggaaagcataagcatcaactgcaccatgttatacagttgcatggagaaactaattagattagttacctcattctgatcccagagatcctcgaatttgacagggtcgccggcggcagtgaaaatagtaacatcgccgagaatctccgcaatacttggatcaaactcagaaaccgcagctctcgtgacgaagcgggtggcccatcgtggatcaggtttaggggaatacagggaggaaaaacttgaggcttgagtggtgaaggtgagaagaggttgagaagaagggtgggaatagagccgttgagatggtgaggaagagaagaagagggaggagcgagcgttgacagcgagaggagagaacaaggccattctgattagggtttcaaagaagtgaaattcaagagactctgttgtgctactgctatgctatagtgtggatttgtggagtaggaactaggaaggagcagaaaaaaacattagtggcgggaggactttcttctatgatgtgcgacagatatcaatacgacgccgcttcattcaccactcgatttgtcttcttttttttttttttaaataagcttctaatatattactaggttaaagttaggcataatgcttaattatttttgggaaatttgcggcaaaagtccccaaaaagtttacgttgatacagattagtccccaaggttcaaaaatagcggcaatagtcct

SEQ ID NO: 163846 - DNA, 1314 bp, Cannabis sativa
ctctatttggttttttctcttcttttatctattacaaatagctgaaacgtatatatatatatgtatatatctatacatatatatgatgtatattccaggttcctattaattatttgtatacctaattagcaattactataatactgttcagaaatggaagaaactgtcaaattattactgttagaaaagtatatatatattatataattaatatatatttctccttccaacacaatatatattgtcttttttttttttctctttctctctctatctttgtaaaaagaggttatacgtactagcatggacctaaccctaaagggcttcttttatttacttttatctccttttggctcatggtaacagtgctttgtgggacgaagaaaactgtttacatagtttgtactagtttttttttctctttcttaattacttttcattaatttatggagaagtgtacatactattgtaatatatatgagtgagtgtttgttgggtttgaatttgtacataatgataaatgatatcacatgtactccctcgtgggtttagcttatagcatagctaataataataataataatgataaacagtactctccttgttgtggaagtgtggttgtgccatggctgtaacaaaaacaaatcgaatgtgtagagtctctgtcaacactctcatactctcgtacgcgtgtcatcagccaattccaacgctcaagagaatcaaatagcttggagacctacttttcagcttaagcccaataagagtctgacaacaaacccactttactattcataatagtacaatatcataatatattatgtatgtactcttttatcttctggccccccttccatacctaactcgccccttatctcctctccctcatttttcttcctccttttctttctttaatttatgttaagagtaatttggggttctttcggctgaaaaaatgataagtgtaatataattatgtgttacttgtaaattgggtatcactcaagtcaacccatttctttagagacctttcaaaattgagattatattttacactcaaaaaatatatatttcatatttaataaatcaattatattattatgtatgaattaaccaaaatagacattttgtagttatctaccacctttaacagtaagtctaacattaaaattaataattattattaactttgtcaccctgatactactactattttagaatacacacatatttacatataggctaattagtaattttttcccccgaactttaacatgtactaaatcgtgcctcctgaacttttctggccgttaa

SEQ ID NO: 163847 - DNA, 2594 bp, Cannabis sativa
atattgtgggctgcttcttggttttacacgagatgagactatctccaaggaaaacacagtagccggttgtggagcgacgagtaacagggcatgaggcccagtcagaatcggagaagccacgaagagttaaagctgatgctgaggagtaaagaagtcattggcctggttttcctttgaggtatctaagtaaatgatgtgtggcttgtaaatggggcgtccttggtgttgccataaactgtctgagacaattcacggcaaaagtgatgtttggtctcgagagggtgagatatagtagcttgccaattaattgacgatagtgagatggattggcaagaggttcaccaatttcattgtcgagtctgatcttggggtccatgggagtcttggttggcttgctgcctacatatcttgtgtcttcgagtagctgaagagtatacttgcgttgggagatgaacaatccttgtttagcacgagcaacctcgaagctgaggaaatatttcagatgtccaagagttttaagcttgaacttcttgtgcagagagtcttgtagttggtgaagaagtgaaagatttggtccagtgatgatgatatcatcaacgtaaacaaggagggcaatgaatgtgtccttggctccctttgtgaacaaggtgtagtcggcctgcgattgcttgaaaccttcatcgagtaatgcatcagaaagcttcttgtaccactgtctcgaggactgtttgagaccataaattgatttgtgtaatttgcaaacgagagtggtatctgcattagaagaagagggcagtgttagtcctttaggaagagtcatataaacctcttcattgaggtcaacgtttaagaatgcgttgtcaacatcgagttgtaggatgggccattgtttgatggtggatatggctagaagaagtttaagtgtaaccattttggctacaggtgagaatgtgtcaaaaaaatcaagtccttcttgttgtgtgtaaccttgcgcaacaagtctagcttttagtctttccacacttccatcactgttgaattttattttgtatacccatcgacacccaatagcgcgtttgtttggaggcaaaggtacaacactccacgttttgttcccaatgagggcctttaactcatggttcatagcatggacccattgttcgaattgaacagcttcttgatatgtttgaggttccctcatggtggcaactgcaaagataaaagcttcgtaaggatcagatatattagaataggaaataaaattggaaagattgtgaggtgtggatgagttatgctgaattgaagaataacactcaaagtctctgagataagaaggagttttagtgacttgggttgatcttcttggaggattagaagtagcagcaagtgttggtgatctaggatctagtgttgaagttctggaatctagtgtgttgtctggtatatttgtttcaacatatgtggcagagtcccttgattcgtcctctgtatgttcctgaggtaaagaggtagaaatattgtgttctgttggataatcacagataggagtgttatgaatcatagcattaggaataacagtattagagaaaggatcaaagttagtgttgtccatgttaagtttatgaaaaagaaaaatattcccatgaaaaacaacatttcgagagaaaaaattcattagtgttgatgtcaaacaacttatatcctttaactccttggggatatcccatgaaaacgcatgttcttgcacgaggagagaatttggttctgtgtgcagagagagttgatgcaaaggcaaggcatcctatagttctgagatgttcataattcggctgtttgttgaaaagacattcaaaaggagttttatttttaagcaagggagtaggagtctgattgattaaaaatgttgtagccgtgacacattcactccagaattcgattggaaattttgcctgaaagaacaaagctcaagccacattgagcaaatgctgatgctttctttcagcaacagcatcttgctcaggtgtctccacacaagtaaaatcgttcattatcccatgtttagcaaacaaatctttgaaaactaattcaggtgcattatcagacctgaaagttttaaaaatacagttaaattgcgtttgaacataggatagaaactgtggaattatgttgttagcatcagacttgtgctgcattaaataaaccaaagtaaactgtgagtggtcatccacaagagtgagaaaatatttgtgattagtgtgtgaggcaatgtgataaggtccccatacatcacaatgaatgagatcaaagatacaattagatcgattgttattattttgaaaagaaagtttcttgtgcttagcaattggacaaatatagcatggtttatttttatgtaaaacagaagtgttacaatgtaaagtttctttgagaagatctaatcttttatgagataagtgtcccagtcgagagtgccaagtttcagctgaaatggataggatttgggaaggatctggtgcttcatcaaggatatagagatcattgatattgctaccttttccaatcatcctccggttggctttgtcctggataaaaaa

SEQ ID NO: 163848 - DNA, 513 bp, Cannabis sativa
aaaaaaaaaaaaaagccaaaaaagtgtgggggctaagagagactaagcttatgtggtcttaaatcagcctaaaaaaaatctcatcagaacttaaacatgtattcccttaagtgctttcctatgcaacttgcatccctttttttttttgaataaagtggcatatttgtcatttactgaggtgactttttgtgggtcactttatatgtacaaaatatttttatatatgtatgtgtgtgtatacatgtttctaaatatgttgggatgttgccctagaaagtgtttggttagtgggtgggacctaatcatttgtgcagcaaacaatttggtgggcactattatgctgcaaaaaagtaacaaagttagtgccaccaattagcaactacagataaccaaagagaaggggatcaaaatgggttattattaattggctaattagaatttttactccccgaattttgatatgtactaaattatgtccactgaacttttaaggtcgttaaaaatgccccctga

SEQ ID NO: 163849 - DNA, 1270 bp, Cannabis sativa
gattttttttttcttgatattgtaaatagtttaattagcataattttgataattttgttctctcgagaaatgaaattcttccactacttttagtattgttgaggtaacatatataatagattttgtggagatctttattccttagactaacaaacttttatttataaaggagtcaattttactgtcattgagctgagtttattcattcatatgttttttctgttttctctatatttaaacttggtatcagagccttatttacacgagcggtgcctctttcgctcaagctccatggcagattaaactccaactcgtttaggtgaacaaagtgcctcaagtgcagtggctcagttttcaatttcatcaataagtgttgttggatctcatgttgcaagtaagttgaatcaaccttttgcactcaaactcgacatgaacaattacacattgtggaagacaatggtcttagccattgttcgtggtcattggttagatggattagatggatacctaaaaggtactaatgaaggttaaaccgatcaagtttctccttgaagattcgtcgacaagagaagaaggtgtgactgtgaatccagaatttaaggttggctcggaagaccctagtgtgatatcttctacaagttcttctgtattggatgttcgattgtgttatacgaaaagatggcaaggaaatcttgatagacaacaagaggtcaaaatctctaaactaataattaggtttgtgttatgtataattgtgttgagatacgggatttctggttcatattggattcaacatatttttattattattgtattccctttcgttgcgactctaatataaaccctaaagttcaacaaaatgatcttaaaatagaaacaacaataggcccccaacatttattgcaacgcctaaatggttaaaaaaggagattggtatgtggatttaagagttagcagccacatttcaacggacatagacaatatgactcaaaaaacagactatactagtgagaaaaaccttacagtgggcaatggtaatcaattaagaattgctcatattggtaacaattcactaatttcccttgataataaatccttaattttgaataatattttacatgtgccaaacattactaacaatttattaagcatctctcaattgacatgtgagaataatgtatttgttgaattttttgccaaacaatgttttgtgaaggatctggacacaaagaaggttcttcttcaagggacacttagggatgggctgtac

SEQ ID NO: 163850 - DNA, 1194 bp, Cannabis sativa
gcaaagacccctgaagaattgtggaaagataaacctccttcactagctcatttgaaaaatctttggttgtgcatcatatgcacataaagttgaagataaactaggaaaatgattagtcaaatttattttcttaggatatcgaaagggtataaaatgatatagattgttatcaactgaggataacaaaatcattataagtcgagatgttattttcaatgagctagattttcctcttaaaagaattgagaagggcagttgttctgatgttgcaagaaatgaaacacaaatcaaaactggtgtacacattgaggtggaacctatacaacctcagatggaacaagaactatagcctgaagcagaaatggaatcataagatgaggtactagaagactactagctagcaagggatagaactagaagagaaattaaacctctagtcagatttgtgaagcagatatcattgcctatgccttagttgttgtcactgagtcaacagaagctgtaccaaaaagttatcatgaagctgttactgggaaggatgctctaaaatggaacaaggcaatgtctgaagacatggtatctttgagaaagaataagacttggatagtgattataaggcttgaagtgcagaaagtgataggttgcaaatgggtttacagagttaaaccagaaattctaggacaggaaccaacaatatacaaggctagactagtagccaaaggattcacacaagtagagggagttgattattcagagatttgttcacctgtggtaaagatgaaaacaatcaagaatgattcttgtagttgttgtacaaaatgattgggaaatagaacaaatggatgtcaaaacagtcttcttgaacggtcaacttgagaaaacaatatacatgtctcagcctgaaggattcaaggtggaatccaatagtggagaactagtatgtctgctaaagaagtctttatatgggttaaaggaatctccaaggcaatggtaaaaaaggttcaattctattgtgaccaaagtgggatacacaagatctaagtatgaggcatgtctccacttcaaagaatcagaaacacaagcaactttcttgctcatctatgttgatgatatgcttataatgggaaaggattcaagtcaaataataagctaaaggaagtacttcatggggagtttgatatgaaagatttggga

SEQ ID NO: 163851 - DNA, 1216 bp, Cannabis sativa
cccccccccccgcttgcctttcaagtcatgaacaatctcattcgcaattatcgagttttccgcaatgtttctgccttttacaaaagcagcctgctgaggagaaatcaaattatctaaaaccgctcccaaccgattcgccaagattttagagacaatcttataagtcaaattgcatagactgatgggtctataatcgtcgaacttctctgcttgaggcttcttagggatgagcacaatgagggtcctattcacctctttacagaactttccattgaggaagaattcctgaacaaactgaatcacttgcgtccccaccacctcccaatactgtttaaagaattttacaggaaaatcgtccggaccgggagactttaaaggaggcatagaccacaccaccctcttgatctcttcctccgaaggacaagcacttaaccgatcattttccgcctccaaaatgctatttgctatgtagtccgacaaatcctcgtccacaacagggttagtagaattgaaaagcctttgaaagttagaccgaaagtactcggctataccaggtctctcttcaacaatagatccatcatcttctcttatcgcccaaatatgattccattttcgcctaaccacaatagacgcatggaaaaactgagagttcttatcaccttccttcaaccaagactctctagatttctgtttccaaatggactccaaccggttctccacttcgtccagctcaagcataatggtcccttcaatctcaacattttccttcgatggagggcgattttgcacctcacaaagaagcttttcaagctccttgatcttagtttggcaatgcccaaagacaagccgattccattcgcttagagccttagcagttgctttaagtttgtagcaaagaatgaagctgtgaaaaccttcaaccccacttttccacgtgctttcgataattctgcgacaatcgttatccctactccaagcatctagataacggaaaggggcaataaaattttccctttccattctagtatccaaaataataggagcatgatcagaatggcggatcaccaagtttcttaccccagccttcttgaattgagttattcaattgttaggttataattagcctatgtttcgggtctttaaagttagcattatctcgtctattggtgtcttttggagcagttttatgcttgattttcattatttcaggttcccg

SEQ ID NO: 163852 - DNA, 817 bp, Cannabis sativa
aagtagatccagccgagctggatctttcataagcatgcgaagcgtgcatcattcgatcgaaatgaacataattgtatcagaaatctgtaataaatattacctttggcaatttatcttgctgggccagatgatccacatgaagtctgacatttgatccagcaaaaggccatgctcgtttatcaacctcggaatatacatttgctactatgtcaaacagtgtaactgctccattttctatggcttttagaatagaagcttctctacttctacggttcctgaaaattaatgataatacatgtcattgtttcatagtattagaacgtaaatattacaataatctgaaaatttatattgaaccacaatgcatgcactgtcatgaaaagaagaaagagaaagtgagttattttccatactgtagatatccacaaagcatgtgctttggccataggttaaccctcccatgcattgggatcaaaacatgtggagaaaggtccataaatttgtaagttgatttgaaatactcctgcataaacaaaatagtttttcataagctgagttgtgattttcaaatatttaaacatttagcatatgatatctctatgcttgacatttaattcaataactttttggggttttaagcaaatcatttttcaaataattgacctccacaaatgttaaagtgaataatatggaacttgtccacaactctttaaaaaaacattaatagttgttttaaagacattaagtgaaattaataagtccaccctatttttcatctctcatcttagtgtcaactactttgatctcctcttcggtt

SEQ ID NO: 163853 - DNA, 3305 bp, Cannabis sativa
tttgaatttatgttttccagcctcattcttaataagatttgttcttcaaaaaattaatagtatattcaagcgagacacatttaacaatggttaatgataatactatgaagaaaatcgttgatgctgatccaaacatcattcaatttcaaacaaacaaacctcactgtaagtattattccaaatctgccttactctttactcattcacttgtcatttataaaaatcatatcatcttacttacactcaaattgttgtaactaatatgcttctattgttgagtttactcaaacaatagatggggtactacctattgaattaggattgagtgtatgaaaatgggtataggcatttaacaagagtgtatagcacaattaacacttactccctcttattctgtattttttttttagattggaccgagactccgagagatatcttagagttaattttagagaaaattgaatcattgattgattttataagatttggtgccgtttgtcatatgtggcatgatataaatattattaggttccaatgcttctaactcctattgaagatgaaaacaataacacatggaacatgtataatgttatgactaataagttcttagaatcaacgcttttactaccgtatgataaacggttttgcggctcctcaaatatgttgaaccatatgatcctgacgattattatgaagcagatccatgccaccatgttttcagagcactacttacagatgatcccttagcaaatccaaatggatgtatgcttgtagtaatatttagtagcatgtacgacatggctttcattaaattgtcaagggatgatggcccccaaatttggataaaaatagagccatatttttgttcttttgatgtcattcattttaagggtttattttatgcgataattaacgatggtaccttaagatctttcgatcttagaagcccttgcgtcgactcaacagtaagagaacttgctcgtgagattccattgccgcatttgggattgaagagatacttggtggaatcatatggacatattatattggttgaaaggttttttcgttgggatattaaagatgaaattcgtcgaacttggaggtattgcatggagtcaaacaattggattcatatgaaaagtcttggtgaaatggctttgttccttggtgataactcttcagtatcggttttggctactagatttaatgggattcaaccaaattgtatatattttacccatgatgaggatgtgatttgtggttaatcaattcctatgattttcgatgtaggactatatgatctagaaaacgatgaatttaagttacactttactattaactcagctacactcaacaaaatgaatcgtcgcccgcctatttggcttgtacccacgctttaggaatctattagattagcccttcttactcttttgaaaattacttgtggttttaatttatttttttgggataattacacaaagtattattttttttaaaaaaaatatatatatttttacatttatttatttattatatttttatggttttgtatagaaacatcacaaaaatattaaaaaaaaattacataaaagtaataggaaaataacatgcaaacaacatcaaaacaataataaaaaataacatacagtacaacaaaaaagactgtattttttgtaaatataattataaaaattgtaaaaatatttaaaattctgtataattgtatttttataattttttagttgtttttatgtatttgttaaacaatggtttttaattttgctacaatatcacccactctattttccccactttattttatgagtaactaggaaacaaattgctatttagtgataattaagtcatatacatcgtttgaataaattaaattagaattaagaaatatatatgacaatgataaatctatagagaactaatgatataatttgaaaaccgttgttatcattgtattttcttggtactcgtcatacatttaaatctcacagtatcttatttgtaattgttactatcattcccaagtttgtttagtacataaaataaattaaataatgagttaaacaactcacttttgtacataactaaagttgtaattgttacactacatacttcttttaaattgatgcctttaattttttttctctttcagaatctattatgtttacctttttttttttcaatcattctaccaattttacctctatcatttcacgatagtctccattctttcctaactaaaattttgccctaatttttttacaaacctacacatccatctccaaataacacaatttattatgtttgaaattgtgtcttatttatgtgaggttatgaaggtaatttgagtacaatactaataaaaaatgtatatttgaattaaattttatttaaatataaatttagttaatgtataagaaaaaaaagtatttttcaatttttctcaataaaatggtctcttaggccaacctgaaaaagattcaaatccacccaaatagcaaaaaagctcacaaatttggctaggtatcctaaattagtggctaaaaaaagggaataagatttaggaaaattctacaatacaccactttaaaaagagtgtatcgatgaacctttatctatttcggtatctaaaaaattacttagtctaattttttttatgttcgtatacattatagttatttaagacatctaacaaaatttagaaaaatttaaaaaattttaacacgtcgaaaacaatgttcaaaaagtttgttgcaaacatgacttttttattttatatgcgcatgaaatagacagtttaaacattgatttcgatattgtaaattattctaaatttctcaaaattttgcaggatgtcttaaataactataacatatacaactataaaaaaaattagactaaaaagttttcatagataccgaaacagttaggagttgcatcagtacactcattttaataaggtgtattgcaaaagcaccctaagatttattaactatttacactaaataatatttttttaaaaacaaccattaattaaataaaaatataataatatataatgattttattgcataaaccaaaagactatggaaccatcaaaatagccacccaaccaaagcacatgccaacttattctaatgacaaaattagttaatttatggacttatttgacacacattcaagaataacacataattatgtttcattaatgctaaggggtgttttaataaatagtatttttttttaaaatatatatataattattgatataatagttttttttttttttt

SEQ ID NO: 163854 - DNA, 1317 bp, Cannabis sativa
gaattacaattaggtaaatccattgaaactcttcaaaccgattgggggggtgaattcaggtcttttacgaattttcttgctgaaaatgggattcaccataggcacccttgtcctacaacacatcaacaaaatggtcttgctgaaagaaagcatagacacattgttgaaaatggcctagctcttcttgctcaggcttctttgccccttaagttttgggatgaagcctttagaactgctgtgtatatacacaataaactccccactcccttgctgaactttaaatcacctttggagactctctttaatacaaaacctgattataccacatttaaaacctttgggtgcaaatgctatccaaacataagaccttataattaacacaagttagaattcaggtcttctccttgcactttcatgggttatagtctaaatcacaagggttataaatgcctagactctaatggcaggttgtatatctctcgtgatgtgatttttgatgagttttcatttccatatgagactgtgtctcaacattctaacactcaaaatcacacagccccttcctctattctcagtggtatcattcccaaatgttctcattataaagaaccttataccatgacagatttaatacaccaagctgatcctaataccagtcctggtactaatgacactgctgttcataatgagcctgctgttagtaataatcctgttgtctctcatactccatttcatgctgaatgtgaccaacatgctgcaattgacaatacctttgtgcctaacagcttgcttccagatcagtctcagtttgttgatgcaggtacacattctggaacgtgcattgaccattctggtgtgaacaatgctagctcgagtggccatgttgttactgttccagcttccaatagccctgcttcagcttcaactcaggaggctggtgggaattctggtattccactcacttcagcaacatcaacacttcttcctcctgttctagcagacaccagaactccccctatctgttcttccccagcagctttgccacttatagctggttgtatcaatgctcctggtaaacataatgttcacaagatggcaactcagtccaaacttggaatttacaaacctaaggcctttttggcctcaagagaaccatcatctcttaaagaagcacttcaacaggagcattggaacaatgctatgagtgatgagattcttgccttggctcgaaatagaacatgggtgttggtgagacttcctgaagggagacaagctataggatgcaaatgggtttacaagatcaaagaaaaccccgat

SEQ ID NO: 163855 - DNA, 1404 bp, Cannabis sativa
ggaatgagaaccagatttgtactgtttaaatcatcaggaatagtggccgaatgaaaaaactcttggacaagtttgaccacatcaaaaccaaccacgccccaacacttctgaaagaagcctggagtcattccatcagggcctggagacttatcaggatgcatgtgaaaaagagctcttctcacttcttctggagaaacaggtgctagtaattcaacattcatctcatgagtaatagaagggaggatatcatcaaaaataccattagaaatactaccagatgtggtaaagagatccgtataaaaacgaaccatgtgatcatctaagcccgactcccaatctaaccaccccccgttgtcatcttgcaatttatgaatcatattctgacatttacgagcactagccaaagaatgaaaatacttactattcctacccccctctttgagccagagttgctttgaacgctatttccaaaaaacttctcttttagtaagcacttcaaaaagatccttctcagctttacaatgagcttcaacagaaacaacatcattcttccctttcaaccttcggatatcagccttgcaggtcgaaatttgatgtttaaaattacatgttatctccttaccccaagcagctagaatctcaccacatttagaaattttcgattgaatagaaagagttgtattttcatgccaacatcacgaacaagttgaagacaatagggctcacgcaaccaagcattttcaaaccgaaaatgcttcaccccagtgaagaaatttcggataatagggtccataaaaatagggcaatgatccgatgaggaggcatgcagattaaatagctttgcagttaaaaaatgattaatccaagaaagagaagctaaagctctatcaagtcttacctctgtccagtttgtagtgcctctacctctctcccatgtgaaaggatgcccatgaagctccatgtcaacaaggttacaatcggctaggactttggagaagccttgtataagtctctcagggtatggtcttccaccatgtttgtcacgctgactagtgacattattaaggtctccaatgaacaaacaaggccaccgagtatcatgagtaagttgacgaataagtccccaagtgttctctctctgacttctatttgcatcaccgtaaattccaacaagtctccaagtaggcatattatgaacatgagtgagaatattgatatgtttatcagaaaaatcaataatttccccttcttcactatttttccaaagcaaagcaagcccaccactatgaccatgggcctccacaacaaacattcgctcatagcccaaagacaaacagactttttctaaaatggcttttccacacaaagtttcacaaagaaaaataaacttaggcttcttttgga

SEQ ID NO: 163856 - DNA, 1282 bp, Cannabis sativa
  modified_base (1177)..(1192): a, c, t, g, unknown or other
ggctagtggtttgtctttgtatggatgctccaaggccgagatccctctccttctcgtcgatctagtctggcagcggcagtttatgtggtctcgtcgagctccctctcgtccgtccgccccctgaagtggtcgtttcctactatcataatttatattgttttaaaaaaaagtcactttatttgttttcagaattgtacatatgtatttactgaaaaacaaaaaaaattcatattacaattgtaataatctttgatttggtataattttaataagttattatatttaaattgaaaatatattaattcttttttattttaattaatattatcttttatgaaaattaatgttgttatatatatatttgatatttaaaaaaatatatattaaaaagtaattcaatttaatttacataatacttttgtcaacagttataaactgtcatttaaagtaacttttcccaacagctataaacctttatttgaagtgaattttctcaagagttatcaactgtcttttaaagttctacatttttatgacacccacatagtcaacgattttaggaatcgatgagaaatagtataaatgacagttatatattgttgggaaaagccaattttgttgtagtgaatgtttgaagccaaatgtgctatgcaactccttcaacaaggttcgaacaatgttacttcctactacactagacttaaatcattgtgggacatgattcaagaatatagacctattcctgtttgtaactacagagctatgaagatcattcaacaatatcaagaagaggatcgtgtccttgaatttcttgttggattgaataaatcttatagtttggctcgatctcaattgttgatgcatatcctctttctatcatcaacaaagcttttgcttctatcattcaagaggaaagacaatatggcatcattgttgtccatgttgatattgagaaacccatccctcctccaagtggtgagtttgtatgaggtgttcaatcacaaagataaaaactcatatgcactcattcattgtggtattactggatacaccatggccaaatgttacaggcttaatgggtatccacctagccataacttcatagcagtttttcagataagggaaatggttcgaattataccaagaactcacaagtagggttgttcatccgatccannnnnnnnnnnnnnnntcaaacaacatccaatccgcacttagtgcggatttcattttttggatccaatccaatccacacaatagctcaaatccaatccaatccgca

SEQ ID NO: 163857 - DNA, 870 bp, Cannabis sativa
atgacaaacatagtccttcagatgtgcgggtttgtggatagatctaccactttttgattgtttaagttgggtatgatctgttgtgattgttgtttgatttggattattgacatcgagtatgaggagagatttggtgggtgctgctggtgtgatatgctcagcagtgtcagtatttaattgttgagaatcaatatttgggactgtgatatttggttgaacatcagagttgcattggatagagtcattgtcaacaataggggctgttgtaatgggtggagcgtgtgatgtatggctcgatttttgatcagcaacaggtgaatctgttgtggtgtttggggcatctgatattgcaccaggtgctggtttagcatgctgaattgctgctggtgtgagagaagtgccagaaacttggttttgtgtgggaataatattggtattaggtgctgtttttggaggtacacaactggtgttatttgtgtgttaacccgagatatgggttgaaacacaggtaggcatagttcttgaaaaaacttgttgatgttagaatgagaaatgtggccaataaaaagaaaaattatttcataaaagactacatctcgagagtgatatatttgttttgtctcaatatcaagtagggtgtatgctttcattccttgggggtagccaataaaaattgaagcacgacttctaggtgaaaatttgtgcctagtagatggtagagtagaagcataagctaggcatccaaagcaccttaggtgttcataatgagggggtttttgatgtagtttctcatatgaagtgctaccttgaagtagaatggaaggagttctattcattaagtaggtggcagtatgaatgagatatgaccaa

SEQ ID NO: 163858 - DNA, 894 bp, Cannabis sativa
  modified_base (825)..(832): a, c, t, g, unknown or other
agagagagagagagagagctataggcgtgtggataattaaaagatcctaattcaaataggcaaaggtcactgttcgaaataggaaaaataatatatttttatcttatatttaaattataaaaaaggataattaaattcctaggatataggactaatatcttgagggaatatccctatcttcacgactgttggattttccttgaaattgttgttcaacttgtgaatcttctagaaggctcgttgtgggccacgcaatcctttcagtatttctttgaggctgtctgcaagtgttggccggccaagtatggtccggctaggggaaccttagcttgtcattttcttcacgtttaaacttgcttaatagtctcaaagtcttgataattaatgaaccgtgcaaggtaaccctgtccggttattgacaggctgtattctacgtggtttcaattttgactatgtggacatgccacgtcaggtggaaaaaaatcggaataacatttgctccccatgcccctgtttggacgtctatacggatagaaacttttctgctatagtcttgattgtaggagcctttactggactgctttgtctatccaactattggactcttcgaatggcttgtctttatcacaaaaaggaactttattttcaatcattatgaggatttgtgtaatgactgcacacttccttatatttgaactcatggtcttcttttcccatgcatagctatttttgtggaaaaataactactcattaagtttcttgggggaaaaatattccagaacttatataaggttcatgtaaagactgcttagtttaatttggaannnnnnnnttaattatgtttaattatgaaaaattatttatagctatttaaataattattatgctgttatt

SEQ ID NO: 163859 - DNA, 948 bp, Cannabis sativa
tggtcaaagcaccgcattaagtaggggtattattacctttacacccctactttagagacattattgcatgcttcagaatgtgcccaacccaaatcaccacaaaaggtataagtacctttcaatgatattcattctttacgctgagctaggctggcctcagcttttcccttacaagagagggtacttccttgacttaaagtttgtcttgaaacagaaccagaaaagatacttcaactttagtcagactagctactagatgttgggtgatactaacaacacacccttatcgaaggtggaaagatatgccaagcactattttttggacatagcaagtttgtcatcatcgcttttagagagtgccaacttataaacgctccattcacacccttgaaatgcgggatagatccaatagtattctatccctcccagttgataggaagaacatattgtggctagcctatacaaccaacttccaaagatacagtttgtgtcccttagagtttggcattgtatggactgagggcccattaagaggtctaaaaggagccccatcagctaaggacgcttgcccagatggcgcacgtactcttgatatggacgatgacatccccctctcaagaattgcatggaacatggagagtagagaaaaggccctccgctaatgcttggctcgtagaggcactattggggacgccactttactgattaggcttggagatcagggttctaccaggcccacttgccgcttgcctacatctagaggcaagggaacggcagctgctcacagtttagatgactcctatttcaaggatgatggtagttgatagttgattgcaccaacttttttactttttccttgtatagaatatttgtaacctgtattttgactttgttactttcttctgtagatatggcttcatggcttagggatctttctagagagccctc

SEQ ID NO: 163860 - DNA, 629 bp, Cannabis sativa
agtagctgttaagatgctttctcagttatcaaatcacggttatcaacaatttctagctgaggtattcattaattttgtatttataactataaaatttgtctttaaaccatatgttcgcatatacaaaattaagtaatgtttttgttttattatttaaatgtttttgaaatacaggttaaagttcttatgagggttcatcataaaaatcttaccagtcttgttggttattgtaacgaagagtctaacaaagctcttatttatgagtacattgccaatgggagtttagattctcatctttcacgttaagttgctaattttaatttctacatcaaaatataatttttataaagaatacaattgttaattttcattattagtgttactagaagataacattatttgtacacttcatatatacagaaggcgttggcaataataaagatattttgagttgggaagaaaggcttcaaatagcaattgatgctgcccaaggttacaaagctttcacattaactgttgtgatcgatgatcaccttgcaatcaagtttgaacaatgagaaccaataaccaaaacaatagaactaacagcagcaatgctgtagcagtgttgcagcaatactggtataaaa

SEQ ID NO: 163861 - DNA, 1746 bp, Cannabis sativa
ttgcccaaacactcctatcaacttattcaaactaaagattcttcaaagaaaccagcttccatcatgtgcttatttcatagctaatttaaattagctacagtatcttcattttcttctccacatctcaagacgagcatagtacttgcttctttatatatatatttaattattatttatttttgtacttttattttagttttttatacttgtttctcacattatatcatttaataaaataaataatatttaaataatacaaagataaaatagaaaaaatctgatatatggaataatataaatatttgaagtaaaataaataaaaaatttagtgaactgttttaaagacatcatagagacactaatgagagtgctctaaaagcttggataaaatatttgtaaaaattattgttatttgtttttagtttttggttttagtttgatagaagtgggagttacaaaactcaaaaaaaaaaaaaagttactaaaattatatgtcgcctagaatcaggctattatgtcgcctgatgtaactattgaaaaaacaagagcttaacagccatgaatgcaagagattaagcatatttggttttcaatcctagtttttgtgaaactccaaaccaccttatttaattgattttacacttaattaagagattataacagtcatgaatgcatatttgatttttaagctagtgtgatcatcctaaccattatatagaagtttaaaatgtacattttggataacttagttttttatcaataagcacttgctagaaaatacaacgctagataattgttaaagctatttccgagagttctcttagtgcttaaaggtaggggaaataagtttttagataaaagtgataatatattgttcaagtcatggtaatacccactaatccatactcaagattatgagtgagtgatcttcttcttcatattatatgtatatattatataatattatgtaatatctatccttctacttttcttatatatataatatagtatatattaagtgatgctaacacatgtaatgcacgtgcctagctcttcttatttcatttatttatatttttatttgcttaattttaatttcacaaataattataacaaaaatttatatgatttaatttttacatcttaattatagtgcaagtacaaaatacatattttattattatactggaaatacaagagtaaggaacaaacatttaaagttggcattatagacaatttaaatactgctttttataatctacattattataaatttctcaaagttttgcagcatattttaaacaactactacatacatgatcatggaaagaaaaaattaaaaggggtgcatgagtacatcatttttagggaatgtaccgtaaaaacttccaacgatatctactattaaatttttaaccagtaatcattaaaaaaacaagaaaaatatcttagagaaaatttttaatacaccccctaaacaggtaatctagtagatcccattatctatttcagtatgtaaaaaagttttttagtctaagtatcttttatgatcatgtatgttgtagttatttatggctacctataaattttcagaaaatttttaaatagtatataatgagaaaatcaaacaattacttaccgcaggtataagaaaaaatattcacatgtgcaacaaaatatttgaatattatttttctattgtaaactgttatacccaaaattcggtaagcacatcagaggaagaca

SEQ ID NO: 163862 - DNA, 1185 bp, Cannabis sativa
caaattgagctgagtttattacaatctttgtacctaaaatctctcagattcaatagacaaatgtatgagcatgtcattagtattatcattaaattatttaattttatgaattttttatttttcaatggatacgcgttcaattatttttatctcactcgcattcttttttgcttataccatatcatcttgaaatcaattttctctttacatttaaaaataagatagaacaaattttaattttctaatagctacatcaatcttcatatccttatagtttgaagaactttatactaacattgttaaaaacatataaaagagtataccaaataatcaagcttaacaagaatttaaaattttgaatattgtaagttgttaaggtctcacctttatttcttgtcttaacattatccttgttattgttttccaagtgaaataaagctactattatttgtggaacttgatatctcacagctttaaaaccctcacgactcttccaacgaatttctgacaatggcttgattgtaagacttttcacataatctgaaaaatttccatctctttatagaagcggaagcaatgagtatattttttgtaacaaaccaaagaagcacacaactttaatacaacaattagccatatcgaaaagtataaattttagagaatgacaagcacaaggagtgtaaaatgttctaagatttatttcaagcagtctactttgtacacgtttgttattccctttcatgttagatccattgttatttttcctcttttatttctaaaattaagttcaagagtcttcaatacatgtagaaatttatataaacaaaccaagccctgatgtgtcatttatttaaatgaaatcaccaaaatattcttcaacaaatattgaactttctaaaacatctacacatcttaacacaatgttaagatacatttacttctcattacttgcatatggcgtacaattaagtatcactaaaaactattttgtttctttaactctactaataatcgaggttttcatatcacatgccaacatgtgtattattttattttggattttgtgactcaataatcactactacaaaaacgccttttagtgacacgttttgagagtgtctaaagtgttttagtgacacttcaatgcgtgtcactaatggaggtgtcactaaaaatactttttag

SEQ ID NO: 163863 - DNA, 679 bp, Cannabis sativa
caggatgctagcaccattggcacaaagcctgtctcaactcctatggaaccaaacacaaaactcagtaaagataatggtcaactctttgagaatcctacaaaatatcgaagcctcgttggaacttattctagctaaccataaccagaccagacattagttttgctatcaacaagctcattcaatgtttacaaactcctcgacaacctcacatgcaagctgctataaaagtgctccagtacttaaaagggactcccggtcaaggtctattttttcacacaacattcactcaatctctcacattacaagcctttaccgatgctgatgggggaggctgtatagatactagaagatccataaaaggatagtgcaattttcttggccaatcattcatttcctcgaaagtccaaaaaccagcaaatagtgttgagatcctctactaaagccgaatatagagcaatgaccaacaatacatgtgaactaacctggttacattccatcctacaagattcaatatcaagttcaatatgccttcaaaactattttgagacaacactacaacaatacatatatcggaaaaccctatttattatgggcgcaccaaacacgtcaaaattgatagtcatgtagtataagaaaaaattaacattggtagcctcaagatgaaccatgtctcctcaca

SEQ ID NO: 163864 - DNA, 1478 bp, Cannabis sativa
ctatccatttgaaccatttatacgtggctctttttaatgtgattaagaaatattgacacctggccttacatgacaccttttcatcttcatcagctcattaaatgtgccgagatggtactttgggtcaattgtaccatcatatggtgttatatgcagctccttgaagttcggtggaagtgttccatttgaatctccctcgagacagggaattcttcatcaaactcctcatcatcattcaagtctccaacgtggcgataactttctttcgacacaattcttacatttctgcctccaacctcttcatcctttcgctcatcctcttttgggggttagcgaggggaacttgggtcttctatgtgttttgcactgggcccgtgagaagttctcctcttgtccgattcgtgtgggacttatcactaaagttgatggataagcccattcgcttaccttgctcttggggggagccatatacgaggtgtcccctagtatgagacttcttgggtgaagtctcttccttaggttatggggtgtttcactcagtgaaatctcctcatggtgggtaggctcgagttgtctcagctggcccattgagctcttgtcttgcgacaagctccttccgtgttcatcacttggggtgctattagtggatgacattgaatcacctttgctagcatatgcagttaagatctcgatccccatttggtggctttcgtgacaaaaatgcgaggcttgggttttgtctttgagtgtgtcatttaaaacttcttgcataccaaccacagtggtttttagcctcctgttcttccagcggaagtctcttatttcctcttcatagtagtgagcttgggagcttgaactcaccgagtacaattgcttttcctttctatgtccacaccttgaagcgtcgaggttcgatggcacaaatggtgaagggcaccgcaccagagatagcgttctcgatagttgagtacttctatcgatggggttagccatcgatgtagttatcaagtcacgtagtgctgggggccctcttcgtgtgttttctcggtggtccacactgattatttttcctttagccctctctgacggcaagaggttgatgtccccttcttatggtggtcgactagttatcatctgtgtgaagtccattttctcagagacgatgggaatgtcttgacatctccaaaatgataatgaattgtttagaaactaacgtagctagaacttgtcattccgacagacggcgccaaattgttgacgataaaattcgtcaactgaactttagttaaaaaagaaaatgcaaaagggtaaagatcaaaaacataagagaaattcagaacattaatagagaaaattagtgttgtattgaatctttaaactcatatcaaaaaataatcctccccctcttaaatggaagagagaagtatttatagagagctctaatggctcctgaatacaagtggtcccaacaaataggg

SEQ ID NO: 163865 - DNA, 1777 bp, Cannabis sativa
ccctgcgagctaagcgctggtggagggccctttctatcttctcaaaattcatggctctttaggataaaagaacatcatcatccatatcaagagtaagcccacctcctgggctagcctcctcagcagttagggctccctctaaaccacctaatggaccctcagcccgtgtaactccaaactcaggaggatacaggctgtatctccaaaagttggccacattggcgaaccttagtatattcctcctctattgggagggacagaatgtggttttcactatccctcctctgaaggataggaatagagtgtttgtatgtgggtactctctgaaaatggtggtttcaaacctgttggatatccaaggcaatgaaatagttctggggatatccccccacctttaacaaaggcataatgttagtgtcacccaactaatgatagccaatctggatgtagaagtaaccgtttcattctagttcagagcagacttcaagtcaaaatagtatccaatctcataaggagtacgctaaggccagcgtagctctacataaagaacaaacatgactgaatgatattgatacctttcagggtgatttgcattgggcacattctgaagtatgctatgatgtctctaaagtaggggttcaaaggcagtactggcccctgctaaatatggtgctctgaccacaccatctagttgagggccaaccggtgcactcgtttgtccctcaacgacacctcacactggacgcctctcaccagtcaactctttcttattgtatcaatagtcttgacattaataacagatggaggagagacccaacagtctccctgcaccgcaaaatttaggacttgaggctcagtagcctatatcagaacatggtctacactgatcactgaaggctaaccaagcctattcaaggactgtctatcataatcatacgagcctactagagggctgttattagagaaaatagaacaggtcctatactacctcttcctagcaggtacagcctcctcaaccttggacttgttgtttgggctctcaatgccatggttggctacaagcacctctgcctggccaacctctggatctccaccatctagaggtggcgtgccctcctccactattttgaccgtacctattattatcaaccaagaaatgtgaaggtcaaaaggtggcactctacggtaagactacttagttctggccataatgaatcaatatcaaccttgagatcactcagatagttgctagagaacagacttgatgctagctcacaaaggctagactgactgaacttatgacaacacggttgtcacctcccaagaccaatactcaaaatcacctacataaaagagacaaggggaggtgagcaaccagagaaagctacaaggtacatgcaaaattctagccaattgtacccaagggtacttcccggatacgctacatcgtacaaggctaggtattagcaaagtaccatctcaagtataccagcttagacaaatggcgagtcttaaattgtacatttaactataatacactcatcattatgccttataaagtttccaagggaaccaccagattatagttgtatatgcctacacgaccttgacaaaaccctttccaaggtcaaaagagaacaaaaacttggatgcccacttggaaactaggccttagccaggtagggttcctaagcttagagagggtcagcaagggtgccatgtgttggaaaatattttaccaggatcttagatctactcacaagagatcggaagagcg

SEQ ID NO: 163866 - DNA, 679 bp, Cannabis sativa
tattgattgcaacattttagactctggtgtttctgcaaaatcaagaaaccataacacagttatgaaacaaaaattaagcagtgcatgccaacaaacattagcagacaattgatgaagactaagacttgagcgtgagtgcaaccatcaagtgaactactgtttggctttccatgagcaaataaagctatgttttatcaattcataaagctactatattctttgaagtttgggaaggacatggataggaagggatctaccatgaccatatttggaggcgacacatgattactctaacccctaaggacttcacctattctatgaaggctagggacacggaacaaatgaaagagccttttacctcttctttagatgctagtcctgggtgcactctcatctagatatgctgcaatgaacctctctttaagatcttcttcttaagctaggggctttggatgatggagtgcctagtcctccatcagatgcttatcttcttgtaaggccccatttatgaactctacgacctcaaaggtgattttttctttagcctccatgggaatatttccaatgccctcattgttgatattgttaacactttaaaacctagctataaacctatgctcacagatcagctttgtggtaaccaactgttgggttttgtgccctaaataaaacccattac

SEQ ID NO: 163867 - DNA, 1944 bp, Cannabis sativa
aacagaaacaagaatggagaaaggggtctccttgtcgtagtccacggccaagaaccacattgccaactacttcaccattgagcataaaagagaagcttacggaagtaagacatgccataatcttattcacccacgcacaattgtagcctaaccgcaacatcattgccttcaaaacgcgccactccacatgatcatacgctttcgccatatcaagcttaagcacaaccttcattccattacgaaaccggttcttcctcatacaatgtaacccttcaaaccccacaatagtattatcatgtatcaatctaccttgtacaaaagcactttgagaggttgaaataatagtacccagcaaacacttcaatcggttagctagacattaggatactattttataaatgacattgcaaagacttatcggtcgaaaatcttccactttcataggcttatcaaccttggggattaatgcaattaccgtatcatttaaacaatcaacaggagcatcattattaagaatgtttaaacacacaacaatcacattatccttaaccttaggccaaaacgctgataaaatagagcaggaagcccatctttaccaggtgctttagccgggttcatctgcttcaccgcggaaacaacctcctccattgtaaagaggggcaccgaatccctattaatctctagtgtaacttttggcagcactacattcaatattgttccataatgtcatcatgatcctccaaagccgtgaataaattactaaaataatcaccaataatctgctgtaccaataccctattcaagcagccccttaatctcatttttcttcttacgagcagatgcctttcgatgaaaaaaatcttgtattatgatccccactttcgagccacattgcctgacttctttgacgccaatacttttcatctttatccaacaacccatttaatttcttctcagtatttttttatagctaaccaatttcctagattttgtgtcgccatcaactccttcaataaatgtcgcgctttagatactttctcatcattctccttcttctttttctattccattgatgaagagttttcccacaatttttcaccctcattctgaaatttcccacaaattgaacctccattccttcatgccaaaacttatcaacaatatccacacactccttctcctcacaccaagcttcctcaaagtggaaccaacttctccttctaatcggtccacacaaatcatccatttgcctaattgggacatcaaccacaagggccctatggtcatattcaaaccaatcaagaatagcaatgtctgccccttcaaattctcttaaccattcagcattacaaaggcccctatccaaccgctccatcacaccattcgcttcatgaccattgcaccaagtaagtttagttttattagaacaaaagtctataagccgacaatcattaatcgcttctctaaaattctccatagcacgaggaagctgctcacgacctcctactttctctgaagatgagacaatctcattaaagtcttcaacacacaaccaaggtggcgaaacctcatccttaatcctccgaagcaactgccaagaaaactgcctttgagatacctccggatggccataaaaactcgtaaacacccacagtaaaaacccctgtccagcaaccccagctacaatgtgtcctggggaactagaatcaacatgtacactcacctcattattccacaacaataataaactaccactcaaacccacccgatccacagcccaaaaattatcaaactgcaaacttctactgacccgttccgcctgactcctagttaatttactttcagaaagaaaaacaatactcggactaaaatctttcacatgggattgaagagcacgtaatgtccaaggattcccaatcccttggacattccaacttagtattt

SEQ ID NO: 163868 - DNA, 2128 bp, Cannabis sativa
ttttgagatccaaagagtactggcgagttgtctttgaaggaattattgaaccaatggccagcataacagtggcagatgcacaaagagcatagctagaagcacaacggttgaaagatttcaaggcaaataattatattttcgaagctattgattgcacaatcttggagaccattcttttcaaggacacttccaagcatatttgggattctatgaagagaaaatatcaaggctctacagaggcaacaacttcaatcacttcttacagagttcaaaatactttgaatgaagatggaagaatcaatgtcatattatctcacttggaaaatggtgattgtgaacaaagtacgaatccacagtgacataaggtaggacgtaactgtagttgagaaaatactacaaacaatgacactaaaaattaattatattgtttattgtatagaagaagctgataatattgatgaacttttggttgatgaattgcaaggttctttgttagttcatgatcacaaactcaaccaatgggagaaggagaaggaagagtaagccttaaaagtctcaacatatacaataattcaaagctaaaaggagacaaaggacgaggtggaagcagaggtcaaggtagaggtagaagtggaaatgatcgcggaactcaataataataccaaaaccaagacattattcccatgacacattgaagagaacaaggacaaggaagaggaggccaccaatcaaatagaccaacgtcagcaaacaagtctaatttggaatgctacatatatcataggtacgtacattataaatatgaatatcgtactaatttgaatagacaaagtggagaaaggaatttttgcggaaaaggaaaaagaagtgtcacttttgatggtgttgctttaacaaaacatgtggtgtttagataccggttgcagcaaccacatgtgtggagataagaaagtattttctaagctgggtgaatcgttctgcaacactgtcaagtttagcgacaactccacaatttagaaaaatttacccacactatctctaatgttctttttgttccaaatttaaaaacaaattttcttagtgtaggtcaactacaagaaaaagattgagatttctattaaagatagagtatgtcagattgaatatgcaaatttgggtctaattgctcaagttaacaggacgacaaatcgaatgttcccactttatccctacaataccattcattcgtacctatcaacaaaattgaaagaggcatcatggccatgacattttcgctatggtcacttgaattgtggtggactaaaaactttgcaacagaagaatatggtgactggttttccttcaatcacagctcccgccgaagtgtgtgaaaaatgtgttgttatcaaataacatcataatccatttctacatggacaatcatggagagaaaacagaccattggagttgatttattcagacttgtgtgggccaataaatttatcttccaatggaggtaacaattatgtaattacattcatcgatgatttcagtcgaagacatgagtttgttttttgcaggaaaaatctgaagcttttggagcctttaaaagttttaaagcgcttgttgagaaagaagttggtagccccatcaaagttcttcacactaaccatggtggagaatacaactcacgtgaatttttatatttctgtgagatttatggaatcaagtggcagctcacagcaacatacacaccccaacaaaatagagtatgcgagaggaaaagtcacactattattaatatggtgcaaaaccttttattaaggagtggacttccaagaagtttttggctagaagcagtcaattagagtattcatattttgagcagaagtctcacttttgttgttcaaaatatgatactagaagagcctggagtagacgaagaccagctgtagatcatttgagatcttttacgtgtattgcgtatgcccacattccaaatgagaagaagaagaagctagatgacaaaggagaaaactccatttttctcggtgttagtgatcaatcaaaagcctacaagttataaaatcttaacaccaaattttcgatgaagaaagaacctgggcatggaacgagaacattgtttagt

SEQ ID NO: 163869 - DNA, 1596 bp, Cannabis sativa
gccgacacttctctccatataattaatttggcatacaaactaaaatatcaatttatttactaaattaactaggtttgttttattaccgattatttgttaaaattgtgtttacacgtataccgataatgataaaatatgtatttcttcacttatatatattttaatataataaattgaatagtatctaaaacatctgttacatttaaaaaaaaaaaagtacctcaatgtatcttaaacaacaaaataatataatatagtctaaaaatataaaaaagaaacaaaaaagtttcttttaatattagtcgtcctttttagagataaaaaaatatatgtttcacacacattaaaatagttattttattatttatatatgcttaaaattctgaaataaattttttaattaaaaaataactaattgatatcttattcatatcaaaagtaattaaatggttacttttttcaaaattcccaaaaaacgaaaaattttggaaacaaaatttttatagttttttctattttcggtaattgttttgaatttcggtatatatactgacgtggcacaacggtatttgtgtaaataattttcttaaaaatatttttataaataaaatcaattttaagtataatattgaaaaacagaactttacaataatatactactataacaaagtaatgacaaatttgttatgaaaaaaataatatacccaaattgattactatataatcaaatataactaattttatattaaaacaaatatctatatatctaaatacttattattaataatgactttcttaaaatatttgatacttattaaaacaataataaaatatacataaatgattctttcttaattgtcatttagatggaaaatcacaatgttagtatacagtaattaaatatttaattttatatgtttaataagacattaaaattattaataggtaaagtgtgatgttattgttctcaaataagtataataccttttaatatgtgtattatatatcatttagctatcacattcaaaaatatactatttagtagctagttatatatgattatacaatattatattaattattttacatttcaatcatagttacaattaagtatcaaatttaatagtagtatcgaatcatttttttttttcttttttttgtagcaagtatcgaaatcacatttttttttttgaacagaagtatcgaattcacattagttacaaataagtatcaaattttataggaaccaataactagttaatcttaaatatgttattattagataaaaagaatatattaaatagtaaaatattctattaaggagaaaaatatgttatatgtcagattttataaaatactaaataatatctatttatttattagttgtgcaccagtatactacaataaaaaaaaaataatgaaacagcaataataatgattttggtaatttgatataatttgtttctcttctgtactgaagtgttatcttccctgctgcgtaatgctgaagttagtggtgatttgatggaatttcggtgttctaggtcggggcctcgggtgactcacattttctttgctgatgatagtttgatcttt

SEQ ID NO: 163870 - DNA, 764 bp, Cannabis sativa
tatgatatgcatatattaataatattaacctgatagcaggctccacattctttgccagagttatagagagacgaggttactgcagtaatcatggaggagaatggatattgtgataccaaattcccgtacccacaagatcctcctgcatatatatacccatcaaactctattcgatcactcacgtacagtgtacttgtacaccaaaataactatatatagcaatgtcttctttattatgagacgaattttcgtcataattattaaacttgagtaaagttagtaaatatattatataaatatattatggttcatatgtctataatttatttcatatatatatatatataacacttttataataataataataataaaaaaagaagctataaggattcaatttttgtctccaccttcatcacaaataataataataataataatagacttgctagcgtatatgtatataccatcagttccggcaccattagggctgccgtaccatgttgcaccggcggccgaccaataaggggcagtggcaaaggctgacaagttacggttaaaccctatagaaagctcaacgtagcaaaacattattgctacaattaacgattgcttgataagagccatgactatatgtagccacagggccggccctaggcataggcgggcccgcgcctagggcccacactttccgggggcccgaaataaaaaaaataaaaaaaattatttaggcttttatttaattaaaatttaagtgtattata

SEQ ID NO: 163871 - DNA, 1364 bp, Cannabis sativa
tttgtaagttttgcaaaccagagaagagtcatcagtgagaagtctccaagcttgttttcctagcaaagcaagattgtaattcctaaaatcacgaaaactcagtccaccaacattcttgtgcttacacatcttcttccaactaacccaacttaccacctgcttatctttcgaagattgccaccaaaatttactcatgatactctcaaggcgatggcatgtttataatggtagcaggaatactgacatgccatagctaggaaaagcttgtgttgccatttttaaaagaatctctttgccagcctttgataaaaaccgaccctcccattggtgtattcgtttctgcactttaccctttagaaagcccaaaattgcattattattctttccaactaagtaaggcaatctcaggtaagtgcttgagtcatctgcttcttttattcccattatttgactaatcgactgtcgagtagcaggtagagtattattgctgaaaaataaagaggacttgtcaaagttcacaatttgtccagatgcttgcttaaaaacttgtagtaaactgatgacattggaggcttctctaccattagctctacaatataaatagctatcgttggcaaatagcatatgggatataacaggagccccattagctaccctacaacctttaattctgccagtaagctcaaaatgccttattagagacgagaaaccctctgcacagatcaagaacaggtacgaggataacggatcgccttgacgaatgcccctcttaggagtaattggtcccatatctctaccactattaaggattgtataccgaactgatgagacacatttcaaaaccaacctcacccactgatcatcaaagcccatcttgtgcatcatatctttaaggaaaccccatttgactcgatcgtaggctttactgaagtcaagactaacagccatgtagccttctttgcctcgcctctttctttttaaatagtgcataacttcataagaaatcatgatgttatccgtgattagacgccctgggacaaatgcactttggttatcaaatattaactgtggtaagataactttaaggcgattagcaagcaccttggataagattttatacaagacgttgcataaggagataggcctaagatcactcatagtagttggattcctaattttgggaattaagaccatatgagtatcatttagcccctgaggaaagtctctagttgagaaaaaatctctctccaatttgatgatatccgccccaaccgtgctccagcaacgttggtaaaaaccaggtgtcatgctgttgcgatatttagcacacgcaagtgcacgtatcgtttcaagtagtagactca

SEQ ID NO: 163872 - DNA, 848 bp, Cannabis sativa
ctactatagttcaagttgtcatagttttgatattttattctttttttttcataaatgtatatatacatatatttatactagtatgtatgtgtatctcagtatctgtattaggtttactgccaccaaggttcttgaaatcgtgttatgtttgcatggcagcactttgtggacctattcttttattcatatatatttatgaaggttaaatttaattcactagaaacactcatatgttttgtaaactctccacaaaaattacataacaaaaaattatatgaaggttcttgtactttcgtttaaccttttgctagctgtttcgacttgtacttgtttcttatttttgactaaaagaaaatcatttaaggctggggacagtgggcctactcatttaatgttttggactgggatcttgtcattttatgggccttgaaaaatgagtctcgcgtggcccataaatgttttcaatgattattacaacaaaataattgcattctcaaattttgaccaccagaaatttatgatggggttacttttacacaatataatgacactactatttcgattttggactggtgatataaaatgaaaaaattatttggaatattagtagcaaaactacattgtactatacattttgttacactttttcaatagaaaaaacactttattaggcacatgccaaaatattcaaaaacacttgcacaaagtcgggtaacttcgactaccaaactctcgcaacatctaaagaatgagctgaattagtgagtttatgaacaatgtgttggaatttattttattaagatcttagatctactcacaagtatgttgtttaacatcttaaatatgaa

SEQ ID NO: 163873 - DNA, 1001 bp, Cannabis sativa
  modified_base (750)..(752): a, c, t, g, unknown or other
  modified_base (906)..(911): a, c, t, g, unknown or other
caaaccataaaaagtgtcacagtaaaagaaagttacatttttaccaacactcactactctgatattttttttcacaagtgacatcacacacacgcacgcacacgcacgcacgcacgcacacacacgcacacacacacacacacatccgtgtacggaagatgactacctacaacttaagcctcatctacgcagccaaataatcaatatagtattgtagttaccctatcgatagacttttttcaccaaacaaaaccctaatgggttcgggtctgtctgacttattagccaaattgtctataaatatgacattatcctttcatgcaaaggattgagaattttgtgtaagaagacaatagtaaatacaacaaaaacttcatagccaaatagtataatattgacttgtagattaagacttattgacgtctcaactacataaaaaatatcatcttatttatttcttaattttatcttcttcaacttaatttatatttttattcgatttgcgaaaaaaattaataaacagttaaattaagttagttaaatgaactctcgtattataattatatatatgatttgtggtcacatcaataaattatgagaaaatttataattatttcaatagttggatgaagattattttttttaaaaaaaaaatcatttaggaagcaaaatcatagttctgaatatatatatatatatatatatatatttaagaataatttgcattataaatacttaagtttaactctnnnttgtaaataaatacgtaagtttaattttttgcggtaataatatctaaattataattctagaacatatgtagataccgggctattaagtgtcaattaaattaccacgtggcaatttttgattagtttaggtaattaattttttattttttatttnnnnnntaatttaaatataccaatatgaaaatgacacgtggataatgatttaatatttaacagtcaggtacctataaaattttaaaaatataattt

SEQ ID NO: 163874 - DNA, 2725 bp, Cannabis sativa
acatgtatatatagtggaaattaatggcattacttaatcaaaaagattaatccattatcttctacaaattatggaagttaaagacatgaatgaagttaatgtgaggtcaatataaattattggtcttgattacaataaggaccaattacagtaagcaaattaagaaacatacaaatatggctagctgattgagtctgtattacccgagtcaatcaaagtttccatgcaatctctttagtgaaacctaacctaggattaatacatggattggatgtgatatacatacaaaaacaacaaaagaaaaggaaaacataaacataataagcattgattgaatgagttattcaaatttgtataaggtattaaggttgtatcagtttcagattaataatatgcaaaagaaagaattaactactgaaatgcaccattcatatgattcatagtattctatatatttgattaatcataaccactgctctaaaccgtcgagaatagcaaatttttcccgacggtgtaaaatagtcatttaattttactagcgacggtcccaaaaaaaagcgttttaagaaccgtgtggaattcccctttttatagtagtcatttaagttgattcagcaaaatttcaaggggggcttcttcaattaataacattttcgaaagaacataccaaaaagctgtaacaacaaaataataatgaaacaaagtagaacagagaaaagagtaatacctatattttgttgtcattgaaatatatatttgggatgtgagcaataattggccagtcctcccctgtctccctctggactcgtggtcttagccgtggacaatcataaatgtgaagatcagaaagagaagtgggtagttcttttggcaagcatttgagattaggacagcctctaatcgtcaactcctccaagaaggtgaggtgctgaaaggctgcctcgtctaagtacctcaagttgaaacaatgaccaattgtaatcttctttaaactaatcagaggggcctgcatgagttgagctcttgggagtaataatggcattaattccccgctttgatatattttaagctctgccaatgacggaaaataatctcctaacaatgtcactttaagtctcttgcattgctgaaaaagaatattcttaagacgaggaaaaactccaccttcaataaatgaccactcttccatattatgcataattgtaaaattcaaagtctccaaagatctaaagaatggctttgtttgtattgcaacagaagaatcgagagtagcagaacaataaaactctgaatctattctcaccacaccattcaaacccacaaagacaaggtctttgagagaaggaagttgtcccaacgacggcaagaagctgcaattactacaacttagcaacttcaaacttactaaattagacaagcagcgatgatctcccatccaatttgggaaactgttggctttgtaattccaaatgctaagtttcttcaggtttggataaggttggagggcagtgagtagctctctttctttgtgcaactcatcagattcaggttcatcgtaataatcccatcccaaagatagctgactaagaaacttcttactttttaatgatacatctgaaacttcctcaaggctactcacattttgtagtcctccaataaaaagactcccgtgcagattttgaaactctttcaacaacttaatgctacaacaatctctatgtcttcccacaacaaatctatttagtgtttgcagattttgtagcttccccaattgcaatggcatctcttttaaataaaagggaacactaagatgtcgcaacttgattaaatttcctatatcagttggcagtctagtaacacgccaacatttgtccaacaaaagtgtctccaaattatacaacttacatattgtattaggtatctctttaataccttcacaatctaactttaaatatcttaaatactttaaattgcttattgaaccaggaaactcggtgatataatcgtttcgtatggataatacccttaagcctgagaatgacttgtgcaagtgttcaatctttaacaactttagacgatcaatatgtaaatcttcttcccaaaatattgtgcgcaaaccctttgctttgaataactcctcaaattccttagggtcatcagcttttgcacattcttctatgtacgaaaaatgacgaaccctgttagaacatttacttatattatgcatcattaaacaaaactctctagacacaaatattgccaaatcatgtataagatcatgcatgtgaaaagttggctccacctcagagtagttttttgatggttgaaaaaatgacattgagataagatctttgaggtacttctttccaatttcttcaatcctcattcccttcttaggaagtacaagaccttcggccatccacaataagatcatctcttcttcattgtattcataatctttaggaaatatagcacaataagagaaacaagacttcaaatgtgaaggtaagtaaaaatagctcaaccataatgctggaagaataccaacactctcactctcatacaacccccatatatcgttgtttaatatctcatcccaatcctccttactttgttttccacgtaaaagacccccaagtgattttatagctaagggaagaccattacacttttcaacaattttttgaccaattacttgcatatatgagtactcatgtgagttgac

SEQ ID NO: 163875 - DNA, 2195 bp, Cannabis sativa
acaagagtaagaacaccaatttttgtcatggtttcggtcctccagatcaaatatgatccctggccatactccagctaagaaacaccaccaagctttcattaatggagaattagagtttacaaaaaccaatgacagagcatacaacactctgaaactcaagaattacaccctgagaacagccacagttctgactcccaaccccaagtacaccctcaagttcttaaccccacaagaacatgattacacagctctaaccccactcactcatacactctctctcccttcaattctctatctcaaagtagggaaaaggaaagctatttataggcctagcataccactgaaaataggagcaaagaacaactcctaacaccgaaagtaactaactgtcagagttagttaaagttagttaagttagttgttggctggtttagagaattaacttccacaacttccaccttaattctctaaggtagactacgagctcccatttcacataagccttgataatgttgaattctcaaatgtttcagcaagtaccaatattcagcaagctaagacaatgcatcagcttgctggaagtgagaacctttgttcctatttttgcagggttgtcacttgtgtgaactttttccaaatctaataccatatcttctatcttttctcaaatccaatataacctgacgtcaatgtgtttgctcttctcatggtatacaagattcttacacaagtgaatcaatgagaggctatcagaatatactgctcctttgtctttaagtagctgtgattcatgtaagattccctgtagccagattgattctttgaaagtttagtggtggccatgaattttgattttgttgttgaaatttccatcacttgttgctatcgagatttgcaacagatgcaactcatgttgaccataaacacatatactatagtagatcttctattgtccctatttgatgcataatctgcatcaacatagccttgtaaccttaaacttaatgagtctctttggtagatcaagccatactttattgttcctttcaagtatcttattaaccatttcactctattccaatgttctaacccaggatttgccataaacctgctcaatacacttagggagtgagttatatcaagtctggtactgaccatgatatacataaggcatccaacagccatagcatatggtatccccttcatgcgttctctctttgtttcagtctttggacactgctcattggacagcttgaagtgcccagctagaggtattgatgttgtcttggatgactccaagttgaactttttgatcactttctcaatgtagtttttttgagttagcatcaattttccttcttgccttttccttataacttcattaccaagcattttcttgacaactccaaggtccttcattttaaatttagaactaagtttgtccttaatgatttgaatttctgtcttgtctttgttgatgatcatcatatctttaacatagagcagtaggtacacaaccttaggtgcccctaattccttgtaatataaacatgagtcaaatttggatcttgagaatcaaatattactttgaacaaacatgttgaacctatgattccacttcctaggtgattaattcaacccatatagtgtcctttctaacaaacatactagatcagtctggcaatttcctacctgaaaactaggtagttgctccataaagatttcctcatccagaaaaccatttaggaaaacagttttgacaactaactgctcaacttccaagtcatagtatgcagcaataactaacatcatcctaatggttttgtacttcaccataggtgagaagatatctgtgtaatctacccgttcaacctgtctgaatccctttgctaccaacctagcttgggacctaggtggttcaccttctgtcattccctctttttccttaaaaaccatctgcaagagacaaccttctttccttatggcctaggaaccaaaatccatgttttgttcttcttcagggattgcatttcttctcccattgtagctagccatttcttctttaatttacttgtaataacttcttcataaatggttggctcaggatcactttcaagttgtacaacagccaaagcctatgctattaggtcagcctcaacatatctacttgggggttttatttctcttctagttct

SEQ ID NO: 163876 - DNA, 1467 bp, Cannabis sativa
aggtattgatcaactcatagtcgatttgaactttgaattctccttgaagaatattggttagttgaacttcttccttagtagttaggttatgtatacttgagattgaattcacttatctcacgataaatacatcaaagatctactattcataaccaagatgcaaggagctaaaccatgttcaaccccaatggttagtggactcaaactctcaacctatggaagtggccccattgaagatgttcagttatatagatctctggttggagctttgcagtaccttgtgatcactagacctaaaatttcatttagtgtgaacaaggtttgacaatatatgcaaaatcctctgtaagttcactagattactgtcaaaagaattttgaggtatttgagtgggataatgaactattgcctgcatttcaagaagcctaaacagctgcagaccctaatgatagaagatctacttctagctttgctatatatcttggctccaatctcatagctcggtcttgcaagaagtagcacacagtttttagatcaagcacaaaagcaaaatttaggagccttacgaatgttgtagctaaagtaacttagctcaagtctctgttttcaaagttgcatatctcaattcatagactgccatccatatggtgtgataatttgagcacaatattattgactgcaaaccttttacttcattctaaaactaaacacattgaactggacttatactttgttcgagagaaagttttgcaacaacttgttgaagtcaagcatgttcctacaattggtcaaattgcaggtagactaaaaaatgcaatttctagtgtaaagttgaatgtctttagagacaaactaaaaattgaagatgctacaatcttgcgtttgaggggcctgttgagacaattagtgagttactgcctattttctgttatgattgttggctatgctgtgattgctagctgtaactttcagttagtagttagagttatttttctctattcaaagtgtaatatatagcatcctttgatgccactcattcaataagaaattaccctttgatttcttctcttttaatttgtttctctttcaaaatatttaaaaagttcaataactacaaattaagttaactttaaaataaaatctcatacttttattttgtggaataaataaaattttatactatacactcaagtgactcaaccatacataagtataattcattatttgattgtctatatttacatatccactattcctaaattatttctacactttatatcaatcattttgcatacaacctttagatatagattttattactcttttataattcttcacaatggcttattcttttgttcccatttaaggtatgataagtgatcgtactaatgccgatgttgctgtggatcagtaccaccgttataatgtaagtacacatatatatttttttttaaaataattaatata

SEQ ID NO: 163877 - DNA, 1834 bp, Cannabis sativa
agtgtacctattggatgtgaattgctgaatgtcaattagttctctgagttcatcttttgcagcaactatttgcttccaataccagctcccttggtttggggctttgtaaccccaccaatcttcctctttcaggtacacattgtggatccatttgacccaaagattatcttctttgttagcaatggcccacacgtacttaaacagggcagcaacattccattcagatgtctttgtgaaaccagcccctccatcagctttggattggcaaatcttgctccaagcaatggttccaatcccttgcataagatgttggctcttccataggaaggccctgcatatggcttctagctcatgaatgactctctttggtaatttgagtatttggcaccaatatgaatggattacaaagaggaatgaattaataagaacaaccctacctgcaaaagataagtttcttgtgctcaatgtttggattcgggttgtcattttttcagcaagtatactacattcttgctttaaaatcctcttgaaacaaataggtatgcccaagtatttgaaggggaggctttgttgggagaaccctgaggcatccaacacacttttgacttccccatctgccatattgcagtaatatatggcagattttgacttttttggtgtcaatccggacgtgttggtgaagagtctgagcccttgaagcattagaataatgctgttataatctccattacagaacaaaaggactagatggcgaaactgaggtggttaagtttcaaagattcacacctttcatggaatgagaaatcttgtttgcttccaacttccttcattattagggatagatattccattccaatgacaactagaagtggggatagggggtctccttgtcgcaatcctctcttagattcaaagaagccatgcaaagttctgttaaaaaaacagagagaactttggtgttttgacacaattcatcaccaaatagatgaatttgtcaggaaaaagtaagcccttgagaacctcctctataaagtcccattcaattgtgtcataggcttttttgtaaatcaagtttgatcatacaattggcctttttcgatttccttccatagtgctgaaccaagtcttgacagatcattatgttgtggctgatgaaccttccttggacaaagccaccttggttttggactataagttctggcaatatgtgtttaagtctcgagcaaaggatttttgtggctaccttgtatattacatttcagcatgctatgggtctgaagtcacttaaagagttggggcatttgactttgggaataaatgtaagtgtagtgtagtttatttcctttaggatgtgtcccgagttaaggaaagatctaactgcatcacatatgtcccccttaattaaatcccaattatcctgaaaaaaatagcttaaatagccatccggacctggggccttgcttcccggaatagcaaaaaaagctttcttaatttattcatttgttacagcagctaagaggccatcaacttgctattgtgtgactgtagcaccatttctgaagactcttctattgacttttgctctgtcaataatcatatctattttaaaattggtttattttgttattttaattttattttgttattttaattttattaaattataagattaaaaaatgatattgaaaatatctatttggttattttcaaataatttatcttattataatttaagtttataaaataattcaaataaacctagatattttaaattagtttcatttttgaattttaaatttttgaaaagatattttaggttgtttttaacaaccct

SEQ ID NO: 163878 - DNA, 1273 bp, Cannabis sativa
aagaagttgttttcaaccccaacaaaccaatgaaacccgtaaaggttgggaagcatctgaaccaggaagttaagaaggtcctcatccagttctttcgtgataatcaagaagtgagtgcatgggtacatatcaataaggtgggtatgagttcaaacgtggtaactcacgtactaaactcaaaacaagggcgttcccgttgagcaacaaaagagggggttacgtgatgaagctagatctatagccttcggagaagaagtcagtaagctttttgccaacaacttcattcgtttagtacaaattgatttgtacttagctacttattttattttgattttataatgtcttagaaactattagtattgttattttcaaagattgaataaaaacatttacttattaaaaaattagttacatttatatattgccaaactcaaaaactagtaaccaaggataatagttaaaccttagttacttgagagacataagagtatagatataactatacttgaatgaaaaatcctataactaccattaataatgttttttggaaaagtggtgaattttttaaatacacaaacacttaaactaaaaattgtaatggataaaggatggatttaattatagtcacatgataagcactcaatcttgaaagtgagtattaactctaaaaaacaactagtgagtcaaacatgttaatcaagggagctcaaagagcaaactcaccatatcagctatttaactaaaaaaacttagaaaaatagggtgtataaagtacttgggataatataaccaaggaaattaaaacacaacctcgagctagggacaaaactccgctcgcacatcaaaaaagagtaaggaatataactttgctcatacatcaaaatggagcaagaggctttaactctactcaagtatcaaacgtgagtaaaagacttaactctatttaggtgtcaagttcgagtaagagaagcaacacaactcgaatatctaatgggatgagatatataactctctccatatagcaagaaaagtcatgagtctcaactctacgttttaactccgtactggaggtacacagttcaatatgaaaggaaattgtgtctacgtatgacgcttaagcaactttgacccccatgaccaaacatgttaaccggagccaacaccaaggccgaatgagagctagaggatcatcgtcaatgcagttgttgttgggttttgtgccctaaataaatcccatttcaatataatcagattaacttattaataaagatca

SEQ ID NO: 163879 - DNA, 1462 bp, Cannabis sativa
cccaacatcaatcaaaatatagctatgtttaccctcgattcggcaataatcaatcattagagatgtattgcacctgtaattagaggtaagatcaggcaatgctcaaagaaatgagttactgcctaaaggtagtggaaggtcaaataggtacttcaagaaccaaattcaaaactttgtcactaataaaatgtagaaaaaaaacacacacacagcagaattacaaaaatgacgcaaacagaacataatcgttcaaactctcaaatcttaattaatgttacagagaaaaacaaatttccattacactttggaaaattaaagttgccacaaagtttaaaaataaaaaataaaaatccattacgaaatcaaccatcaaaacaacactaatctacatcacaaccataaagaaaaatcaatgtgaagtgaagaaaatacctaagcaataacaccagaaagaccaccaaggcccactgttgatgatttctgaggctactagaaaggcgtcgatggatcgattaaaggaaagagattggggtttcaaaatgtacgaaaggagtttcgaagctctcaaactcactgaagaagacgaagtcacgaactggggcaaagagaacgagagtgaccacgctgagcagtatcacaagcactggaaatgagacattgatttcatggagaatgaaaatattttttcaattttacaatccacgaaaaaaatcagaaaaatgcaatatatatataaatatatatcatatcacaattataatctatttttatattaccattgtatgttcttaaaacaataatattaataataataaagacaaaaaaaaagattgctagattcataacattacagattgaaagtggtttgggattctccaaaaaaaagagtaataatgtcttcgtagcttacctaatttgtagattttggttgtgttggagaataaaccactattgatgagggatctagatgaaatcaaaggaagataaagaggcccaattcaaaatcctctaattcaatctgttagaggttatctttccctctaactccaagacttcccattactcctggacgggatgaagaagacgaagtcacaatcagttcaagaaggagaagaactcgaagagggggtcaccgtttcgatcgccagagccctttatcgcaaaatgggatgagtaaaatctgattgcaaagtgaaggtttagaaatatatggttactcactctcaaatgtatatgttacagtcattttttaaacctcataaacacaatatttgagtgtttataacagacgcaaaagggagcgaattgttttacaatttttgccaattatcgtcagttttgtttttaccgtcactttagtaaatgatgcaaattctgtattattagtgtcatttagaaatagacgtgcccaatagtttagttactattcacgtcggtcaacgctatgaacagtagcgttgac

SEQ ID NO: 163880 - DNA, 948 bp, Cannabis sativa
caattctcaaagcttcatctatatactaaaggcgaagagaatgatcatcattaatgaggagctctaacatattacataggacatggttttgatttattcaagatattttgcatgattttgatttatttttcatcatgaaaattgagtatttttgctaggtctagggttttttcttctaggtatgattttttttatatgcggatcataataggaaaattaaaggaaattaatcatcaaagctttgatcttttttagacccattctaactcaagatggattgggtcgttttaattcaaaatagattgggtcgtgaattttatcgtttcacagtggatgattgttctatgattctatttcagttttttttttttttttttggtccaggtaccatatgtaaatgggtttggctctgtcccctcttagatgaatattattcttagcgatagacgaaatcgatatttttctttcttttatattgtttatatttgtaagaattcgcttgatttgtattttttgtaagattgacctattatcaatttattttatattgaaatttgatttgattttatatagtataaatatcgaaaatttgtttgattgtgaaaagaaaactaatcttctaagatgcatttaaatttataagactttgtttatcaggcttttttttttcattgtttatagtttagattcttcattaagaatcttcactataaatagcatggagaatgcctgttttacttggagtgtatttttggtagtcaatacgtgcaggagctaagccaaaaataaaatttataggtgggacaattattgtttttttcatagtgaaatgctaaatgtatggttcctaacaccctctatgaaatgtcataagcaattggggctgcatactctcttattgctcgggctctatcatcggccaaagcaataggattggcttcattatga

SEQ ID NO: 163881 - DNA, 2053 bp, Cannabis sativa
gggcacaaaacccaacaaaatattatcaagtaattttttgccaggaagttggctcatagattgaagaaagaaggggcaaaggtaaattctttctaattgttccacgaaaatcatgatttgatttagaaacaataattgttgcatttaagaacaatgtagtttttttttaaaaaaaattatctactttaattagtatactcccactaaaatagtttatttattaactttgaatatacttgatgattatgactattgaaatttaattttaactcttcaaaattatcctcctttttattgtcatcttcattgagatttaattgtatgaacaccttctactaattcttctcaatttcaatgtattccaaatacatcctttaaaatgcttttaatttatttaaatcatatatcatgttaatttaaatagttagttataatttatttcaccaaatagattcaattaaagaatgtttaaatgtgagttaattcaattaaaaaaatttaattcaaatgtttatgtttctactaatgattccttaatgaatcattaacatacatgattggaatataattctatgtccatatataattgaatagtcattcaaatctttaattaaatctcatttaatatctaagtttaataatagaattaaaatcatatttttattcattttaaatttaattgtaaaaacattcataagttattattgtaaaaagttacctgtgtattatttagtcaaaataaataattataaacttgattttaaaattatactataagcattaaagtcttttttagttaactttgcacatataagtttgaatttaaataaactttattgataaaacaaaaaaaaaaggttaaaaataaaattattcaaatgaaataatttttaaatgtgcaactaaaatttaagaactaaaagaaattgtctttaaaatttaaactaaaaaatgactttttatttctcttctaaaattcttcttcatctcgaactttgttgaagtttcacttcctcaaatcatcttcgtcgtctattcacgaatttgcatacaagagggaaaaaatgtcagtggttaagaataattcaatgcactacattatttataaacaagaagaaaatcaaatcatattaaccttgctccatttttatcattattagactgaacgaaaaaaaaataaaataacgcggaatgtaagcaataggtgaatattgtattaagaaaaaaaaaattataataaatattgtcataaaaaaataaatataaatattttaacatatatttataaataaaaattataataaaaaattaacaataatactcacatttttaataataataataataataataaaaacacatgcatctcactcaaaataaacaaaattatataaaaaaaaggaaggaattaatcaatttcaataataataatgaaaaaaaaaaacatgcatatctccaatagccggtcgttatctcaatatgacaaatgtgtcgtgtaagaagaaagtgataatatatttagtcaatagtcagatcttttattatttttgtcgctaaattattaattttcccattaaggacagtaagaagtaaactatttacggtcctaactaattactttgactttgaacatacaagggagggagaccgacacaacagaaatagagttcattttttttttttttagaggggagaaatagagttcatgacattgacagattataaatgtagcgatttattcaatgattattgatattctataaaaaaaaaaaattcttatattaaattattgaaaaatgttaaaaagtatatgtagtgtcaatatcgctattattgcaaagtatatgatcacagctgatacatttacctgtaaccaataattaatggtaccaatatctaatatgatattatatatttatattgcaaagtatatgatatgatatattatgatacattactctataaatctgtaggtgtggaggtagaaagagaaagagagcgccattttgtaaaacaattttctcgggaaagcgagggagagagagagagagag

SEQ ID NO: 163882 - DNA, 782 bp, Cannabis sativa
attgttatttcgttttctatttgttgctcatgcgtgaaaaaacctgctgttatggtctccttcatgaagccaaagttgctttgatctttggtgccaaaatacctctcgttgagcataaacctcgaacagctccttctcagcattcttaaatgctgctaccgaagtatcatctctgccacctttgtaatgagcaatttgctttttccagtaatgaattcgttgcttaaaattaacagtataattcttaccccactcggctaggtgttgaccacaaagagaaattttttctataatggcaagagagttattgatttcccaactgtcctttacagtttggatacatagaggttccctaacccatgaattctcaaatctaaaatgcttaatttcagaattgaaattcctagcagtaggttcgagtaaaatggggctatggtcagagctagttacctctaaatttaagagtttcgcagtgttgaaaatagtgagccagctatccgacactagtgcacgatccaatctcgcttcaatccaattcaaagagcctctccccttctcccacgtataaggataaccagtgaggtgaagatcgcatagactacagtccaataacgcttggttgaagccgttaatgagccaatttggataaggggaccctcctctcttgtctacctgcgatactacattatttatgtaaagaccgcttagtttaatttggaaatttagcagttaattatgtttaattatggaaaaaattttatagctatttcaataattattat

SEQ ID NO: 163883 - DNA, 1742 bp, Cannabis sativa
acaaatacttaagagatgctgcaaccaaaatagcactgacgccttcccttcctcgtcaaaaggggacttctcaaactagattgtttcctccacttccaaggattcaaatggtgactctaatgactctgcggagattgttttgcactcccgcaagggattatgaaaatcttaagctagaacgtgcagggattggcaaacccgagagcattaagacgtctcaaattgcttgtttcatagcaatctccccatgttctctttcttatggaggcaagactcaacaacaattctttaaaccgcactcgacaatccttaaaattcactcatagtctgaaggcaccttagataggactaagcggaggccttatgcttttatggaaagatggcattgatgtaaacctcaatacctttggttcttgcttctttgattgctttatgactgctactggtagacaacaattccatttcacaaccttttatggttctcctgtcgtacaaaatagaacagattcatggactctactccgtaaactcgcggatgtggctccattgcaaccatggttaattattggagacttcaacgagatattatcaaatcaaaataaattagggggtaccttgcgcagtgaatcacagatgactgcttttaggaatgcccttgatcattgtcatctttttgatcttccttttcaaggtgataactaaacttgggcaaaaaatagaataacagttaacacattaaaggaacgtctagattggtgctttgtcaatgatgtgtggaactcatcttttaaccaacctaataaagtgtctcacctggactactttaactctgatcaccatgatatatcagtatatgtctccaacgatttggcccctcagcagcataaacggcacaacagatttcgatttaagaaattgtggttatctgaccctgaaagcaagaccatcatctctaattgttggtcggctgatcactcatcaaaccctattaggagtgtgctcaataatttggattcatgtgttaaatctttgcaaaattggcacattaaaaaatatggtcgtatgaagaacaatattctagttgcacaaaagaaagtcgacactttaaacaattctcattctctgagcaatgaaacagctgctgctctaaaatataatgaatccattcttgatgatttgtcagaacaagaggagatgtactggcaacaactctcttgaattgattggatgcaattaggagataaaaatataaaatgctttcactctaaagcctcgacaagaaagtcaaacaacaaaattgctttcctcaaaatagaagatggtataaaagttacttccaaacacgacatgagcatagttattcaagattatttctccaacttgttccaggcttcttcaattgacaataacgctcttgctgcaactttggccactatcccaatctctgttactttggatatgaatgagactcttctcaaggcattcacataggatgatgttgaactggctctccattctatggggcctaacaaaagctcaagaattgacagaatgtctgcaatattctatcaaaacaattgggatgttgttggtaacatggtgaccactgctgttttaagtgttcttaatgatggtgcggatcccactccttttaactccactatcattactctaattccaaagataaagaaggcacagtacatgaaggatttcagaccgatcagtctttgcaatgtcatctc

SEQ ID NO: 163884 - DNA, 1603 bp, Cannabis sativa
caaacatgtcctctaaaatctccttattccattgatgcctgcctacactcattaaagaggaaaccttctgattcataaggccagggtgaacagtacgaacataaggatcagcattgtcagggagccatgggtcttccaagatggaggtttcagatcctcttgcaatgcttttcctcacaccagcaataaggagctgcttagtttcaaagatacttctccacacataactggggttatttccaagagaagctgacaagaaagaaccagaagaaaaatatcttgtcttaaatactttgctgaccaaagcattatcagcaacaaataacctccatgcttgttttccaaggagtgcaaggttgtaatcccttaagtctttaaatccaagtcctcctttacttttatgcttgcacaactttttccaactcctcaagaaacaccacggttgttgttggatgatctccaccagcagttactcatagcactctctaaggatttgcaagtgttcaaaggaaagagaaacactgacatagcatgattaggtagagcttgagccacaattttgagtaagagttcttttccagcttttgacaagaatttgccttcccaactttggattcttttacacaacttgtctttgagaaaaccaaacactgccttcttgctcctactgatgacgcatgctagccccaagtaaaggctagtattatctgcctccacaatacccattctttgacaaatatgtatacggtcaacttgttgagtgtttacactaaagaacacagaagatttcgagaaatttaccgtgtgtcctgaagctctttcaaagtcctttagtaagataagtaccttggcagagtcattttcattggctcgacaaaaaacataactatcgtccgcaaacaacacgtgtgatatgaaaggaacaccattagcaactctaatgcctttaatctggtgtgtaatctcataacttttaattagtgatgagaaaacttcagcacaaattaaaaacaagtaagaggacaaagggtcaccttgtctaatgccccttgatggaatgataggtccaatattccaccgactatgaataaccttatactccacagaagtaatacattgaagcacaagataaacccacttgggatcgaaccccattttaagcaaaaccgattcaagaaacggccattcgactctatcatatgccttgttgaaatcaagcttcaaggccatataaccttctttgcctcgtctttcgcgcttcaggtaatgcacgacttcatgagaaatcagaatgttgtctgtcatatatctggctgggacaaaagcactctgagtatctgatatcagatggggaagcaccactttaaaccgattagataacactttcgatatgattttgtatagaacattgcataatgaaataggtctcaaatcccccatcttactcgggcttttctttttaggaataagaacagtatgagtgctgtttaaaccagtaggaattgtaccataaaagaagaatttccttacaagagagcaaacatcatgcttcactatgtgccaaaatcttctgaaagaatccgggagtcataccattgggtcc

SEQ ID NO: 163885 - DNA, 2222 bp, Cannabis sativa
atgtcttggaaaccatatataaaaatataggaggaaatttggaattcgaaccggacgaagtggatagcctaacatatttaaggaaactcttccagcgattccggctttgtctctaggatgatgaaatttgcacgtcgctccaaacttgcaggttcccgtcttcaaaaagtactgcagagcgaatacaaaaacatattaatctacccaccaaaaaaaacaaaacgagagaacaaggggaaaataataaaatgaacaactatgcattgaatgaaaactatgcagtgcgttcagctaaatataagcttaagtacttcttaaacctcactttcaagcattgggaaaatagaaagcttaaaaaagaaacaatgaacatagcataaatttccaatgacctattttagattcagtatacaattcggttttcatacaaatccttacccaatagaatgtcctacaaaatgacgtatacatcccattaaaaaatccgtacattaagcattactgcaaactttatacttcctcccccgcttgcatgcaaacataaatttatcatacctactcccctgctcattcatgtatgactattgtaatcttaaatagcttaaatacttacacgtcctctctttcacagaatcttgattaatttcaaagaaaaaataatcttaggcgcaaataccttctagtgtgcctaaaaaccactcataatgtcataatacaaatatttaaaacaaattacggagaaaattatgaagagaataaaagcaattatacgtgcctgacactcagcttgtccaattctttcagggaactcgcccttcattcttgcagtggcaatagcctggaaacaagaagaataacctaattgcttgtttgtgatgcactcaaggtcaagaaatacaaagcatgataacattacttgagtatgtaaatactagtgtaaactcaaaagtatgtttctagagattcttgtttctttgttgttttgtgtatgcatcaatattattacaaaatcatagcataggtagctctttagtttattataacttgttaaaacaagctaaagctataccaacttcctgtttgggggatgattaaagcgacaagttgcgccaaatctacaaagacctgttctgatgtagtaagaacaatcttgctctccaggacgctcgggatatgtcccaggctccattgtttcgcttgatctcaaattcatttgccacattgcatctgaaatagtattagataggtatgttcaagacatacaacaacgaaaaaaggaaagaaaactgcatagtacagagctactttaaacaggcccagttcttccacgatcattatagcttgcaaactaattaccgatgctccacttaacaaatcaattatcatctgaaagtggtaaaatttacactcttacccaccgaattccttcaaaaatgtactaataaactcctaaatgacatcaaacacatgattttgtatgtggaaaaatcagaaaataaaagcatgtgatggaacaaaataggaacttaggaaaaagttccagaagaacacaattcattaaccaagtaaccaaaatagaacaaaattgatcgcacattattgtaattagttcttctccattcaaaacctgataattcatttatcataatttatccaaccaaaaaaaaaaaaaaaacaccaacgtttctataatgcaaacaccaattgattgcacgtcaaaaaatcgtcaaatttaaatacctttttcgcgatcatgaaatgttacaagtaaaaaaaatgcattttacattttgctgaaaacgaattcagtttcacttttaatctgcaaattatgttgtagaatgagtaaaaaaaatattcagagcctgaaaacaagaaaatacattttaaaaaattattaattatgaaaattttatattaaaaacgtcagagtgtcggtaacaaacaacaaaacggaaaacaaaaatcagcttaattcgatcaaaacaaataaataatgaaaatttcaatgtactgggctcgaaaactgagaacaagggaagaagaacaattaatcgaaacgaaggtaaagagaatggaaaggggcaaaatggaccattaacatgtggaatggagaactaccattcgttagtttctgttgattgagcttagaacaatgacaacaacaagaaaaacagacagaaaataaaaatgataataataataataaaaaattaaaaaaa

SEQ ID NO: 163886 - DNA, 1498 bp, Cannabis sativa
agtaaggagaagatatcgaggctacagttggttaagccatggttccccaggcaagatagcgacgacacaataagtattggtatagggaacaaggttcatttcgtcttaggtacaagtaaaagaggaagttctggtgtaacttaggatgtctgagacatcaggttaccagtaattctaggttatctgtgtgaaagtgacttgacatactcagacttagggatctaatgaggttgtaaaatgtaaagaactcactataaatagagccttggagctcattgtaaaggggactcgcttggagaaaaaatattagtgaaatagtagtttttttgaatagtaaagagggtaaaattcactttgtgtattcttctatttagatcttgaaatattgtcttgagttcttattatttcttttgacgagttcttaccgtcaacaattcggcgcggtctgtgggaagcgacacacaaaagaacgccatttctttacgtagaatcgttgagaagaagtcgagacattctcattgttgccaagaggtggaggtgcaaattgatggccttcaggtggctagatgcctcagaatagaggagcacgaatggttatgaacgcttaatggaggaagggaataggtggcccatggacaacccgacaagcaactagtgagatggagctgcatctccatcacggtggaggaaggaagcaaagtgcgaaggcttggggccccatctctgataaggccaacatagccaccgagaccaggagaccccgacagctcgcaccactgaccaggaaaggaaaagcgaatctactctgtgatttctagctctcggactcggctacacaatgaggagattttgtatccaaaagtgagtgttttaatatttatactcgcaagtgcacgaatcgtttcggaatataatgttcatgtaagtgcaaggtctaacccatgggagttgactaacatcaaaagtaactatttcaaacaaaataagaatattctaacatagctccaaagatttgatgagattttgatttagaaaaataaagtaaaagacaagtaacaaaaagacttatgattacagatgagtgagtatgaaaatgatttcaaaataagatgtctaaataagcttattaagatattaaaatctacaaaatgcaagttcaatagtatttataagtatattgatttccaagttcatatatagttgaaaaaatcacactatacttttcaaaatatattttctatttcagcacaagtttctttcaaaaaggtaggatttttcttcactttgaaaatgtataatttctaatcattaaatatgttacaatttaataaaattacacaaaatcaaagaaattatgtttaggcaaaatatgagacttatgttctaagaattataagtaaacaatttagcgaaagacatttaatcaaagaatgtcatatttttgcataatgaagaaccaagtgtaacattctttaacaataaaaaaatacatgatatt

SEQ ID NO: 163887 - DNA, 1157 bp, Cannabis sativa
gtacttactcttaagcatattaaagattgctgactttgcagggtccatagttgatgggtcgaattgtgatgaaaatagattaattaagcatcgtctcatgtcattcgccaaatcttgtgaaggcgcctgtgattgggtagattgggcatgactagttgaagatttacccctcaatctgcaaccaatttcatgaatgtgaccccgcctctgaccaagtgtatcttcgaataaggttatgtaatcagatgatgactcagaacagaatctgcctgagaacgagctgctcaagctgcctccaactgctcctatattaaatcaaaatgttagaataatacatcactaatattatgaaaatataataagttacgaaaacttacatattcttattttgcatattcattgataaattgcttattcttttcagtatggacttccctccatgtctcgatgtaatccggggtctcctattacttatcaaataaacattagagattatacattttaatataacttaactacagttatatttgagcttactaattattggcgacgctgagccaagaattttgttccttaggttgaaacatatttcatcttttcttgaattttcttattttgttcaaatcgagcaagaaaagctatgctagtaaaaatttcacactgtctttgccattgttctagagtactatcaattggaggatttttaatgcatcctcataatcctcaggtttcatatagaaacatttgaaattcttgtgtcgactagttttctttattctgtatctattagcacactcggtgttgacacattttaaaaaaaattaagtatgcagattctcctcaatttgatagtaatactacataaaaaaacaaaaatattaattatattaacaaatataattttagcaaagataatttttttttaattatttacccgaactcttctaagaacttgatccttgtactattggggcactacattctaatctttgaaatgtgtaggacacatagcagcaatataatcgctcaaaacacgtgggaaaattgcatgctctactcccaacataagatgtctatgaccaagataagatgtcttcccaataacacggatggaagatgtatcttcattgcacgtaggacaagctttatacccctga

SEQ ID NO: 163888 - DNA, 906 bp, Cannabis sativa
atatttggtggcaaccgtggatactgtggttggcctatgataaattcaaatctgtaatggagaatgtcagaggtactgcgccttacttattatgtgtggcggatttaatgtatcgcaatacaagaagttggaatcacggtttcctgagatttctttttggtaatgatcttggtgctaagatcggagaaatccaaattgtgaaaaatggtgaagaagatttccttgtttggaagagttcaaatacgggccaattctctatcaagggagcttattgggttgctcaatcgagcaggtttaatggtattaacagtatgtggagttggatttggaagtctagcatccatcctcgtctaagcatgatgctttggagggtttgtgctaatgtcctccccacgaccaacattttcaaccctgctgatgcttgtaagtgtttcttttgtgattcctgccccgagaacccctcccatttatttgtaacttgcccctttgctatggcactttggtttggctgccccttccctgtgagaatagactccatacaggttggaagtatcgccgagttgttgtgtaaactctgtgagggagttgatgctgaactaagatgtcaaatgcttggctgctttgctattatatttgagactatttggaacaccagaaataggatttttcatgatagggaggcctcttggagtgttgatcaagcgagaagggatattttaaatcggtaccatgaacttgtctcgacttcttccaggaatcttcagagccctgtagtcacagaggccatggaagtgtctctcaatatcacttccaagaacctgattgtagtggatggatccttctctggtggtctttctggctgtgctgccatctttctgaaccgagattctttgaactgtatttata

SEQ ID NO: 163889 - DNA, 1075 bp, Cannabis sativa
agatcctactaatttatcataaatttaacaaacaaatgaatgtggtcaatatcatacaattaattccattattttcaagtaaacattgaagatttgattattcattctctatctatatatttatataatgctactgtttaaggtgatgatgtggcagtttattatcttttttttttttttgaacataaagccttcattaatcaaagaacattacaaggaaatggtaagtcatgccttgcagcatgtcgagcacaagggggagtaaccccaatccacatagcactaacattgttatacaatgcataattggctaaattatgagcaacttgatttgcctctctataaataaataaaagacaaattagcagactgatgagagtgtagagctgttttatctccattatcagtccatctacatctcggcagccctcctggcccttcttaattaagttgaccgcctgaaaacaatccgactccactttaaaacaccccagacctctttgaataccagcctgaaatccctgcaaaacggcttctagttcagcagccagaggagaaagaaccccctgccgagaaatgcagcaacatacaaaattctccctgtgtcattccgaattaccacccctttaccacatcgtcctctctgcagtgaaacccctgcatctacattgacagtaaaacaaccctcctccggccgctgccaacgtcgatcgatttcttcttgctggcttgtgttcccgctactattgccattattataatcccttaaaaagttactactccattccagcatatcatcatttgtaggttgacagccgccatggttgacactatttcgaacaaaccatatataccagcagataaccataaacagattgaatgtatcccttggccacacaacaaacaaagcttgaagataaaaaaaatattatcattcacagcgtacctcttaatatcctgccataaaccacatttcttctattttttgatgcttgcagaacatccccgtaacaagtgagccatattttttccatattatcttaataatttaatttttctattttgtgatttttct

SEQ ID NO: 163890 - DNA, 999 bp, Cannabis sativa
taagtgccaaattgtagaggggccgtggaggtatattagttctattgaactgattttgataggcaaggttggcttcaggttgttgctcagtttcagtagtggcaagatttgctgtgagttcagattcttgatttgtcttttcaattctcgattcagaagcgagttatagggcctcaatctctccaatagagtatccttcgatgagagtatttgttgatatgacaaaggtgtcatagctgctaggaagacttttgaaaattgcagcaatgtgatcacggtctctaagaacctcaccaacataagcaagaagatcgacatgctgtttcactttgagcagatagtcattaagagatagagtgcctttcttcaagttttgtaactttgttctgaattcaagaattttcgatgatacttttaacgtgaagagttttcaagattggcctagatctgacgagttgtatgacatccaaccatttgagtgagaagactctcagtcatggatgataagagccatgaaacaagcagctggtcttgtacaccccagtcaagaaattcaggattatatgtttgagaggcacgattggcatcagtgaggaattgaggtggaggggcaccttcttggattcagtaattgatttccacaaatcgcagtaagaacctgttgtttccaaaaaagaaaatcatggtcatttaattttatagagagattgtgagtgaagtgtaccgaggtgaactcatcaggttcgcgattacaattcctctgcaaactgggatgtgtgttgatggagtttccaagattcgaaggattggcttgattttgagctgtaacagtcgccatgttcgccgttaatagcagaattagctctgataccatgttatggttatgattcctttggttcattataacaaaagatcaaaaggaaagaacaatgaagaagatgaacaaagaagaacatagatgagcaaagaggaagaaagacagaggaagtaaagaaatca

SEQ ID NO: 163891 - DNA, 911 bp, Cannabis sativa
tgcttgctttttggatgaccaggacacaagagtttcaccaagaaaaacgcaataacctgccactgattttctgtcatcttgactgcatgcccaatcggcatcggagaatcctgtaatatgaagtctgttggagcatgtgatgtgtaagccaaagtctattgagccttttagatatctaagaattctttttgcactgctccaatgaccggttgtggggaattgaagaaattggctcagtttattaacggcataggctatatccggtcttgtgtggcaaagatattggagagctccaatcagacttctgtaaatagtaggattttgaagtggttcaccatcaagagcagagattggttttcctgcagctatcggagttggacagggctttaaattgttcatatcaaatcttcttagtaattcttcaatatacctggtttgagtcaagtagataccagtttcatccctgaaaacctctatcccgagaaaataattcaaaggtcccatgtccttcagagtgagtttcttgttcagctgtgttatgaactctttaatggtactgggagtgttgcctgtgatgattatgtcatcgacataaatcagcacaaggattatttctttggttgtcttgagaaagaacaatgatgaatctgctttggagttcttgaactcccaacttaacagagtatttttcagctgttcgaaccatgctctaggagcttgtttgagtccgtataaggatttgttgagcttgcaaacatagtgttcctttcctttttcctcaaagccttgaggttgagtcatgtaaacctcctcttctaaaacaccatttaagaatgcattgtttatgtcaagctgtcgtatttcccatcctctcgaggctgcaatagttaagacaattcgtattgttgagg

SEQ ID NO: 163892 - DNA, 790 bp, Cannabis sativa
gtaaaataattccaacactttataacctaaagaaaataagcctaaggggaagacgagctacaaatttccaccctaaggaaaatgacttaaaaagggaaagaaaaagaggaaagagaagaaaaatcataaagtaaaagacttcatgtaaaatgacacgtgcctaaaatactccatggaagacgtaaatgccacatggaaataaaattctttgctaagtaaattgattaggaaaagtaaacagtcaaggagaagagaatacctttctaaatggtgtcttcaatagggatcaaacttgaatactctaagctcttaatacaagatcttaaagaatgtatactacaaggatccaaatgaatttatgaaataatgaagagttataggaaggtatttatagggaaagagacaaagttccaagactttggattaagtgacgatcgatggagaatatcagtccatatgcccagattgggatctgtgcacattatgattggtcatatcctgcttgcaacaagctaccaagattctttatgccatgtgtatctctcaaaatgcatgtctcacctttggaatatgtgcttccaaaacatccatgagaggaacgtcgtttcgataagaatgcaagagttgatgagtatacttaaaaaaatatactcatagacatgggggtcaagtgttaaccctaaaaatttactatgtaagaatatcaaaacacgagagaataaggaaaaagggagaaggaaggaggcacgagaccaggagagactcgcaagatgggagcctcattgaactc

SEQ ID NO: 163893 - DNA, 1973 bp, Cannabis sativa
ttgtacgacagattcgaacttgagaagaattggtgaagaacttgttaggaaatgtaaaggtttgccgttggctgtgaaggcagttgcaagcctgctgcgctttacaaatgtgaatgaatggaaaagaatagcagagaatgatattttggacttaccaattggagagaaaaatatacttccagctttgagattgagttaccattatttgccatcacacttaaaaagatgctttgtttattgctctatgtttccgaaagactacgaatttgagaaagaggagatggtcttattatggatggttgataatttattggagcattcaagtggaaataggagtatgaaagaagtgggatatgagtattttgatgatttagtgtgtcgatcattttttcaatctacaagtggctcaagtaaaagtgttttcacgatgcatgatcttgtagttgatttggctatttttgtatctaaaagaaaatatttatacatagagaaaagcaagatttatgacaccggattgatgagacaaatacgtcacattacatttgataagttcagctaccttgatttccatgagatacacaaattaatttgtgaagcaacttctttgcgtgtatttgtacctgttgctaaatatttcatcacttcaactacaacactacaaggtgtgttaaaagatttcatgaagtttaggtgtttgagatttttctctttagcgggttatcgaaatgtcactgaattgcctaagtcagtaggtgaattaaaacatcttcgccacttagatctttctttcacttcaatcacagagttgcccaattctatgtgcttgttgtacaatttaaggacattgaagttatctggatgtaagtatctcgttaagttccctaaaaatttacatcatctcattaatttgagatatctcgacatgagcaagtgtagattccgtaccttgccaccacttgggcaattacctgctctcatatctctctcgattgaacattgtgaggcagtagaaatggtgagtcttgatttttacgggactggttcttcgaattcttttccattgttggaatctttgacgttcaaaagattgccaaaatggaaaaaatggtcaacaccaaatgcaaatgttaaagcatttccaaagctaaaatcacttactatacacttgtgtgagagtttgaaaggagatttgcctcccctcctaccatctttaacaaagcttcatatttatgaatgtccgaagcttgcttcttcactcccagcgatgccaaatcttcataaattggaagacctctatctcaagaattgccaccatcttgactttctaccatcctctatttataattccctccaaaaacttgacattgaacatatttctggctcctttaaattgcttcctctaaattcctttcccaatatcaggattgttagagtttgtgattgtaaaaatctagagtctttctcactatcaaataacctaaattccctattcagtctctccattgaaagatgcgcgaggttgattgagtcccgcaataattggaatttacaagcacttcctaatctgacaagctttagtattggagattatgaacttgaccctatggagatctttctagagcaagggttgcttccgactagccttacctcccttgtgatccgtggtattgctggtcttgaaaccttagaagggatgtggtttcaagaactcgaatctttgaaaagactatgcatctatgattgccccaacttgcaatcacttccagtagaagggctgccaccctctagaagaggtttactgccaccttcttttgaaagtttctttatgaaaggttgccctttgctggaagcaaagtatgagtgggaggaaggtaacgatttgggttgggagattagttgcatctctcagcctcaagtgccatcattgaatagcttaatccattcataggaccatagcagcagcctactcacgc

SEQ ID NO: 163894 - DNA, 1703 bp, Cannabis sativa
atcaaaaatggtaattttttctttatgatcaaattattcagtcaattatgttttagtagaatttttctcttcaagtttataatacttccttcttcctggtgcccctacatgaatctctttcattttcatattttacgttctttgcatgcatagttgttttgtcactctttaatgtcaagattaccgtgcacctatgaattgtcaattttttaataattagcttttgtaaatgtgattatctccttttaagttaattttgttttgcttgaattttgtacgttgttttttataaatttgagttgtgaactgtctcggcttaataatatttttatcttgtgtcgacaatgcttgaactttgatatactctttgtttgatctattgttttcattttaaaaacaaattttaaatctctattgttttcatcaaaaatggtaattttttctttccggtcaaattattcagtcaattattttttagtagaatttttttcttcaagtttataatacttccttctttctggtgcccttacatgaatcactttcattgtttatattttacgttctttgcatgcatagttgtcttgtcactctttaatgtcaagattaccgtgcacttatgagttgttaattttttaataattagcttttgtaaatgtggttatctctttttaagttaattttgttttgcttgaattttatttgttatttttttttttttataaatttgggttgtggattgtcacggcttaatactatttttatcttatctcgacaatgcctgaactttgatatactctttttttgatctttggtatctattgcttatttttttttttattaagctgagttacaatcaaaatcttgtccttgattcactttgacaattcagagatatatcctatttcggcctggattggtctaaacaaggcaattattgattctaaatttattgcgtctcagttgatataagaatagattttatcttgacacggttataaattagtctacctcggattaccctgagtactactattcctcccttcaagtaaatctggggtaatcgtatctcgattaatatttgattagatctcatctcggaaaggtttcaaatatgatctatctcaggatgacctaagttagagtttatctcagtttcggtcgagctatagccttctttgatcttatccaaaataagttctggttttattttgtctttatggcctattttcaataatcttctaggttgttctccctaaaattccatgccatttatttttttctatttaatggacttgcgtcgtatcaatctaatgggtttcttttttcctttttaacttattaggccatgttatggttagttaaacttgttcccctccaacactactcccccagttcgttttatgccatgcatatttaggaactaatctaagtaatagggtaagttcatcatcatcatatcatagcttttgtgtcagtaaattttccttttagtttgaatttttgcagtggcagtttgtatgatagatggtttatgctttgagaattgcttttttgtaagtggcttttcaattttatactttgttttaatttttagcgtcgcatctttgtgtatatatgtaacgtccccgcttcaagcttccattgggcccttacacccacggaatcatggctcttatacacgagtacgtcactctagctgcttc

SEQ ID NO: 163895 - DNA, 1482 bp, Cannabis sativa
aaaaaaaaaaaaaaaaatgggacacatgcacaccattacaaccaaactgcaaccttgtaatctcctcatcgtctttcgctacctgaatcatacatgaaagagcttttagatagaaaagaaacaagaatggagaaagtggatcaccttgtcgaataccatattccaaaatgacattacctttcacctctccatttatgagaaacccaaacaagactgaagtgacacaattcataatcttccttctatattgttgatagtatccaagtttacccatcatttcttctacaaaagcccactaaactctatcgtatgctttagatacgtccaacttaacaacaatgttactaccattcccaaatttccctcttttcatatagtgcattccctcaaaactaaccataacattatcatgaatgaaacccccagagatggaagcactttaagattcaaaaattaccacatccagcaaatctttcaacctacttgtcaagcatttagaacgattttataaataacattgcacaggctaataggttaaaattcccccactctacttggcttgtcgacttttgatagaagggaaatgatagtttcatttatttggtgtacaggggtatcatcattaagcacctttaaacaaactctgaccacatttgtcttaaccaaatcccggaacttctgaaaaaaataatgcaggtaatccatcctggccagggacttttatggaattcatggaatgaacataagcaagaatatcttcctatgtgaaagtctccaacgaattcttatttcatctctgttgtaattttgctcggaacatgttacagcaccaaattaggctgccccctagacaatctgatcgaataaaaggtacctgaaaaataatcacacacagtgttcgtagtcaaagctcaactctatgttcatcacataatcttttgatattattctttttctttcgactagaggccttatggtgaaaatatcttgaattgtggtctccaaatttaatccaaatagctcgatgttgacgcaaataacaaactatcaatgctaattgtaaactcaaattttcgttaacaataaatgaaaccttgtaaataaaaattaactatttatgattaataaataccgataaaacactaaaaaaatttacgtagttttgtttttaaaatttacatactgcacaagtttatattatttatgagtattactttatattcttttctgattgcaagagaatttctcttgatattcactcaattttacaaggtttgtctttccaagaatgatcgatccttttctccttaggttttgtccctatttataggggttctaggaatgatagttattctcttttgatcttatctaagttgtagaaatatatctagatgttgtcttcacattgtattagttgcattttgtactgttttctggttttttactgtagtgacagttaagttagttatcccaactaactta

SEQ ID NO: 163896 - DNA, 2464 bp, Cannabis sativa
agaagagagggtttactttctcaaacctaggtagcaacatatatcagcaataagtagagaatagccatagagacttattctgctttcacacacaggtgaacctaaacaagttattacacaagagtaccctgactaaattacaaaagggatgaagaaaggattagcaaacttacatatagaggaccaataccccatctatgagcaacaggggccaatataaaccacatagtgattataatccacatctttatactcatagtgaaaattgccatcaaaaggatatctaccaatcaaaagggaaaaaatcaatcagtcaatagaatgttatctaaatggataggcataactaactttaattttaccaggaagctttagcttgtcatgcaaaaaagagtaaagcatccttttccatcggcttgatgttggtggaagttgaaacttctgggattccataaaatcacagaagataaataaaaatgaaaactaatagcaagtttatacatggattaaattcatttcaattaagttagagctctttgtaccagatcttcatcatcttcatcatcatcatcgtcaagtccatcccgaagagtttttacaggtggcttcggtttaacagcaacgatgagtgaatctgaaatgaaattttaaacaccatacattggcctaaaattcactatcccaattcttacatgattcaaatccaacaaagtaatggggcaaagtatacaacaaatccaattattgttaagatgagacccttaccaccattattgagttgtatacatgtatcatcaccgtttttgttgtcacgcaatacatttcctcgcaaaataagtctcaaattctcaagtggcaaacagttattcccagcaatcaattttttcaaatcattcaccttattatgaggaaagtaaaaatgggtcaatattacatgatgttgattcttcagaatatgcaaataaccaagcaagaacatcttcagagttttcaagattagttagaaataaatcaccattggtgaaacacattgtgctaaatttgagattaatcatcacataataaatgagaaaaatgcaataacgaatagtcacaacaattacaaacacagattttcaactatgaaattacaataaagatcataacagaaagaaagagataaaacccagattggaaaagggaaagagagagatgggttaggcttactttaatggaagaaggaacatggagacgagaagggcgagctgggccaacggttctgatgagaatctccaccttattcttatctgaatggattttgttgtggtttaagggtttcaactcctcctcgtcttcctcgacgatttcacccataccagaacttcgccggagaccgtacagtatacagatgcaaagctggttctgatgactgaaacagaatcccaaaagtgtcaccgtttcatttgagtgaaaatactaggcaaaattttaataaaattattgtttatttggactttgaactttttattttcgctaattactatttttgttctttgaattttgacatatatttattattttatttatatttgctaattaatagcggtgattgtcaatgtactaaactgtgtttccctaactttgatatctattaaattatactcccaaactttgagaggatccaaattgtgtctcctgaattattatccacgtgagacttttgttagattaattggtcaaaaatctttgaattcattaatctcaatagttataagagaatttttaacgacttgaaaagttaaagggcataatttggtattatcaaaatttagagtataaaaattttaattacccttttatttttacacaaattacctgtagttgtattttttttttttacatttttactaaaaaaaaaaattctacttttttatgaactattatttactttttatatatgtgtggtatagttcctttaaatgaaaatgtctccgcattcatcagttttctcgcggtcctgaatggtgtcttgtggaatgatagtcgagttcggaagggagttctcgaataagtatcattccactccgggtccattcttcagttctctcgataggagttccagctggctagttattccttctggaatgacagctccagatagtcgacttcaactgttatttatcatatccagaagcatctttagtaaggttcgtgaccctcgtgtcctgaagctcatttatgctctcgaaggccctagttcttacgttgatatggagtctttgctaaataaggagttgattaagttagttgttcctaactaacttaacaaccttgtttcttgtagccaccgaatttaagatcttaatcctaaggctatatatacccacgactcacctttggaggtacgacgagtggaagtttttaggagttggagaactctgttcagatgagattgagattttcacagagagagagagagagagag

SEQ ID NO: 163897 - DNA, 1153 bp, Cannabis sativa
ccctcaagatgggctatatatatcttttaagcccatcttgtctttaaagacattgaattgattagcaaacaatggtttagttagaatatcagctagttgatcctttgatgaaacatgtactgttttgatgattccttgttgaaccttttccctaaccaagtgacaatcaatctcgatatgttttgttctctcatgaaacacaggatttgcaacaatgtattgagccgatttgttgtcacagtagagaaaagcagggtcttgatgttcaattcttagctcctttagaatagacaagatccacacaacttcacatgtggtattggccatcgctctgtactctgcctcagcagaggatctggaaattgtgtgttgcttcttgcttttccatgagattattgaggaaccaataaaaatgcaaaatcctgtggtagacctccttgtatcagggcaagccgcccaatcagagtcagtgtaagcatggatttttacctctgtatctgttgcataaaacagtccctgtccaggattgttcttgacatattgaagaaccctttgtgcagcatttaggtgtgtaacccgaggtgtagatagaaattggcttagcttatttacagagtacgaaatgtctggcctagtaatggtcaaatactgcaatttgccaacaattcttctgtatattgtaggatcagccaaattttccttctcatcttgcccaagctttaaatttccatccatcggtgtgctcataggcttgctgcccaaaaaaccaagatcttcaaggagttgaagtgcatatggtctttgagaaacaaatattcctttatttgatctagcaatttctaaccccaaaaagtacttgagcttgcccaagtctttcaatttaaatcggtcattcaatctgactttcaaggcttcaagttgttgcagatcattgctagccaatataatgtcatccacatatactaagaggaagatgaagactccatcaaagtgcttaatgaatagagaatggtcggtagcagagtgatggaagccttcttctgtgagaacactagagaacttagcaaaccattgtcttgaggcttgcttaagtccatataatgacttttgcaacttgcaaactgggttgggtggcaactcccccttaggtcta

SEQ ID NO: 163898 - DNA, 1353 bp, Cannabis sativa
ttagatgtcgataggaatgagctttacagcatcggtcaagtctgagcccgatgccatgacacagtccatgacgggctgttttgtaaaagtcttgcagtacatgcgattccccacattttggtacgcggtgtagctaagtccgtcaagaacagaaaggaagagcgagtctgatgtagcgatttcgacatcttcaaccctaatccagttgtgtgtgcggtcaagcttccagaacttgccgtttccaatgcattgtatgcgcacacgattctggccagcatcgataatatcaaactgtgcatttttgtcgacgctggcattggcaatggcactagcaatagcgccattgccactagtagaggtattgttgttgtgataggttgcgacgaaggtcagataggtgaggccatccttttcgactgcggttagaagataattatcggagttacgaaggaacaacacacgtcttgtagacattaattatgattttatgttttattaacagaggaaattattattatacattgctactctagctcttcttgggtattcactccatgaaaatgaatatattatttataacctacaaaatattgcaatggtgtgtatggacaccaacttttcaccaaaaatgataccactgtaagtcgttttttccccttataaaatgtgtatatagtcaacctttagttacataattaagcatatatataaatatttaatgtccatatatatgtatcacgtaagggatatattatatattttttccaatgtctagctaacaaaaggataaagtaaaaaaatttcaaattatatacagcgtacacaataattaagagccgggtcagacaaaataacacaatttgaaactcgcatgaaaaaaaattatttttaatgataattttctaatcacaacatatattttttgtgattaaatatgacttttagttacaataaaaaattatttgtgagtaaaacatagtatttagatacaagttgtcactaacttaattttagtcacaataattattgtgacaaaactactttttagtcataacaaattataatttttgtgactaatacttttttgacgtacttagcacatatatttaatttgaaaatggcgtaacaaacatgacaattaacttatttaaaaatatgccattttatttattatatttattacatgtaaattgtactgaattatttaaataaacattaaattactaataaatgtgtcataaaaagattgtaaactactaataaagattactaataaatgtatacacactacaaaaaaatttatttttagtgataactttttagttacaatataatttttttatgactaaatgt

SEQ ID NO: 163899 - DNA, 2978 bp, Cannabis sativa
  modified_base (54)..(67): a, c, t, g, unknown or other
  modified_base (975)..(987): a, c, t, g, unknown or other
  modified_base (2920)..(2931): a, c, t, g, unknown or other
taaagacttttgtctaattttagttataaagttctaacatggatgaaagttcannnnnnnnnnnnnngtacatatcaaagtttgaggagtatgatttggtagatattaaagtttgaggagtatgatttagtgcataaacaatcactgaaacagtaaaattaaataaaattagacaaaagtcttgaaatttaacaatctcaatagttcaggaaaaatttttaacggtcaaaaaaaattcagaggacatgatttaatacatgtcaataaaaaaattcctagcttttttttcaaagaaacacattcaaactgtatctatgtcacatttaatactttttttttgataaataaatttgaatcacacatttcatataaaactttaaatacatttattgttgtccactaataatactttcttgaagtagtgatactgttttgtaaggtctaggtagactgtagaataggtagttgacccaaaaatggaatatgcattttcttttgttattattacaacttctcattttcttacccattgtgtgaaatttacttttgtcttcatcctcctctcatcatatttcgacagctaccattttgagatctacggcttgatacattcatattaactatataacaaaatggttatactttatcatatttgagttcataaaaatcttaaccctaatctaatattgtttgtattcttgtgtagactatcgtgttcgagtatgtccacaaacttatcatacatcatatgttgatcgacatgataatatcacccaaatgactcttttttttttcctaatatttttgtacgtatcaattatttattgagccatttgaattatacattaaattctatatacagttttttaatttttttttttaaatttaagatttagatttctaaagtagttgcagtgctagttgcaataggatagttgcaataggggtttccatacgattttttgttgcaatttnnnnnnnnnnnnnagttgcaataggaatttttatgtagaattttataaaaatacaaaaagataactgttttaaagtgtaaaaataaaataggccctaaaaaaatataaaaattaaaataaataaaattaataaattaaattatttatcataaaatattaatacgataaacaaaattcttaaaatcatgtaattatcaaattttaagttatgttataatcttgtaaagaatttttttttttctaatttagattttttttatgagaagtaagtaataaattaactaatttaataattacatgaatataaagaagacaaattgtgtttgacatagctagttaacctttaactttactaaaaaaaaatatattgtgtttgattcaattgcgatgtaccattattactaacttataataatttgtattgagttcgttgagttgtgacatgaatttttgaaatgtgtcacttctgttttgaattgtccttcaatgttaatgtgattttctttaaaccacattatagctacataattgaacatttgtactaattagcctccttcttaaagaaaagtaaatttgtctctataattgcataaacataaataaaaggaacaaatataatacccaacattattatgtgctattttttttttaaaaaaaagtcactttacttttcatatgtctagatcatagtaattttagtaatataaaatatactataaatacaaagtagtacaatatactaattcgattaagataaattatgacgttggagtgagaaataaggcaatgtgtggcgtagcattaggtagagatcacttggaaataattttttggattgctatcgataggctcaacttttttggtccttttattgtcgaagttgtggcttgtcttctagcccttaatacgatagtttctttgaaactctattttatgataattgagagcaattctaagacaattattaaagctttgaaggggacttattgtatttgaagtattagtaactatagtctatatgcatcaatgcaatagtctctctaatttatttttaggtatttttcttttatctccagacttcgtaattttgcagcacataatatgattaattgggcttttgctcataacataattagtatggttgagttattatctatttcagcgaacattatctataatgatcatgtgtgtaattatatattttatataaaaacgctgatttttttacatacttatttattttaggaatttttacactacatactgattaatttttttacttttttattatagggtagaatttttttaaaaaaatattgtggttttttttcaaaatattgtgtacgttgttaagtttacacggttgttctacggttgttttttgttgttctactgttattttaattgttctgtattattgttttacgattgttttataaaaatacagtatttttgtaaaaaattctgtgtggcagtaaaattgtaactcttacctaatttttagtatttttttaaaaattcttttattttattgtagtgtacaatttcaatatatttcatttgagttgtgttttttgtcaaaaattattttaatgagataactatgccattttttaagaatcataccgtacatttatttacattgaaatggattatacatgttttagcatgttataatgataacaaaaatatatatgtggaaagatttttttttttttggaaaaaaaataataatatctattttaaagatttattgggaggtattttcttcaaattaatttttctattatcaaactggtatttagaaaaaagtggtattttcagtttgctttcaaaaaaagtggtatttagaaaaaataaaaaaaaaatgaaattgataaaatcatatttttaaaaatactcttttgcatttgggctattttcaaaaatatgggaaaaattattannnnnnnnnnnnatatggcataaaaagtaaatgtcactaaatatggcattatctaacca

SEQ ID NO: 163900 - DNA, 791 bp, Cannabis sativa
tcgtatttatattggatccagaggtccttcaatttctgccgtctgaggaagaacccacagaagataggtttatgaatatcaatggtggctttgaagcgtaatgtacttagaccaactgcatcttcaataccctgagggggttcatggactggagaggccttagcagcaatctcttggagatttgagaggttccaatagaaggggggaatactttcaacgtttacccacattggtgtcttgtcaaaacgaacttctgatggtgttagccaggcgggccaaggcatgaggatcatgagtgcaccacatacaaaccagggtctacgggccaggacgttcatggcgtcctctcttctcgcgaatgtgaactggaggagtccgtcatcaatctctttccatttccagcccttgactgctttccatgagagattcaatgatccttgtatagcagctttgccaaacttgtatctatggattatttttcctaacagtactttatttgcttcttgtggttcatctacctcgcccgggttaagggagaaggtaatgtcatctgggaaaatttgaatagagtcttcaaacaggttgctaattcctgaagtatccattttggagtacgaggggaaacactggtagagattgtttagagcaattctctatgcacttcaaagaagtaatggcatgtttactaatcacgattgggagtgataggtatggtaatcactccttttcatttgtttactttatttaatggttggaatactctaagggaaaggcataaaattaggagaaaa

SEQ ID NO: 163901 - DNA, 2143 bp, Cannabis sativa
gtgtgaaaattgggataacaaatatgattagtattaactctctgtatcaatacaaccaaaaagggagaaggtcattacccgctatcatatgggggtcgaacctctataataaatctgtgtcttatatacttttcattctatttgtgtaacacgtggtaagcatcaaatctatatgaccccgttgtcggttgatcattttttaaggtcaaaaaggagcatacaagcttggccagtattatgaaaacatgaagctagttctagtgccacagttttggagtggcaaacatttatgaaaatactaccaacaaatgaaaaaggtttgaggaccacataaattgtgtaatgcttaaacatcactcttacgttgtggccttttaggctgaccttgctgaaaggttcaaagaacaattggtgctaaggttagatgaccactttcaatgtatagttagttttaaaataattgctcttgagtactgtcttttgggaagaatatatcattcaaaacttttatgttttaactagcaaaagttagttagatcatgtaatagttttttataattcaataaatgtacgttgccacggtaacaacacataccgagtaataaatgaataaaaatattaataatcattcaaattatgtcaattttttgcttttttgcaaactatagcaagttatttaactgcctaatatgtgtataaagggtttgcctaaactaaaaaaggttagagagacaaaatagaatttgtaaaatgcaagtgaccaagagtcaaaagtttcctcggtcacttggcgagcacctatacatgtacaagtattggtagaaaacaagctgcaacaaaaatcaaaagaaaaatttaaagctaagggaaaatatctactttaagataaagaagcaaaataagtctgggcttaaaaggtacctgactagccatttatattaagcaaaatgtaaataaaaatctgagtctataagtcgcttggtcaaccatattgcattagaaaaaggcttgtagcccgaataaagaaaaatatttactccattggggtccaagagacttgatcttaagcagtcgggtcttctttatactaagtgactgaagaactctcatcgaatttcttctatcatcttcatccttcctcatttcacaataactgaagaagtaagaacgaatgttgtccttcaaatacccaaaattggcattttgatccaccttccgtaactcataaaagacctccacgacatctatttcatagacctcgacctccttttgatacgacttctgctaagcgacaaaagtttcttctaaggaagttttctcctttagaaaagtttcatctttttgttgaagaaccttagtcaattctttgaccttggcctcttagttctgaagtaatgtgtggagtcctttcctttcatctgttagaccacgcaccctcttggattctaactcgaggtatgcttcaagcttggcaatggacaacatgtcttctatttgctgctgctttaataagtcatcaatagacttgttcgcagtaactagttacttatttacttcactgagctactggtcctttagctcagcctctttcttggcctcctccaaagccttcttaaagtcattagttgttgtattggatttgagagctacagacttggctcaagaataagtatagattcaagttaacctgcaaaaagaaaaaataagttaaattacctgtgtgccaaaatccatgcaaagaactctgaaataagagcttaccctagtaatctcattcaaaaatccactaaccaagagttcttcacgcatctcttccaccctggtaagctgctcgttgaccttagccatcaattgatcctagtagaaactgagcatttctctagccatctttgtctttggctagatggttggtaaagtggaatcgctttcgtaggatgggccattcagtatggcccctttagagcttttggccagagtagctggtggttgattcgtcgaagtcttcctagccgtaggaagggactctggaacatctacgatgaaagtatcgagctcctctctgttggaatttattttaccaggatcttagatccactcacaagtatgtttattaacaccctaattatgaactttctaaaacgat

SEQ ID NO: 163902 - DNA, 3886 bp, Cannabis sativa
  modified_base (2202)..(2210): a, c, t, g, unknown or other
gtaaaataatttccaacatgcatagcccgcgaaagtccatcaatagagtaaccaagcccagttagacccagaagcacgcatccaagtccacaaagaaacctctgggtcgaatgactaatgaagttcagctcagtgtacatcattgatcaaaatgaatagaaatcgatcttggaagacgtcatcaatctgagtgcacgatccaattggggtaatcgtgaatccgtggtgagaattcaaataatcgttgagtcgattaggcttaaaccaactccaattattttcccgcctttaacatagatcatataaattagtggaattgagtaaaaaaaaaaggtcaattctctctctaactcaaatcttttcattttccttctcactagaactctttctgacttgagcattggagaatcttgtacaggaaatttcattgatctttgataagtccaagccgaagatgatagaagaaactcaaagaagaggagaatagaggatcacagcttgcctagttttagcaagtctctactatgaaaattttttacatcaacaattggtgctattcgtggaaacttcttcgatcttgattgagataagtcgtaaaactcgatcagaagattgtgtgaaatcgtcgaacaaaactcaaagattcaaacaaaaagcaccattcagccaactaacaaataatggagtcgacatcacggaaactttcgctcaaatggaaaaacctagggctgaaacacaggctataatcgcaccaatgaacataaggaaagtgacaaaaattactaagatggacaaaataaaaactgaaaacaaagaaatttgtgtcaacactcaaatcgatcagtaaaagttcccctcgatccatccacaaacgcgagacgtagagaatttagaggccaccaacgccatctaaatgctcttgccaccaagcacaaaaattgtgctccatcgaccagttaaacggaaagtgtagatcctattgcatctcatccacaagcttctaagatggatctacctaattttgtctagtagatccctcgataagagatcatcaacattcacaattcatttctagctaattggaagaagatcatgagaaaaaaggtgccacaataattctatcaattccgagtgcaaggcatcatagagttgatgaaactagtgtgaagctaagatatctttattcattgatcaaatccttaggcatcaaaacaaaaagattgcatacctttagttctatcgacattaaatgacatgggatatccactcacactcacttacaatttctttgaatgagggaatttagtgtaagctatatatctacaataacacttacaagaacaactatcgcctagtttttccaattgaagtcaaaatccatatcgagcttcaaggatctctacaaatagttcagtctccaatatggaggcaattgtgaggctccaaaaatggtgaaagacctgcattagatcacaccaagagaaaatgatcactcgaggcaatacatgccaaggtttatggacctcatccattaaaaccatgatgttgacatgactacaataaagaatctcttcctaagcagtctctgagatggctctctgatgagttaaacttttaccatccctcctcctattgatatggaaaacatcttaagaaaaattgagtggatctgtcaagttcataatacaaggcaaaggtttgcgaggaagatggcactaatcaccatctctgccccaaaaaatcttccaccttgatagaagaaagagaagcaaacaaattagagcagaggatgagaaaatgatagcaagaggaggaaggctaagaatgatccaatctcaaaaccaacctttaagttggtggtatacctcaagatctcatatatcaagagaacaatgactagccactatggaggaatccattcaagatcactacacttacagaaaagaaagatcaaagaaaatatattgttgttaacgcacattgtagctaaccaaatttgagtcccataatgataatacaacacagaaataataaagctatagaataaaatatgaacaccagatttttacgtggttttacagttaaaattctgcatagtccacaagtgaatcttatacagatttctaagtagtttttttaggggactttcgtatatgagccctccccttttaatcttatctgccactatttataattgcatannnnnnnnnaattacagagctgaccaaaatatatttacggccattatccctaaaattgtgggatttgattacaaatcaagccaaataaatgaggtttttacacagttgtgaatatctcgcctttattgggccgagatgaacgcataattaatgatataaggtaagttgtatctcatatggatgcctcaccgaggagggtgccaagatcactttgataacgagcagctgcttgccattttggcttctcaagactaatattgtcttaactctaaaagttatactctctggagtcaagaggatcatcctcgcatgcataccatcttttagcgagacaaatgcctcgctgtttattatcttggctcgtcaaactatctctactcagtttgtatatcgtataatatatgctaagtatttttagtgttgtcgctttttctttcatgcagcgaggctgaggcctcatcatgaacgtgtgcaatcacatggtttctcatcaatatataagttagcagttcgcacgtttctatctcgcaaaaggctattcagctagtcgagttataaacataccctgtgagttatatttccaacgacttgttccatgctaggcacacttgtcgtttgcgtgtttgagtttttcccagctcgacacgtgtccccttctgatgtgctcaccgaacttcgggtataacaattgccccttaaaaagtttattttgattgaaaagagctttttaatgattacaaagggtattttcgtcacgctcctctatttttgaacagacgtattccctctgattttggcggttgtgcagttttgaggtacatcagatttaaatgaccatctttttctctttcgcttcgaaccaagtccattggatcacatcttttttgtttttgaaatcgtgattataggtataaataaggaaaaggaaccacctttgcaccattttagaaagtttgagaaaaacctgtaaactttttcgtcaaggaccaccattaaattcgtccaaagacttgcatgccatcattgtccttgacctttttcttacgagtttctttcgacttcattttctcaaagcgatccttgctttgttcgaaggtttgcagacgaaattcccaggcattgccgcaagccctatcttgaaacggtaagttactttcttctttctcatgtttattacatattgtgaacaagttacttgatttgtttgtatcgttatcatctcatctggttttggtaggtttctagggttaaaattgttcatactaggattcaggcaacatgtaggttgttttaagacctccaactcattatcttctgctttgataaattctttctaaggattgggtctgctttttgctggtagcaatgtcccactctggttcaggaatttatcatctagaagtcttagagtttgagtaacctatagaatttgccatcccatataaacctaatccctcgaaacccacctccaaattagagcgaaatgatgttagggctagggaacacagtgagaacccaacaggaagatatctctatcgctacaggcaacttcttgcaagaaatatccgaaggcagaccccgattcttgcaagaagcagcttggccagaaccacctagcgtgtcctttattcctgtggcaaagcctttgtttttatccaatgtcataattgttgggttttatgccc

SEQ ID NO: 163903 - DNA, 1153 bp, Cannabis sativa
agaatgggctgttttgaagatgcattggctgatacggcataaagtttgattccctctgcaagtttttcctctttgtcaccaaccttgaagaaagggaaaaacaaaaaatgattaacaacagcattcaaaatttatattccttgctaaaataagatgtagcttatcaaaggtatttgataatccacagaacaacaatgaaaactttgaatttaacttcagagcaaataaaaaaggtaccagatcaatagtcaaaggattgtctagatgctttcgtgctagctttttcacccaaccaggcatggttgcagaaaagagcatactctgtctctgagctggaagctgttccaagattaattccacatcctcctcaaatccaacagcaagcatttgatcagcttcatcaagaaccataaattgaacttctcctaatttcaggcttttaccatttatcagatcaataattcgaccaggagttccaacaactacatcgactccacgtgaaagagcattttgctgtgcactataaggcacacctccataaacacagacagtacttaaatgagttgctgattctttgatctccttttctacttgccttgccaactcacgggttggtgcaagaaccaaaactctaggaagacgaccactccgcctatgaaatatataaagaaacttaagaaatccccaatacagattttaaaggaaaatgagcttataataactttgacataattcttctacctctgagaacctcgctgctcttcatcatcttcagtgaggcgtttaattataggaattccaaaagctaaagtctttccagttccagtctttgcgcgggcaatgatgtctcgaccctctaatgccgggactagtacggctctctacattgttgcagtaatgtatgaatcatcagtgacttaacaaaataactaacacttcacataaaagtaaggctttcaatgaaaaatcagggataactgtgagtacagggttcgatgagatgtaaaaaacgtcatacatatttatttatgcagagagagagagacagcttgtgtagctttataactaaatttcatcacataaccacaataattaagagttttcgcgtttggtaacacttttatttttttaattttttcatcgcaaaaaaaaa

SEQ ID NO: 163904 - DNA, 1934 bp, Cannabis sativa
cccgccacagggacagccaccaccttattggctacaagtgcgctcatggtgtgagccagtgaagccgtgtaaggcacctcaactagcctcctcttattgtcaaccatcaaatccttgactttcttgtctcttagcccttgagcttccgatgagtacttcagcttagaacccatggcggtactactgctgtaatttgcttcttgcatatttgctaattaatatttaattattcggtttggtttttgtgaaattggataacatgatagacacaatatatacatgcgatggattttgagtgagtgagtgtgcatgaggttgcacgtgtcaagtggcaagagatgagtggtttgcatgctacacgtacgtatgttgtatacttgccacgtgtcatattgtttttgtttacgtgtggatgtttcattccttattttgctttttgttattcgggagatcgaagatatctgttattaatttttagctcatatacgtataaaaaaaaatattagctcataatataggaaagtctcataaaatatatgaccaaattttaagagaaaacgtaattaatgtggttatacggtataaaaaagcttataatgtgtgctctaaaatcagcatatgggacaaggatatatatatggttgataaattttatatgaaagaagcaaatcaacattagtgaaaggccaaaacattagtgaaaatataactacaaaaggtacattgactggtttctgtaatatatagtcatttttaaatttttaatagggtcatatcttatttgcagtaaaataaaaaatcatcgatgaagaatactgcaatttctttatttttccgtcgactaaaactaaaaatgaaatgttcaaatatccattactattggtgtggtcattggtcaaatgttaagttctatgctaattaattgttatcggacagcgctcagtaatggtggtcgattaccaaattcagggcaatgtgctaaaaggtctcgggggcagtttggacaatgtaatattgtaatgtacgatattaaagccaaaaaaaaaacagtttctataagataagttaaaatttaaccatccaaaatgctctgtttctttcttctaagcatacaaacacaaatcagaagaccacacaacaaaacaaaacaatctttacagccaaagccaataagatgagaaatttgagaacgcaaatatccctctttctctttcatgataatcctttcactcattctcacacttccgtggaaaactgctctttagttaaaagctcatgcaaggcatgagttcccgttataataataaaaaaataataggtttattaaaaaaaattcacgtggaattattaaaattgttaaatttaaaattttttgtctaattttaataagaataataatctaccatacataaaaattgagagtgcataatttaacacatcaacattcgaaagatatgatttgataaatattaaagtctgaaaaatataatttagtacaccaaattagtaaattaaatgaaattaaacaaaaatcgatttaatacatattaaagttcagacacaaattttaattatcctaaataatatgtgtatatattatttaaataagcaaacaattatatcataaatttcaaattatatatatattaaaatatgtatacacaatgacaacattctttttcttcttacaataattaaaagtaaatacaatacggcaaatttatctataacactatgatgatttataaactataattataaatatagaaaaaacgaatagtgtatataaacaaagaacttaataattttaaaaatatatgcataaaattgtcacgtaatattctgcatagtaatctataactatataaaaaggagaatgtggctttgggcttcccaaagtaaattaccaaattctccttctttttttttttttt

SEQ ID NO: 163905 - DNA, 851 bp, Cannabis sativa
aggtagttagggtgttacaattagcttcttattacaagaatataaaaccagccaaacaaacaaagaaactctcaaaaaaataagaaaattacacacaaaagtactagtaacactcataaaaacatagcaaagacaaatatatgtcaatagagtaattgatcaataacaaaaaagcacaacaaaaagagagaccaagaggtaaaaccattaaagcacaacaaaaccagatttagaaaatgtaaatagaaaacttactttttctcctagccttacaatcttcaactcaactacttgagcaacaatattggtactatcaacaacatttggtgcaattttactgaacgaaaaaggattgatgacattaaagataaaatttgtgcaaagtcaccatgacaagtatccaatgcaaaaatccaaaaaaataaattcagctataacttaagcgtcaatggaagggttcagatgcatgcgcaactttagcaccatgaaccaaacctaaggcctgttgacctaagaggaaataacaatcacatcataggttagaccttgtaattatgagtgtaatatcactttgagtttacattaatgagtgatagttcaaattttcatattagcttatcatcctatgaaagatttcaggaacttattttataacatataaaattatatataatgactctatagggatagcaaatctcatccacgcgcgaaagcatagaacacctaaaattatagcatttgactaaatttataattgtaccaaaattagtggccggcaatgacaaggataatgggccttactttacaattttttcattttgtcatttcttaatctcattttctcaaaaatg

SEQ ID NO: 163906 - DNA, 1447 bp, Cannabis sativa
ggttttctatttcaaatcccctgcctctaataataaagtagaacacgaagacatgctagtagaattgcgattagataagaaagtaagaggccaatgtatcaaatagtgactcccaattggtggtgaatcaaatatctagagaatattagacctaaagtgaaagaatggctacctatgtgatcatatcctaggagctattgtaaaattataaagctacaaaattcatttgcggatgtactagcaaaactcgccatagacttggagatcattcaatacgaagtggtgcttgtggcccacttagaagcttcaagtattgaaaaataaggggtagatgtcatcgctgatccttctaattcctggatatggcccatctaccagttcctatgtttgggagagctttcaacagataaagattctttccgcaaggtccagtactaagctcctcgatatgtgatactatatgggaagctttactatagggggttatcagtgccgaacctaaggtgtgtatccaagactaaaattagtgctgtcgtacatgaggttcatggaggtttctatggacaccacacttctgggaaattcctatcgaaaaagatcctccatcaaggttacttctagcccacaataaagaaggattgtacaaagtatgtacggaagtgtgaacactgccaaagatacaccaaggttccacgagcaacaccaatgaaaatcaacctcgtgagcagtccatggccttttgttattttgggaattgaattagttggttccttccccagtgggaaaggaggagtaaagtacgccatcattgatgttgactacttcaccaaatgggtagaggcggagcccatgaatacagtcacctccaagaagaccttggattttgtcatcaagaacattgtgtgttgcttcgaacttccacaacaagattatttcaaataatgggaagcaatttaatagtgatcacttcactgaattctgtaaccaacacagaatcataaagggcttcttaactatggccagaccacaggcaaatggacaagtcaaagttgtgagtaagatcatgaagataatgttgaagaagaaactccaagcttgtaaagccgattagtcagaggagctcctgtgagtcctctaggcatatcaaataattgagagaacttcaacagggcacacaccatatttgatggcttatgggtgtgaagtagtcctttcagtagaaaccacagttctttctcacagacgagacacttacgacccaacttggagccactctttgctccaggaatcattagttttaattgaagagctttgggaacagtcacaagttcaacttaagatgtaccaaggcaagatttttaggcactttaattctaaagtcatgagtcgtacatttaacgtcggagatctcgtgtaacaccctaactaatttaggcgtattacgtga

SEQ ID NO: 163907 - DNA, 2295 bp, Cannabis sativa
aaaattacttatgaaaatatctcatatatgtaataaactctaaagactcatattagtttatttcaaaaaaaaaaaaaaaaaggagtcatcttaattttttcaacgtatgtgattgattgtaatttagtataaagttttgttcgagcatgaaaagtatattcattatggtctagtatttatatcaagcatgaaaacatacatgaacacattggtcttttcttttgttgtattttattcattggaaaaactcgtttattaattgatatttaatgatcattaagtgacaattaattaaataagtaggaaaatagtgtttgaaccgtttagtgactacacaactatctacatacaaatttaaacttttttttttttttttttctattacgataataataaaaattgctaatgtataaaatattttttaataaaatgtgtttatatttttctcttcaaccactgcacatgatttttctttcttgaataatttaatcattacataaaaatatatatattcgaaatatatatataaaaaaatatatatttatgtaatgtgttacaattacatcaaaaaatatatatatattcgaaaaaaaaatatatttatcgaacaaaattatattattttgaacagaatatataaaaagttaaaattaaagaagaataataacttaatcatttaaatagtatttattgacgaagtaattaatttttgtgaactatttttttataagacacttttatggattaaaagtaaattagtttcttcatttttttataagtaattttgtgatagttataagttatattaggataattatagctgattaataatgatctgaaaaaaaaattaataaattacataaatatatattgagagtatttatgcttttatcaaaattaatattaatattcttgttatatatttactttttgagagaagttattattactattgttaaatttcttatttttcccttattgatgtaaatatttttcttaccaaaattaatattattattcttattatatatttattttttgagagaagttattaattgttaaactttctatttaacagaaaaaaatataaatataatcctaattttatttcttattttctcctaattaatgtaaatgttttttaaatatatgttcccaattttaatatgtaccatgaatattcatttctttatttatttattttttttttgcttattaatgtaaatgattctttttttttaaaaaaaaaatatatatgactcataaataataaaaatagtttgaaaatatttatagactaacaccccatcacctatttcctttgtactttgcttcatataaaacataaaataccatattgtatgatttcaaatcctcaacttcccataatcaaataatggactgatgaagcttgatgtcttgtatgatctcctttatatagaaaattgaaaacactgataaaactattagagaataataatctcgatctaaacacaaattgaaaaaaaaaaaaaaaaataaacaaacctttactgtctaaccattctctgagtaaatcatgaacttctataaaacctgaaggaaaataataataataaaaaaaaaaaaagaaatctcatatgcatacaaacatagatgaaagaaaatagaaaattataacaaaagaaaaaaaaaaatattgttgctatattgacaatgtagagaaggggacatatgactactgaatatccaaaaagaactatatataattggatttttggatgggtgtaaatccaaacgtatgagcctttaagattattatcaaatcataattatttttttcaacacatataaatctctttagttatgagctttatttaaaaaaaattaacaaatgtatgctcttaagtgaactatgaaacgtatcatgatgtggctatgttgattacatttataggtcaataggtcaaaacttttcctcttttaagttggtattaatttagctatgtttgaattacatctatgaaagaagtgatgtgtaacatatgtgaaattaaaataaatctataattaatctttttttattcttgaatgaaaattaattttgatgacttttggtttgactattctttttataggctataaatattttcataagtataaaaatttagaataataagaaaaaaaagataaaaaaacacattagagaaatcttataatgccacatcatcttgtttatagaattatatctttatatattaaaagtgcctatctaatggtatttcttggtttaacattcttggtttaacagaatat

SEQ ID NO: 163908 - DNA, 2541 bp, Cannabis sativa
aaaaaaaaaaaaaaaaaactacgcattcctcactttaaattttgcgatcgtcgccactgacaacacctaatatagaatatatattacaaaattagggctcgtttaatacgctgtattgtattatattgtattgtgctgtgttgtattgtattaatattctttaatacaatattatgtttggcattgacttgtattaatagattgtataaagttataatatattttcaatagactcgaccccaacaccaactacgggtccgggtcccggatctaggtttgggtccgggtctgagtccagggtccaagtctagggtccgggtctgggtcccgggtcccgagttcgggtccggatttgggtttgggtctcgggtcccgagtccgggtcctaggtccgggtctcgggttcgggtcctgtgtctaggtctcaggtttgggtctcgggttcgagtcctgggtctgggtctcaggtctgggtcccgagtttgggttcaagttcgggtccgagtttgggtaagagattggtgttgactctgaatcctttgtaaatattataatacaagataatacggatcatttgttatgtattaaataatacaacatacattgtattaaaattttagtcgtaatagttaataaaatacattgttttattcaaacatagtgttatttattatttattactatacgatctttatacggcgtaccaaacaagcgattaatgtacaaattttatcagtgatgctgatgatctagtcacaatacgtaaaaagaaaaagaaagaaataggtgtggatattttgtgagcttatcatctccactcatatgattgcttagcaaatgttttaatctattttttgacgataatgtcgtcttaatagaagctgaaaattttgactgtacgattgcctttcaactatttttttattattgggaaaaaaaataaaaaaaaatatgagaggttaatttgttgaatagttggccttgcttgttttgttattctgttttggtttatcagaatttctcaaaactgttttggtatttcaatattttaaaaatatgtactcgatctacctagattgatatacaaacatattgagaaactaatgcactttattattaatctctaaacaaattatagttttgaagctaaaaaatgatggtatgtagatcttggtcatcttttttttttttcgaagaaaaatcttggtcatttttgattatctttgtttgcatcaattatttccaacacgaaccatcctttggtatattctcattctataaaaatatatttgtacacatataaatctagaatcatttactggccaatcttccaaaagctgctaaaaagtctcaaaaggttacacaattcttccttctattgtaagaaaagtcactgaaaaagtagtaggaaaacgagcatgggatggtctagttttgtaattattatagtagtgtactaagaaccaagaggaagtcaaaaaaattattttagatgagacaaatgtgtacataaattaaaaaataattaaaattatatttaaacacattcacgtttttttttatcctctatgattttaattttaaaacataattaataatttttcaataaaaataatcttttttattattattattttcttttaaaaaagattattaaaatacttttactaacatatttataattgattacaattaaagtaaattataatttatttaggactttagacactctctatctccttattggtatgatattatttattttgggctaaattcctcatagcttaatttttagacaccttctcgaaatgcctcatagtaatggagtaagtaaaacacttatatttaaggcaactcttgtttattcttctgatgtgggacttagattgatactccaacaatccttctctcaaaccaaagaaccatcttgcctcctctcaccaaagaaccatcttgcctcctctcaaacgatcatctccaatgcgttggagcacacgtcttacatggagtactactactaccttgaaagttcttgctctttctctttctcaggcaaactcctctatccatagcacaccgcctatctaactggccacatctacaaatctcatcatgagaccaaggctcatctcctttgcttggcattcaaaagattcattcacatgactaattttgggatctaactctaataccaattgttaaaaatcatcggacaccatgtatctctatattggtatgatattgtccgctttgggcctaagccctcacaaatttgtttttgggcaccttcccaaaaggcctcataccaatagagatattgtccatccttatatacccatgatctttttgtatttctagtcaatgttagaatttaattgcacacccaacaatccacccctcaaacaaaataccacattgcctccccttaaacgatcctccttcgtcaacactcactacaagaaatgttacttttaccagcacaattcgctacttttaccagcgcattttgcaaactgtgctggtaaagaggtcaaagtttta

SEQ ID NO: 163909 - DNA, 1226 bp, Cannabis sativa
cggcccataacacaaagcccattatgtttgggtcgggccccggcccggactgagtgaaaggagggaataaaacccgagagagagtggaattgatttgaaatacaaattgagtttactctctctttgttctgcttctggttttggttgtggtgaagaacggaaatggatgacgatgactgggacttggagctcagcgctgaacaattggattctatcgaaagagaagcttttcaaaagctagctcagcaacgttctgcttccgtatctctttctacttccaacaccattaacaaggtcactctctcaccctccttaatctttgttctttctttctttcatctttatgacgattttgttttatctttcactaattgattatcacaatgcagcttcattctactgccgcaccttccgcttcatcattcccttcaaatggtaatatattcaaatacataaaaatgttgagattttggacaattcatgtgattctattgcttttactgtaagaagatgatcacgccaaggccaaggaactacctaagtttcctgtcaaattttttcttcatgctactggaaatattgctgctaaattttcttacgatcaggtattttataattgttagggattcagaatttttcctttgagtttcaactcaattcagtttaattcaactcaattcaattcaggtagtagtgggtgctctccgcaaaatccctaaagctgcttggattgctaaagaaaggtcttctcattgttgctacacctttgaactttgtatattgtacaacatttcttgtgtctgaactcgaaaatgttactaatattaaggataatttcataagtacctaaaacaacaaaaacaaaaattacaaaaatatggttgtactaaattttaaatatttttacggtttttaagattttatttacagaaaatacggtcttttaatgttttttatggtgtattcttgttatttttttgtagtattcttattggttttttgttttttgtatattatatttatgttgttttgatgttggatgttgttttccttgttacttttgtggttttcttattgattgtgttgttttcatagcacaccgtaaaaatgtaaaatatatatatatatatatatatatgtgtatgtttgaacgttaaagtgtaaaaattttaacaaaaattgtattgtgtaaatttcccataatattatgctattcactctgcagg

SEQ ID NO: 163910 - DNA, 1318 bp, Cannabis sativa
gagagagagagagaggggggggaaaggagaggaaaatcatattgtttctttcatcaatgagcaggggcaaattgttgaagactatacagaggtggttaactattttaataaccattttagaagattaatattgattgcatttaaatggggcctcatctatctgtttagacgcatatggggctgattaagaggtttactataggggatatgaagaaagccttatttagcataccgggaacaaaaactgcaggccttgatggatatggctcaaagttttataagtggatgtggcctgaggttgggactgggatctcagatgttgtgcttgatttctttgaggtaggatgggttccaaattgattgaatgaaatagtgattgccctggttccaaaaactgataaaccttctcatatagtggattatagactgatttcttattgtaatacattatataattgtatttctaagataatatacagtaaactttcagaggttctccctcacttaattagtcaaaaccaagaggcttttgtgaaaaatttatcattggcccataatatcttgatttttcatatctgatcaagaattacaataggaagaacacctctcctaaatgtgctctaaagatagacctgagcaaagcctatgatatagtggattgggctttcttgaaaaaattgttagactgtctttgcttcccttcccagttcattaattggattatggtttacttaaaggaacctcatacatgcttatgatgaatggaagaatccaaggtaggttacagggtgctaaagggctaaggcaaggcttaaaggaacctcctacatgcttatgatgaatggaagaatctaaggtaggttacagggtgctaaagggctaaggcaaggggatctcatttctcccttattatttgtaatagttttagagtatcttactagattgctacaattgggggctcaaagcaagggattcaagtatcttccaatgtgtaaaaatcttaagatcattaaccttttcttttttaagatcttataattttttgcaaagccaatagggaatcggtctattgtgtgggaagatgtttgatgatttttgtcgaagcactggtcttggggaaaatctcaacaagtctcaagttcttttggagtttcgagagaagaaaagagcagttgttggtcactactagaaaagggacattttatctcactttttatacttgaaaaaaaaataaaaagtaggataaaaggtatgttgatagtttttaccccacttttgtataaggcacaaggatcatgtttggttgagcactaaaaaa

SEQ ID NO: 163911 - DNA, 1874 bp, Cannabis sativa
accacccatagattataatttttggtgtaaatatgctaaactcatttttattgtgtttctttgtaaagtaacatccaactccatccccaaactaacatttgagctattgagtagaaaattaggttcactattcgccttcgtcaccaacgccgacccaaaagtctgaaacaccaacctcgcataccaaagctacctccaacttgccatcacaaggacgacgctcgctcaaacccagattcgacattgttgacgccaacctcccttgtcctcatcaccatgtcatttaaaaaaaaaaaaaaaactttatattttaaaattaatatatgattttaaaaaagattaattaattttgtattattattaaataattataatataataatcaaattaaatattaaattgagggtagttttggtatatgaaaatcttaaatacactaattaaggatatcaaatgagtactttttccaaataaaggggaccaattaattattattcagaacatagggtattaaatttgtattttaacaaaacacaatatactaaatgagtatgttaaaaaaaaagtaaaattatggaaaaaataattaatttgaaataaatgaagaagaaaaaaataatttctagagtaactattttattttgagtgaaagacatactttttatttttcatttttatatctttcaatatgtccttataatataaattctcatttaatttatagtacaagaggtagttttatttattaggaggattttataatattttatatataagtataattttttttttttgtattaaattactaataaagtttaaaaagttcccatatttttcttattgtgaaagtaaaagaaaagtaaagaaaaaggtgaaactttatgattctttcaagagaaaagggtaaccaaaaatcttttctttaaagaaagaataagaatattttaacaaatatatttatattaatttgatgatcattttctcctaattgacaatccatagttagagagtttttctttctttctttttctttttctttttttttttttgttttgtttttttgtgcttaaatttccacaattttttgtccaagggaaaaaaaaatctcaagcaaacatgtgaatgaagcaatttgaaagctttggtggtatccttaaaagaaaattttaggattggatgaaagacacattagaaatccaactttgtacatctcttaaatatattttggcatttttcatttcattttatttcataattttggtaattaaattaaataacaatattattaggcacgatagttgtagcattcaaaattttagtgctacgtgcttcgaattgccctattttgattcaaatattttgttaaattaaaatatattgttagagacttagagcactccaaataatttttttttctttattttttaaaatacattactaaaattttactttatttattttatattacactattcatcaatttttctattttttttctctatattttatcttttaatctattttattcattttaaatatataatattaatatttatacatatactcacacataaaaaataatttaaaactaataaaataaaggctaattaggatttttaaggatttttacctcctttttacctcctgaactcctcctgaactttaacatataccaaatcataccccctgaatttttaaggtcgttaaaaatgcccctgaactattgtgattattggatttaaggacttttgtccaattttagtaaaaaagtgtaacatgaatgacacttcaaggggtatgatttagtacatgtcaaagttcgagggacatgatttgatagatatcaaagttttgggagcatagtttagtacata

SEQ ID NO: 163912 - DNA, 2060 bp, Cannabis sativa
aaaaacctttattttactctcctttaaactaataacttatgcattatatattcgtgtcatttactaattaggcaataatcgtgtaaatttaagcattattaacagtgaaatccctttatttttatttttatttttaaatttgcagtgtcagttggatataaccgttaaataccaattagattactagtgtattaactttgagatttactgtcacgtatacacaagtgtacacaatagtctttcagttagtatttaacagtaacatttaactgacgcctcgaatttacaaaaaaaagtaaaacttaagggtattttgccacaaaaaaaataaaataaaattaaatgtgtaaaaattaaaacgtaaaaagtttttacactaattactctaaatttaatattgaaaatggttaacttaaataatggtaattactcataaaagaaaagaacaacattttaagtttagaaggtaacttgaggttagctcaaagtggttataggtgggtgtgtgagtgttgaaggtcctgggttcgagtcccaagtaaattatagttgtaatatataaacgcttaaataaaaaaaaaaaatagaaagtatgaaatcttttaattaatatatttaacaaaagattaccttttgttaatttatactaatccctgaatttttgaaataggcattcacattaaattttcattaatggtaaaagctgggttcttttattttaatttaatttatttttttaaaaaaaggatgaagtaaaagtatgattaatacaaatatatttactaagaaataccaaagagcactcacttcaaaatgagtgtaagcttctctattacttatgccatagcaaaaaatcctaaataactttttgttaattttaatcttaagatttaaagtttcaaacaccaaaatgcgatagcaatttgcatgtagttaagaatttattgtattacttattaaattaaaaaaataatttacacaataaacataaaaacaattttttttttttttttacatttttacagaatttttccttatttatattttaaaagttacagatttcacttatatttgaaaaaaaaatattgttttcatgttacttttctgtagtaataatatcaaaacaatattattttgaaacaacataaaaaaaatactttgtattgttataaaaaaattacgtttttttttccgtatcagtaacgtcaaaataatgttactcttttcgaaaataataaaaaaataatactctgtatattgtaaaaaaaatcatcatactcacaaaatataaattttttgttatttttatatatttataaaataatttattatattaaaatatgtaaaagtctatattgaattatactaatttatgacatataaatcaactcaagttatataaatatttttaagtatttataataagaataaagttgacactatatggtctacatacttaatgttaactattttgacatattaatttattgggtcattcatagaataaacaaaggagaaggacctatatggccccacttaaagtctcttcttcttcttcttcatcatcatcattcatcttgaggtgaccaatgctattctactctaatctaatcattgagtgatagtgtgtctaatttgaaaccgtacaatgacaagtaatactaataataagaagtctctaacaactactttttctttttttttttttttttgataaataagagagttttattgaaagaaagcaaactagtgaccacaaaaagaggccacatcccttaaataattatgagattgaatcttatgaacacgtagttggcaagacgattcgcaacataattaaccgaacgattaatcaaaataaatacaaccgattggaaatcaaaagttttaaccaaacattcagtaaaagtaggatagaatccccattgcactgggatgttcatcattttaaaaccatcaattagttgcatgcttaattttaaataggctaattagtaatttcttcccataaactttgacatgtagtaaatcatactctctaaacttttttggccgttaaa

SEQ ID NO: 163913 - DNA, 1361 bp, Cannabis sativa
ttttaatttttttttttattttacggttttaattgttctgatactttttatgtaaattgctatgtggattttagttgcgatttagattgctccattaggtactgcatgaatttgcataaatttctatgtaaatttccgtaaaaatgcaaaacaaaactattttaaagtgtaaaattcaataaaacccctatatttttcagttgttaatatttaaataaaaaatttttagtaattacactcaaattttcatgagaattggagaatttagttagaaattttcaattcccttaaattatagacataattactttcaatgttttccaaactcacctatatataaaaagcttaccaatttggttctattatctaaaaagcttataacacagtatcaaaaacctactcaaaccattgattttcataaatttgcaaatgattaacaaatcaacaaggaaaaagaaagaaaacccagaaaaagaaacatcaaaatcaagaattttctaagtcaaaaaagaaatctttattatatatttctgtaacttttaccttccattgttgatttcattctttccaacaaagccaaagaaagggccttgactagcctcctcaagcttcttcttcttaaaatactcctgaagctccttggccttctgtctctgaaactccaaagtcacagcattcttatcctccaccccaattcctccaccggcgaccaccggagagggaggaggagtggtgggcttaaggggagttgaagaaggtggagaaggctccctaatagaaggagcaacaggtcttcttataggaccttcagtttgagaattccttatgatcaaagctcttcttggaaaagacttgttggtaatgattgaagaatgagaagagcaagaagaagaagatgatgatgatgaagaagatgaagaagaagattgtaatgaagaggaagaagagggagatgggattttgatgtaagggaatgaagttgccactgacattttctttttcttttcttccgaacagtttgtttgttttgtttggttatgatggatttaggattttgcaagtgtttgtgtttgtgttatcagaatgagagggagagagaatggaagttgtgtttgtggataaggtgtggccaagttttcaacaacactacaactagtttcttttgtattttgtttctctttagcttctaacacacaagcgtttgatacacacgtgctatctttaattattattattattttttttcttatagtatatttgccatgcaaaatagtttaaaaaaaaaaggtaaggtggcgtttggtaacacttttttaattagtttctgtttttaaaagtagaaaagtgaaaatatttttcaa

SEQ ID NO: 163914 - DNA, 1897 bp, Cannabis sativa
gatttctcttttcgaatttccttccctcattctctgcttccctctattttctcatttctccatggattctttcctaaatgatatctcttaagcacttactgtcaaggaaaaagaagttgtaaacatctccaacatcactgctcctcaccctccaccacaatgcaataggattttctgcgaaattttctcaagaaggggtcacaatcctaagcagttttttaatttcatcaccaggaattggacaaggagatttccagtagatacttctacatatgacactgatgtctatatggttactttcggctgccaaggtgatcttcttagagtcctctccaaaaagccatggcatttccagaaccaacactttgttctgtgccttccaagtgctttgcaaaatgcttctttggactcaatcacaataattcgattctgggttcaggtgtttcatttacaactcttaagcaaatatgaacatcttgctcagattattggtggtttgattggtaactttattgatgttcatgaagattcactcaatgagggatggggtcctttcttaaggattcgagttggtatcgatgtctctaaaccacttcttcgtggtcaaatggtaacattcgcttggattaaggatgtcttatggcttgattttcgttacgaacgactacctgatttttgttatgagtgtggcataaagggtcatgtctttgataaatgccatgtctacttagagaaaattgatgagggtaaagaacctgatctttgttatggtcccttgttggaaggttctcctttacccaaatcactgtatgatcgctatcgtcaggatttctccaaggcaggcccttggtcttttgtgactcgtcttgttcgaaatactattttgcctattattcatcatccacgacagcctccagtgcttcctccccttgtaactggtcatgtaaaagggaaagcaatcatggccccaatttcatcaaactcttagttttcttcattggcaccctcttttgcagcgctttcttgtggagttgagataattcctactattgtggattcctctactgctgcaacaataacaagaaacgtgtcacaacaccaacacctattcgaacatcgggggaacatgttatgctggaaaaatgttcattgaggaatgattgtctcgaagcttctggtgttaaaaaaatttttggtgttgtagcatctgagttgaatcctgaattgattacatcctcggctacaataatcccttcacaaacagttgttctctctgctgcaactctacttgcatatcttcacctcaaaaaccaacacacagccaccaattaaatgttgtccatgccaatttccactattactaccaatttcacttcctcgatagttagcccagttcccgtgatccaaaatgcctcaatcaagaaccatgacatacctgatgtggtaactgcttcaggcagtagaatggcatcattgttcaccaaaagataacttgtttcctcaagtggtaatgtgcgtcaagttctcaaacgttgtcgtacaagagatactcctttagctgatgttacaaacttgaatgattcttctccaacatttgaatctacttcaggttcttctaacaaaccacttgtggaggacattactagtgactttttagtgaaggctggctctcaggcttgccaatcaccatgattctgttgagttggaaagctcggggattgggcagcccgagagcatttcgtaactttgtttgctcatttctcaaaaaaaaaaacaagatgtaatatttattatggaaactgaacttagtgtaggcactatttctaaatttaagaatgcttttacttttcaaaattgcattgaggtgcctcgggtgggattaggtgttgggttttat

SEQ ID NO: 163915 - DNA, 1215 bp, Cannabis sativa
ttgggctatccaaattgttaaaaacggaaaagaagactttcttgtgtggaaaagttccacttcggggtgtttctctgtcaaaggagcttattgaatggctcaatcggggagatttaatgagactaacaggctttggagctggatttggaatgccaatattcacccgcgattaagtttgatgttatggcgaacttgtgcaaatgttctacctacagcaaacatccttaatcccaagtgtttcttttgtgattcgggtgatgaggatcccttgcacttatttgcaacctgtccttttgctttggctctctggtttagttgccccttacctgttagattggatactactctttttggaagtatttccgagctgctgtgtaatctttgtgagggtgctgattatgaaaaaagaagtcaaatgctggtttgttatgctgtattgtttgagactatctggaatgttaggaacaaaattctccacaatgtcaatgcctcttggagtgtagactaggcgcgaagagatattgctaaccgggttaatgaatttgtcacttaccatccctctccttcccatagtatcactgcttctgggactgaggaggtgtctctaaacatacattcaaagtatctgctagtggtggatggttccttctccaatggtttgtttggttgtgcgtctgtctcaattgaccgtgactccttggagtggagttgttcctcggctgctggctcttgtgctaatgctcttgttgctgagatggaagcgatttctcttggaatgaaatgggccctgaggaatggttgggacgatttcaccattgcttcagactccaaaatcctggttgatgcgatccgaaccagaagacttcctaattggcactcagcaggggagttttactctttgttgcagctttttgattctagttcttttgttaaagttgtgtttgtgaaaagaaatgtaatcacttatgttgatgaacttgctaagaatgcccgacactctcagagcggttccttaaactgtaaaggggagggatttccccctgtgaatctcgctcttttctggtgttaatcttatcgaactgaggttccttttcaaaaaaaaaaaaatagtatttgaactggagtaagttgaaaaataccacttttattaatcaattaattaaatttaactctaattttatatttaactgaaacatacctctttttatatgtatt

SEQ ID NO: 163916 - DNA, 1678 bp, Cannabis sativa
ataatataaatacaaaaactaattattactagctaacacataataaaaaaaaagcttcattattttatttttattttccttaagatataattatataatatacaagattagattaattaaaactaataacctatattagtgagctttgacagcaatatcaattaaaaattaaaaagtggaaattaatcaaacaagcttgtatatacatcacactagctaagagtactcaataaaatatttttctacttcatggataatttataaaaatttataaagggctctgaattttttcgatattaaacaatattgtttgaacattaataaattttaatgaaataattactcaattaatcccttgttttttacacacacaaaaagttgcacttaattattaaactatatatatatatacaactacactgctttaaaattaatatacatatatatatatatatattgatcctatttaagataagaagatcttaaaaattatgtcatcttaagaaaaagtatgtctctatagcattatagtcatatcacatagcattttaaaataatcaaaggctttagtttcctatatatatatataaatatatatatatataattagtgtgtatattctttatatataactagctacaaattaagttatataattaatttggctaattcatttcaggctaagagattcgaaagtacaacacataaatattatcacatacaatatcaatatataataaggactaccattaaatttttatgatgagtcatcgcttttgtttggcacttattcttctatatatatacatatagtacatgcattatatatataaaaatattatttgaaagaaaaaagaagaagaggaagaatgttatttattttggatttatataaataagtttattttattttcttaaaaaataaaagacaaacaaattagggttgacaaccatacaatttcacaaattaaagttaagattttataaggagttgttctgcaaaattaggttattttttacgatggattaatttcgataattttttgcaaaatggcctctaacattttgtaatcaatatttgatcaaatttttaaatagagtttatttttttggcaaaataaattataccaaaattaagccaaaagtacaacttcaaaaaagagatattttgtaaattatagatatttatatataaatatatatctgtgtgtgtatagatagatatagttgagggtgagatgagtggattgaggtcctttcatagagttcactttcccatataggttcatatagtcatccaccatattgtgctttgtgacctttttattgtaaatttgtatagacaaatgccggaggcaatggggcctgcagggcaaatagggtggcaaacaaaccatacatatgtatataaagccaaatggatattaattggataatatatgaattatgatcttgatgaacaattttatgaagatgatcatcataatgatattgatatatataggctcaatttggttgagcttttagttatgacaattttggcttttttaatgtgacaatcagtagtcgactcgtgatccgtaaggaaaagtattgggcaagctgtgcaatctcacatcccctggggaaggtcaagtgtgatgatcctgagactgtgtaggtatgggactacacagtt

SEQ ID NO: 163917 - DNA, 1110 bp, Cannabis sativa
aattgtatttgttttgtgacttactaatcagtttgtaacaaccattgttggtgaaatttgaataagataactctgaaactaacaatatatagatgaagaagaagaagaagaagaagatacctgttatatctttcaaaaacataaacaatgagtggacttggatgaaaagcaaaactttcccattccaaacaattaatctctttcacccaattatcttcaatctctccttcccaatcaatctcaacaccatcttccccaaccacattccttattgggtgtttctcaaaatactctgaagctctaacaccccatccaatatcaccatccaatggccaatcctcactctcctcctcaaccaccatttccttcttctcctcctcctcctcctcagattcatcatcaatgggtctttctttcattacattctccttattctcaaacacaccagaatcctgctctctaatcgaagcaaatgttttctcaagagattccctaacgtaatcttcaacagctgcagcttcacttctccgaccacgccttggttttctgggaattgtcttaggaaactcaacatcatcttcttgtttcttctttgattctacgggcttctgggacagtggctcagctttcaatcgacgatttggcgacctgggttttggtccagaagcagaggtgggtttagggtggtcggattttttggaaaaaacgaggaaaggaagagactttggtcggagaatgagtggagtttgaagtaagactaacattttcttttcaaaaggctcaccaactgtttgataaaattactaaactaagttaagctaagctaagctagtaatgtcgtttcaataggaaactaagtaatacgacatggttttgttgtccttaaaatcaactattaaagttggcaattttatcttataagatcatctccctcctaaaactcaaattttggtgttaaggcaacaccaaaaaactattgaaattaatttatttttcaattccaatcacaatactaatttatatccaaatttatattctttattattctattattttattaatataattattttaaaagttttgattaatatatataattatttagttttt

SEQ ID NO: 163918 - DNA, 895 bp, Cannabis sativa
ataagggccccaagtatcacaatgtattatatcaaatctgaattttgcaaaacctgaatgtttaggaaaagagagatttctttgtttagcaaggggacaaacaaagcaatgagaatctttatgacagtcgtcaaaattacaatcattcttattgcaaagtaaggctaaacgtttgtgagatggatgtcccattcgagagtgccaaatctcataagtaacagtggtgttacaaacaatcgaattactgttgtccagaacatataatccatttatctctttacctttgccaatcacagtcttgtgatgcttttcctggataaaaaaattgttagcaaagaactttattttgatagatttatgatttgtaagatagctaacagatatgatactaaatttgaaagtaggaatatataatacattttcaagaatgagtttttctgaaatagagacagtaccactttgatttaccaacaagttttcattattaggcaaaataagcctagtagatggcacattactgatgctttgaaatattttgatattgttacaaatgtgccgagtggcacctgaatcaatgatccatgaggtatcaaaaaaatcagatgaagtatatgaaaagatcataccagaattttcagtagagttgctgggatcattaacaggtgtgttactgtattgactagcaagaagatttagaagtttttggtattgagtggcacttagttgaggtaatatggtatgagcatcctcattcttggcactggaatctgtactggtttgaagttgatttgccacagcttcttttggtttatttggtttattatatccaagagggtacccatgaattttgtaacatctctctatggtgtgtccatggtgttggaatttattttac

SEQ ID NO: 163919 - DNA, 2154 bp, Cannabis sativa
  modified_base (957)..(980): a, c, t, g, unknown or other
cttcgtcttcttcttgttgtcgttgagccaaatgaaagaacctatcagtagaataccttacataacaaccggcgaacatggctctaccctccgacgcaggagcacaattcaatagcgaagcactagcattcaccaaacagttccgacactcatctttactaagagttttccaacactgagccaaaccaaaaacaccctcaactccacctctatcttcatccacagcataacctcctttattaacagctttctgcgtcaaaatcgccagaacctccttcaccttcctcgcaaactccgacttcataagctcatcatttgagaaatccgtcggcggcccacatgctatcttgtcatgtttttcatctatagtctcgtgaatgaagctgtggttatcgtatcgaatgtagcagccgtcgaggtagagtctagctgctaccgaaggcaagcagttggggagtttcattcttgccacggcgaagcatgacctacaatcgggtggaggaaggtcgccgaagcattgtgcgaaggcgaacacaggtggattaggctctgttatgttagaaacaccccaattttcgatgcttaattctatttggacattgtccattgctacgatgaagtttgggatgaaatttgtgagcggagaatactcagatgttccgcagagtcgccccacttcgctcgttcggatctttatagcgttgataatgtaatgatttgataatgagtttagtattaggaaaccccaaatccaatgtaggtggattgagattggaaaatccattttcattttgctctgttttttctttgtgaaaaaacagagcaagagaaagagttgtgaattttctttgtttcttttattacaaaaaagaaaacgtattatgataacatctattctgagtctgaaatttacatggttttgattcaaatataaagttaagaagaagaagaagaagnnnnnnnnnnnnnnnnnnnnnnnnaagaagaagaagaagaagataaaacaaatacagagctaaatgaatcaaagagaactgactttgttttagaaaatagatcaagaacaaagcaagtcaaatgaatgtcatcacttttgtgaactgaattaaattctaataatgtcttcttcttcttcttttcttctttcttttttttttcttcttcttcttctcttctctctccctctctacaacatgtttagagagagagaaagtaaatcattgtgatctgattttggttaaaatgttttgtttgttgaagaagaagaaagcagaaaaatgagggagttttggatttggtatatttttcttaatttagtcaaattgttagaatgagatcaaaggaggatacccattaagccatgtggaatgtccacatcagaaaccgtgtggattattgtttagactcgtcttagaatgataccaaaaattagtttttctttaattttatatttttaacaaagacacccacaaaacatagatgttattaactaaccttcaattaaagtctcacatcaaagaaaatcttaacaataagttattatttttagaaattttaagtcattaaaactttaacattgtatttatatagaatgttttacgagtttttttttttttcatagttacaaaaaaatgtataaaaaaattattttaaaaacttatatattttgaaaatatattatatgagaccgtacattataatcattaataatatattgcaatggctaaactaattactataaataaattaatgcaattaatatttataatgctattttataatatattatgttctgttttaaaaatttatatatatatatatatatataaataaagaaagtataaagagtttaatggcaatctatacaagtttttcttcttattttcttatttttttttttcatttcttatgatttagttcatttttattctatcaattatcgttaattattaattattaattaacgttaataaagtacactaggagtgtatttataagtttctctttacaaacattaaaatttgttgccaattattgaaaacttttggagctcgtttggtacaccgtataagggttgtattgtattaaataataaataacactatgtttggataaagcaatgtattgtaataattattacgaccaaaattttta

SEQ ID NO: 163920 - DNA, 2202 bp, Cannabis sativa
tttgaacggagatggggcataccgtggggtttggtgatgagtgttgctcgggtgaactcaaatttgcaggcgaggggaatggtttaggttggtgatggaaatggtcaaagatggtgaagacgagctgttgacggtgaagctttgggttaggtgaaagaggattgggacggagcttgatggtggtcgatgggaggttggatggtgatggtgcgtcagagtgggggttgggttctcgtgtttggcaatcggctgggttgtgaaaaagggtgaaagtgatggtgaatacggatggggaattagctattgggccaatgattgtggaagtgggctggcttataagggggtttaagacttgagagtgagggcccagttgacttaaatcatgcacccaatgaaatataggggtcaacacttgaatgtacccatgatttacttgagactgttccccatgattggccccaaagagggaaacacaaaagtacaagggtcaaatgattggtcgttgtagtatagtggtaagtattcctgcctgtcacgtgggtggcccgggttcgatctcggcagcagtgccaaaaacttgttgtgaaaattgtatatacacaagtgcacgcaattgttgacaagtaataaagtgataaatcgagtatcgtctctacagggattgaaaattggaaattagtttataaaactaattactcacaaattggtttaaacaaaataaaataaagttatgtgaatatgtaagaaaaaattaacaaagacaaactacacagaaaataagctaaacttattaaattagccttaaaaatgcaaaggttatataatggtgcaaatgagtattgttgtaaattgatgatgtcaactaggaatttaaaatgtcataatccttttttcaaagtatttaaggtttgattctctaaataattaacatattcttttgcccaattaattttaacaataccaatttaagcacaattcctgcaagtcatacaaggtaaataatgtattgctattccatttacaaaccacatattttccaaagtggtattcatgcaccattcaagtaattccactaaccttattttttctaaaatcaagattagctagtacttactaatggtgataaagcaaaagtaagcaattacataaaatactcttgaatgaacaaaatcctttcactaaacatagcaacaaaatatcaaatcacaatttaagtcaaaaaataattctaacaaaataaaaatcaactcataatagattgtgcaaaaattgtaaaatttaaaagaaaagagagatacaaattaaaacccatttaaagcttgtcataagactctatgtttcttctccaaatttcacttcttcttgctcctcatttttgcaaatctcaaattaaaatgctcaaataaaatcctaaataatgctcaaataaaactctttctttttctctttttatttttcttcattttcttcttttttttcttcaatgtcaagagctccaccagctgcctgcccttatattaattccttcaacgcttgcctgctcttttttatcatatctattctatataaaatgtggctatataacaagatttttgggtgactttttatttatatataataaaataaaaataatataaatcccaaaatcaaaagcaatataaaaatataatgtaagcaaaagcaagaccatcacacgtaaatataatttttgtttttatttaaaatacctaaaatactattatttttaatcttgtttttaaatttaaagaaagtatcaagtatacagtactttacaagattttttttatttttacatttttctgttatattttttccttttacaaatcataatttacataaaaatttaataataaaagttttatgttcatttttatttattcttcttaaaacaatcccaataactttccccctttctttctctttcttcttcatgagaattggcgattggatctgcgctcgatctattcgatatttgtcctctgaagaaattgtttttcttcaatttgactcttggtatatttttgatttgtccatggatacacctaatcaatccctcataaattcggcctcatattatccaccatttgagtctctctctctctctctctcttgttcggccaccccaaaaaccagaggaaaccactcaaattcatctctaattctgtaatcaagttaaataaa

SEQ ID NO: 163921 - DNA, 3339 bp, Cannabis sativa
tggccggcggcgaggcccggaggggggcttggcatcgccgccatatcctacgtagccatcgactacctccgccacctatctccgacatggcacgagcgtctacagccagttctatggtctgtactcgctctaatagccatcactcgagttccattctacaaacactggtcctcagagtttcgctcagtccttccatttttgggttccatcatcttcatgctctcaactcttctctttgaagctctctctgttcgcttcgtcactgctgtgctcggtcttgattggcacaggtaattaattaatgtgagcttttgagctaaaaatggagtgacccaggtcatgaatctgatgcaagattcgaaatttttcatctttttggttttttcttcagttattattatctgggtcaagtttaatttgttgtttatttcattgcattaactaagttgtttggatttttgtgatttgatgctattttgggaaagtaattagatatttattaccaaattgaatagatttggaattgaattgaagctaaattttatttttgttatagtttctgggaaattgaataggggcctttctaatttcggatctggggttgttattggagatttttaattgcttaatatagtaaagaaactcctttcattggagggtttcctgagtttttggccttaatgatgtgtcacttgcatttttcactacaaatgtagtattacattattatttgtaactgacctaagaaacttgcttttattagaaaaggagatctttgattcacttctttactcttaaagcatttaagtaagttggaaagattaccaaagttaaaaagaagggatgaaataaaattttctcatgtggttaatttattttattttttaaaaaaaatgtgatataattgtgtttaattttaatgtttttataaaggggaagataatttaattttacattaagttaaatcatctaattttagtttacatgacttagaaaggactacttactacttagagagggtggaatatccattcacaacattgataaaagatagcaaaagactgatttaactatttgttttattgcaatttgtgttagaaagtttcttttcttcttctgtttaatctaagtttggaagattgtagatacaaacactttttcggttgtgcagaaattaacaactaactttggaaaaaccatgattagatacttgtcaatatcccacctttctaattgcagtaatggattaagcttacttgacaagtaccaactttactttacatttgttttaagttttatttggcaattaaactttgttgtggttcattaactcacttgtcacttaaacttgttgattcctgatcgaaaaattacttatttcacacgctaactttcactggcggttagacgattcaccataagtttattgattggcttaactgtgtttggcagtgatgcagctcctcttcccgacactggtcaatggtttctccttgctctgaatgagaaactaccatatacattcgtcgaaatattgagagcccggataattggactgcaccactacctcatgctgtttataatgttggcattctctgttttgtttgactcggtaaaagctcctggccttggactaggtgcaagatacatattcactatggctattggacgttttcttcgtgccattactttcgtttcaacaattcttccatcagccaggccttggtgtgctaatgctcggttcagagtccctgcgtatcctcatcactgggctcaaaagtactatgtcccttatgcaacagattctaatgctatacgccaattactacgagaggatatagcatatggtaagttctcggtttattttgaaatctttcttggatgtcaaaactattgttttaaccttttacctctatttcacagctgttcctgaacagtatcttggcgattatcgcccagattggggttcgatgagtttcttaatagattttctaaggccaactgcatcggaaggatctacttggtaccatttgctgaaaaaagctggtgggggctgtaatgatcttatctacagtggccacatgttggttgctgtactcacagctatggcttggacggtatgtatacctgttatgcaattcgaacttgatttatctcataacctacttgtctatggcacagaggcctaaaagggcattatgctatgccatgcaggaagcatatggaggctttacttcagctctcatatggctgctcgtgcttcacagtgcacagagagaagtacgcgaacgccatcattatagcgttgactgtattgttgccatctatgtgggaatcctcctctggaagatgacaggcatcatctggccgacaaagaacacttcgagagaaaggaagcttgccatgctagagaagattcaaaatcgactaaccaaagctgctaaagactctgatatcgggcaagtgagagaacttctcgaggaggtcgagcagggtagtgaagatagccagagcacaggaccgagcaagggaatgtggttgtttgctggtgcgaccattttctcgacgctcactattgttcttttggccttcacatggacaagcgacgggtaaactgatactcccttccacggcatagagggtagataaagcaactccattttcgtgtactatgtagcattgtttaacttggttgatgagaagtttgagtgtagattcttgtgtttacattctcagctaatttttacacgattgattggcttaagttcagtagcttcaactccttaacaatgtgctgatttgaaacttggatgtggcaaaaatcttgattattgctgtttttttttattatttttttgttgttgttctaaattacataataccaaataagaacatcattaaaaaaatatgggataccataacaaattagtatctccataaaacacatattaccaaccaatccaattccaaaagtcacattaaaaaaatgaaaatttcatgagttaatatgtttgaaatgcgttaacatattttttaaaataaaaaataaaaaagaagacatttgtaaatgatgcactcaaatttaattagtaaaattttataattataacctacttagttatttattcactaaatatgtaactagtatttcgataaaaacatgtgataatgttggggtagtaagagcaactccaaggaggcagcaaaaattgaaaaatggagtggttaatgctttaaggaggcaacaattatcactgcaaaatgagggtttatctacagtgcacggcttatatgccgtgcactgtagcgacggcattgttttttttgtttttgtttttt

SEQ ID NO: 163922 - DNA, 2568 bp, Cannabis sativa
atttcttccagggttgtcttggcacccttgactcgacaaaggtcatacaacaatgtccctcagccacatgccattttgtactactcccaaagaacctccaatgggggtcttctcatttcagaagcaactggagtttctgatactgctcaagggtaattctactgatctatttattgcaaatacttttattttaaattcatgctttctattcacttgaaagttgtaaaatgtttgtgtgtggtttctattatatttaggtaccctgatacacctggtatatggacaaaagagcatgttgaagcttggaagcctattgttgatgctgttcacgctaaaggtggtgtctttttctgtcagatttggcatgtgggcagagtttcaaatgcaggtgagttttaccatctgctataagatcttaatatacaatatgttggccaaatataagtatgtacgaaaatatgattgtatagacttgtgacactgtatatcaattagctggaatgagaaattaaaatgcagacttgtctggttgaatatacgtgaaatgtgaaggcaaactttattttttcttagtgttgctctagtgcttctagacatatgtattttccttttcggttgaacattattgattgagttgtgtcctaccttattggtatgaacaggtttccaaccaaatggccaagctccaatatcctctactgacaagtcattgactccccaaactcgatcaaatggcattgatgtcgcagagtttgatcctccaaggcggcttagcacagatgaaattgttcaagtagtgaatgattttagactagctgcaaggaatgccatggaagctggttaattcctttctcttgtcaatcaaatagtcaatgatttcatatgttttttgttgaaaattttgcagctgacataagttgtgtaacgtatttgacaggctttgatggagttgagatccatggagctcatggttacctgattgaccagtttttgaaagatgaagtgaatgaccggacagacaaatatggtggatctttagagaatcgatgtcgttttgctcttgaagtggttgaagctgttgttgatgaggttggtgctgataaagttggaatcagactgtcaccatttgcaaactacatggaatctagtgactccaaccctgaggctttggggcttcacatggtggaatctctaaacaagtatgggattttgtattgccatatggttgaaccaagaatgaaaaaggttggagaaatggatgagacccctcatagtcttgtccccatgagaaaggctttcaatggtactttcattgttgctgggggttataacaaggaagatgggaataaagctttagccgaaaatcgtgcagatcttgttgcttatggtcgtcacttcttggctaatcccgatttgccaaagagatttgagcttaatgcccctctaaataagtatcacagagagacgttctacttgtctgatcctgttaaaggttatactgattatccatttcttgaaaccatttcttaagtactcaattatatccttgtagcatctcatttgttgtctttgaaatgatttgtatggactttgaataatatagtttagagtactgtagaagggtaacatttgagaacaagaatgatttacaattgttgctttgatttgaaagaaaattaaatgaaaaagatagtttaccgtcgttgtatgtatatcagcactcgtccattatttctcacgcttaattattattattattattttgataagggggaaatgtctcttgtggagacactattcaatcaaaaaccaaacagaatacaacaaaggtcaaaagttaacaaagaaaggtaaccagcagcagcataaattgggatagaacactaggaagttgtttaagtgtgatttctattttgaaaattgtgtttttaaaggtgagaataagaaatagttttttgtcattttaaaaatttaatggtgtttgactcaagatttttaaatattttttactaaaaaaaaatcaatattctacaccatgatatgacatgaacccatcttatattggaccagattcagacttaactcgaacccagatctcgaacttgaatgcccgggtttgggttcgagtccgggatttgggattcgggattcgagtcttggtcggggtctagagtcggggtctaattccagggtctaaatctgactccgagtccaaggtccgggtatgtgaacaaaaatataaaatataatatattaaaaaaaaattatttttgaaaataaaaaacaacattttgatgttttctttttctaattttttaaaattcaatttttgaaaaaatgtttttaaaaaatttggccaaatgacctctattaatttttaaaatttaaaataatttttaagatatgaagtcaaacaactcctaaatttcttattaccaaacaaaaaggagaaagcaaagagaaaactagctaaactaaaataaaaaggacaacctatccatcaaaaggtgggacacatgagcgccactcacaaatctctttatgcattgtcaagattctattccacat

SEQ ID NO: 163923 - DNA, 1403 bp, Cannabis sativa
ttttttttttttttttaatttagctaactaaaatttaacaattcaaatactttgtcaatttattttaaaaaataataaaaatacttttcaatttatgtttgaattttaaattgttttttcttttcttttgaataaaagatatttattattaggccaacactaaaataactttaaagatttacatgaattcaagtaatcttgaccactaaactcttgcctcattaagagaaagagcaagtttgataagattatgagttatagagttcacagagcgattataaaagaaaaacttaaaaatattaagcttatcacaaactaaataagtatcttgtaaaaccgaactataatctcctagacaagcctatcttttgttcacgattttataacaattaaacaatttgtgtccacctcaatactacaatatccaaaacgagagcacaattgcaacttaatcagcatagccatagcttcgacaaaagacagaactaaaaggctcaccgcctgggtagttgcagacattacacaatgtcctgtaaagtcttaaaaaccacttcaaaatccatacaacaatcataagacttagtattttaatcttaaattgttaaaaatttatattgaaaagatttagatatttaagtttttaaatttcaaataacttgaatattttttttaaagagtgatttgaatcacactatgatagtcgtcgacgcggaagaacttccagtcaacaagctaattctctagccaaagatatacaaagtcagaatatgagtcacaacaagcagaacaacttatataagaccaagttatctcggaaatttagacaaaacaacttgagatcacctttatgaggcatccgatataaatagtaacaactttgatttttttttttatcttattttgagttctttaaggaggaaattataaattttatggatttttataatttttgtgcaaaaatatagttttttttcaaaaaaaaaattattttatgagaaaattaaagaaaaagttgatacaaaaaaaattataaattttatgggtttttatattttttgtatgaaaatgtgccttttttacaaaaagattattttataagaaaatttaaaaaaaaaaataaataaaaatatgggaaaatcatataaaagtaaccaacaaggtataaccagaaggatataagggggtaaataggtatcttatactatttctttcaatagattttaacttttttttaaaaaaatttcctcaacaaaataattttgaaaaaaatcatatttatacaaacttatagtttaaaaaacataaaaatgaaaattgctcaaaataaaaaaaagggaaacttacaaaaatactgaaatttgagttaacttttataaaaatactgtcacacggaaatctttaca

SEQ ID NO: 163924 - DNA, 1245 bp, Cannabis sativa
taattctaatttttggtgtagtgttttttaatagctattccgttttattttggaaagtatattcctcttatatttcatatttcatctagtactaattaattatttaatttggtacttcattttaactttcaagtgttccttgcattgatacacggtgatgatgttttgttagtctgctggagctaggttcatttttatgcatggttataggtatattatattgttgcttttctgctataggacattgaagcaacaaatataacactgaattagcatttggaaatggagagccttctgtgtctggcttttgattcatttttaagatgaggtttgttttgttgacctctttctctaccaactaatggattatattaacctaagtttcttttttggtgtatatttgtgtgaaattaaagttctgaaataattttgtagtgtcaagttctaagagttgatttctgagctaataggttctgcaatagtagtctccatctccatccttttcgaagttgttaattgtcaaaactgctttagtgtatacaaattgcctcttttacaactctaattaattattctcagggttgcattgtcctggaggtagtttttttccctcttattttatcactgggagtgcatttttatccttggtaaatgcttttcttctttcctatgagttcttcttcttgttgtactaattgatttaggggttcgctatatgtgttattttttaggctaattaggattttttgcccctgaactttgacatgtatcaaattatgtcccctaaacttttgaggtcgttaaaaataccctgaactattgagattgttgaatttaaagacttttgtctaatttcattcaattttactattttagtggttgtttatgtactaaactatgttacccagactttaatatttacaaacttttgatatttactaaattatacaattagcctattttttattagaatgaagcgtgagcatttaagttaaaaatattactgggcaggactaaataatatgtacaaaataaaccaaaaaaacaatccccatttgaaaacaacttacatagatgtgaatttctcctatcctaagttagacttaattactgagtttgtacaataataatagggctatttacaaaaatatggaaaaataaatacaagttatgatatatatggcataaaaacttaagtgtacaaaatatggcatttatttcaaaaaaaacttaaaatatgggaaa

SEQ ID NO: 163925 - DNA, 2446 bp, Cannabis sativa
ataactgtcccttgctaagtggactgtgtggaaaggagtacatacctaatatacagattacaaattgatggtaagcatatacaatgatatacctctttaactgaacataaatattggatttctgtttcccacctctctctcctctgacagatctattcttgttgttttcttgtgtggaaataaaggttgttcatcctcacagtacagattgtaaaatctcaagaaaaaaaaaagcgctccagatatatgtgaagggaagatgaacaggtaaaaatgtttgcaccacacactcaccacaagagaattgctttttctaaggcatttttgttttagttaagtgtatctgctgcaaatatttatcccttgatatatatttatatgtatatatattttttttcttcatgaaaatcagatgttgaataaccaaagtaatgctcatcaaatgacgttttattaaatttacataacaggttgcattttgttctaaatttttctctagctgtttttttgttttttaaattgatatctatatagtttaaaagagcataatgtgtgcgattgggaggtaatgcatttcctatgttttttctttcactctcagatgtaagactattggccttgttttcttctttcttttttacatttttagctcaatgcttactttgtttttgtatgtgtatgattaaaagaggtgcttcaatttagtaaagaattaagtcacgttctttatatgttgtagtttatgtgcgaaaaagccattaagaaatataagatgatcaagacccaaaacacaacaagtaataatcattatagaagcttttatggttgtcaaaattagatgaaccatttgagagctaataaataagatggatattgctacatacttgtattgtatggatactattgttaatagcagaatgagagtcaacataggaaatttgaggttcatctttattttggaaatttgacaacattgttgatttatccttttgggaaattaataattgcatactgatgcaaaagcttcaatgtttgatcaggtgatgggcaaggagtttgaagcaatttcaggactagttcgtcttgttattgctgatgagatacattggaatgcttggactgagcaacaaggagaagagtagagcaacaaagagaagagtatatgaataaggtggattggattaagagtagaaaagcagcttacagatgtagacattttcagagaagaaaactttattctctgaatattatgtataattggcctaaaaatgttgtattgtatgagaaaattgcataaagttgctcatgttagtaatttacaaaagaaatattatttctcacgagacattatttaaagtggttgtttacacaaatttcttttgtgattagggtctttctcaaaattagtagtggtgctgttgagctgaacccaattaggccatttggaatattgttcgctgcgctattgtatttgaaatcgttacctcaatttgaggatttattgcttcaattttcttatcaggtgaaattacattgttttaatggcatttcatatttaagagacttggcattaatttcagctaagtgggtggctgacgcataatcactttttgcagtcagagaatatgcaagctttcttccaattacgatcaataacagctgttatggctatcgtgaaagggcgtagatagtcttccaaactccttagatgtagaataaataacctggataagactctggaggtcaaaggagctgttgttgcgaagtttccatatgtccaccaaggcaatcgccacaaaggagattaggccctagtattaaaaaaaaaaccaagaaagcaaggatttcatgtcgtccacttcaatgttttcaagtctaatgccccattttgagtggaaaaatatagctttggtcagcgggcactccttaaacaagtgaatacttgtttcgacattatcactgaagcagcaagagccccccagtcaccgtccccatgttgtaaatgtcataagaataacttgcggctggctaagtatttgataggtgtggatcgaaagtccgttagggatatgactctgataccatgttaagaatcatggggttccatcttaaaactaattggcaatgagtggagtagctcatgttcttatatatagcttaatactttcacatttaatccatgtgggacaatattctccaatacacataaagcatgtgcactcttttaactgaaaatcgtcatatgaggagttggctctccaaagtccaaacacatatatcatgttgagaggccggtagaatttcgatttgaagaatggcattcgcaatgtgaggggacaaaggaaacatgaattaagggttcgtttggtacgtcatattacaccgtattttattgtataatattatatttaattgtattttatataatatttttatgtaaaattat

SEQ ID NO: 163926 - DNA, 2215 bp, Cannabis sativa
ttttttttggttgtagtataattcattatacatgactatttagtagatatttgagggaggagcaatggttgttcactcgaataattatagttcactaagatagtatacaattaaaataacctaatcattctgcatctagaattatctgtactattttaataaatcttgtacacctatcctaattagaaagtatttagaaatgatcttacagaccgattggatatcgaaaacttcctacatgtttgattactccaataattatagtttaattgtgaaaatactatgcggttaaacctacctaattgttctgcatctggacctatcagcacaatatgtaattaagcttgtgctcatctccgaactaggtggtaaacacttagacgcacaatataatttatgtaaatttgagtttaatctattagatcttcttgtagagataaaacgatggtattatttttttagatttatttcttgtattgatattataaaaaattacactaataaaaaaatagtattattttttggttttatttataaaatatatttaaatatatatgatattataagatttttcttatattaatacttttagggtgacaaaagtcaaaaattaatttctaacacgcctttgtaagggcaatttttatgggttttaagggtgacaatattgcccctaaaagtgaacgtcagaaatctatggattacttttaggggcaactctttgaataaagattatggtgatgatggtgatgtggcttttgacaagtcaaaggacaagagagtgtccttgctggcagaaaatttgaatggaaaattagctgggccagtgggcaaagtgtcattgacaatgctaggcattctaggtgggccaaaaaatttcacaaattaataactctttttgtgggcaagaaaagaatgatcaatatgatgagaatagggccttggctaattttttctaggcctaagaaacttttttacaagaactaaaatattttggagagttggacttacatgaaatcaaagctattgggggtgatattggggtccaacctacttcggaaaaaaatgagagaaccaccccacaaaagaaaataaaaatgcttgatggctctttcttacatttctcacgtcctaagaaaatttttcgtcaacacctgggagtcgtctgtgatttttcttgggataatagtgagccgaaagtaattgtgggagtggatggatcacatgagtgcgtggatgaggtagatggatccggtcataatgtgtccttttgtgagcgtaaccaatgttcagtggagattatacttagaaaaagcctcaatgatttacattctcaaagggtcggtttgacccaggtggatgatgatggttcatgtgtttttgctcagtctgatacccctgtggaggaggatgtctcctctcctccacaggagtcatgagagccttggcatgaaactgtagagggttgggacagacctctatagttctagagttgaagtcccttgttcggccgtgctctctggattttatcttcctgactgaactaaaaattgatgctactcatctggtacgtattctcaaaggccttcatttttattttaatatcactattcccactgttggttgtgcaagaggtatcatttaagcctggaaagggggttttgattttgaatgtatcaactggtataataatcaaatctcgggtttggtatatttagaccccctacttacttgtgactcctctcgtgtgttcatggtcctccgtattttcatgcaaaaaagaaattttggaaagagatcatgcttacgagagataaatttggcaacccttggctaatcttgggggatacaaattttgtgcacgatgaatctgagagggagggctctaaagggaaagacttttttatccctattattttaaagttggttaattctaggggacttattaatttgtcaatccaagggaataaattaacgtgggataatcatcagtctggtcttgcccgtgttaaatctgcccttgataggggccttgtaaatgatggatggaactcactcttccccaaagctgtccttgggtctttccatactagtgactcggatcatagacctctctgcctttattttggagggattgaagctaaattcaagaggagtttcaaatttgaagaggcttggactcgggatgaaagaagtaacctggtggttgctcatg

SEQ ID NO: 163927 - DNA, 749 bp, Cannabis sativa
cttagtgagtagattgggccgtattggtcagccatggctccgagtattcgggccactggtaattgaccattcagaagatgaaggtggcctataattggcaacacccctgatggttcagggagtgattgtacactttttttattggtattttttttgtttaggtgttttagaaatgttttgaaagcagaatttatgagtaggaaagttaagagagccaacatgagtgttaagaataatgttttgaaaggaaaagagtgatcatccattgtaaggaggggagggattgatttttagaagaagaaatgtttgtgagagttgggtaatgatcagctatgggagtaatggccttgtatttatagatgaaaagtgatcaagatcagtgagaattggtacttttgatttcaatatgattctgataaatttttttgtggtagtatctgctacactgtagcattaaattctagccacataaatgtgtgattgtcaatgccatgatttattttaacaataaatattggactcattcgaggatctaaaggacattaattaatggtgtgtatagcaccaactttgagtttttaatgtattttcacttttagttctaaaaatatcttttagaataacctaggctcattggttttttaagaaataacttattgtgaatttattcagcaaaaaaaacttattgaaatgctgaatagaagattagtaaccatttatttaaagggatattagtggcaaaattactt

SEQ ID NO: 163928 - DNA, 1394 bp, Cannabis sativa
attaagacaaaatagaattagtaaatattgaagaaatcaagaaaaaatgtgtctttcttgtaatccaaattaaaagaaaaatgcggtattgatgaatgaatggattcaagaaatgaatttcatttgtaaccaaaagaataataattaagagaagaaaaaggttagaatgggtgatacttacttgttaggaacaataatcgaattggaagcgaaagagtgagaatgactgaatgaggagttgtttgagtgtgtaatgtagacaaagagacgattacaaataatataaatgggatatttatgtttcgcggcaaaacttaactaaatagatgattatataaactgaaagagccattcagtacgactgaatattttggccgaacttaattaggatcaggtcaccccgtccggacccgagccgttgaacccgaccatgtgaaaaaaactcgtaggtccaacccgaacaacattatcgaacaggtcgggtttgtattctgaacatctgcatttgacccgtacccacccaccaacctgaattattattattatttgagtaatttgttgtgtaatgtctgccgcggtcgtccagggaagccaagtcggttgtcaacttgggagccgagaaagaaaggggttggaggagagggtcgggccattgtggggtgtctttctttgatagtttatgatttttttttttttttctaaaacagtaataatatctaagttagtaaattataatgtgttaataataattataatttaaatattattatcattaaaaattaaagttaaatatttacggtgcatgcaaattaatcgttgtatatactcattttcaaaaggccacacggttgactgctagtaactagaatccaattccaccgaattcaagttcaatacagtcaaatatcttgcgttgactgctagtgttttaggcaaggagtaatagtggttatcaatattgttattcgttgtcctgttcacgcaaagatctattgccttgactttcttctcagctatgaaagctaaccatttatccaggtgggaaaccttgcttatttcataagtatatcgcatgtgaagtgtaaaactagttatggctgaatcggggataatatccatgactctcttgcggtgttccaaataattatcgacaaaattgtaaaactttattggataatttgccaaattagaatcggaaaaggagagtttggggacacaataacacatgagcctccaacttttttaaattaggcaagtcgaaacggcatcctcatttgaaagaaaggacagaatatgtaggacagaatatgtagaattgatttttttgttaaaataaagtttaattataatctgatctaaaagtgatatgacaaaactgtttacattttttgtat

SEQ ID NO: 163929 - DNA, 1719 bp, Cannabis sativa
gatttggtaaatatttaaattcaagagtaaaactcctaattaacctaataattattcgacttgatacttaatacaatacaagtatgacaatgtgctagctagacatgctagttttagcctgcccttattagttacatatctttcttataacatgttatgatatcttttttaataaacattttgcccttactagaaatctcaagaggaaaaaagactgccaaggatattgtctttgattaagacaaggagggtagctaggctactaaatcttatgcccatcttccaaatagtggaatgacacctctaagaaatcattacaatgaaagataacattttctaacaacaatatctaatagagagttacaataatgctatttcaatcattcttggaataagtttctgatcaaacaaaacaaatatatacatttccttacctgtgtattatcttttcttccatttgggatggctccaaagttcttgacattaaatattttctcaccaggaacagctttactgcccaatctggtaccccttaacgtatcacgacttggaggcaatagtggttttttggcctcacaattgatcacagcataaagacaaaaagatatgatcagactgataatggtatggcaaatttttaatctagacattattaataattatatatatatatggatataaactaaattgaaaagagttcttaatttttagttcctataatcatttcttcattaccagaattaaaaagcctccctagctaggaggctagcgcgtttattaaaaaaagtaaagtaataaaataaaaatatatatccaaataatttgagggtgacctctttttgtgactcaattaaaatcttatacatataatcccttgttttgggtaaagatattgttattataatgctaatttcggaggtgttttaactctacggaacatattgatcattgagttggtttaatcttttttggctaaagttagtgattttagcctatttcttctcattgaaactttctgtcttggccacaaatttaactacaaaatctctgatgattagattcagcagtcaacttaatatagaatgtttattgaggttatattaatatatacataatattttgatttagttgttaatttatttatatgcctgaaaagaaattaaccaattaaatatcatggcattatctagttaaattactattggtgaatttagaaattgtctctttggcatgcaggaacttcaaatgcaaactcaaatgactatataaatattagagagtacattgataatatatgaaactaaatactatatataagatgcataaaaattaatggacacaacaatctggtacaaaatctatacaaatttagtgaaaaacttttatttttggtgtacaactctaataattcacacaaaatatcacataatttttttttttttataaaattaatatattttacttaaaagatgtcacattttatattatttatattaataacacaaaataactattttatgatataagtttatcatgcttgctagtaagaatttaaaatatttaaataatttagtaaaataaaatatttactataattttttttaacaatgaatttaatattttactattaaattattattttacttaatatttatttttatttatgttatttttttttagttttataatttagtgttatattatttttttattttattt

SEQ ID NO: 163930 - DNA, 2633 bp, Cannabis sativa
aagcatggatgtggtttttgatgagaaaaccgtgtataaagacatgtttccaactcaaagtggtgtcatatcagcaaagaaaaaggataaagaagctcaatttgaggtggagatggatcagactgaacaggctgcagagagaaatgatggtgcaattgaggacataggtcatgaagcagatgcagatgaaacttcagaccatgaagtttagctggccttgcaaccttctccacagaccaccaacaaacagattggtcgactgacgaccaatagtgaggaaaaagcaacattttcgagaaatgagtttatcctcaccaaactaacttcaaatctttttaaactattttcaacaattcaaatcaattaagataaaaaaaaatatatatataacaccagtgtgactattaatttaagattaaaaactattttgggcgagcttagagatgacccaaagcttacacattcatttcacccaagcacaaactcatatttggtgacatgttaacttttgattgttgatctccaaaattcgtacacatgtctcataaaaacgtgtataaagccatggtagatagaagatggaaaggcacacatagtcatcatttcttttctcttttggtagtgagatatacttactgtgtgaatgagtaatatgaataaaataacataccactgaactagtatgtacaatgaaaacctataacaaaagttcgtttgtttatacaatggttcaaagttgaacatagcttctaaatcctaggggaaaaataaacactttacaaggtctcaaaacagtaaggctggcaaatgcaatcaattgcatgcataagttttctcctaggccccacagcatttgcacccatatccttgagcttcttcatggttaggttcaccaagtgaaacttactaagacccttcctctgaaagatcctcacaaactgttccagacccagagaggcaagccacctgctcaacccaccagctttctgaagcttcctctcgagattcagtgccctcaatttttgatgcaagggtgtgccaccagcatgagaaccgctatggccatggagtaatagtcttggcgccatgatatttcttgaggtgttagatattccaagtaatctgtgagacatggatgtatgaacttggtgtgggtttactgattccactcttcggtcttgcctatatggtttggttgatgttgtaaagttttgagcaccagaagctttcttaacttggatacccttttcagaaacagttggcatggacctcttccaccactcagttggccgctctagaccattatctaccctttttataggcacagcctgtgactgacttgcttcaaggtttagctgtggagatctatcagcaacaggaagtgaaggaaccaggatggtgatcctctgtttctttacaatgacccaactagtttctgaatgaagatcaggatcaggattgggatttgaagtgtcaatgagcttccttgaggtgttgtttagctttgtagggactgccacaagctgcctttgctttgttttacccatcaagctgaaatctgcttgtgacacataaaacagtataacatctattctaagtaatgactgaacaactgaccgaaaaataaaaatacaagccgttcaagacctctaacccagcaatattataatttggtgaaaaaaatatctgatgacactctcactaacaaaaatttatcctacatcagaactaggcaaaccgcaaccaatgaccatttttgtcaaccaagatgtatttttatttttttagatggcatcgattttttagggcatagaataagaagccttttcaatttgacaatgacacagaccctttgcagtaacaccccttaacattctctctataactatttaaaaacaaattcttattggactgaaaactacctgcaagtggtattgaaatgctttagattaagtagaaacatggtattccagttcataattgttccaataaagttgatctaaaacaattcatggaggaagatggcgcctctatactcttgaagatgttctttttattgtgctctcaactaaaagggccactaagttgacactttaaacaggtagaaatttacacatcgtgcaaacccaaagtagaagatctaattatcttgaaatttatagttggaaaccattcccacaatgtcatctatttatttataatatttaatgaagtatagaagttagcagaaatcagaaatcaatgcacgtatagatacaactacaaataacatacgcatagatttcagcaaacatgtactattcaagaaccaaggaacagtactttaataacaaatttgagagtgaatgtataatcttatcattttgaagcgggtcagggctaactaagctcaagattctgagttcagtcctaaaatttgagcctccttatagtaagcaattatagcaaatgagaacaagtctgtgcaacataccatagaacaaaccaaatagacacaccactaatagagtaaagcagaacggcaaagcatgcacagatacgttgtgccgagctatcttcgttaaacattcacacataagataacaaatactacatgtatacatggctcattaagttctaaactacaaagactt

SEQ ID NO: 163931 - DNA, 1422 bp, Cannabis sativa
gcaaaaatatagttagaaaatgcctgatctacaattgcgaaaacataggacatttttaacatatattgtaattcaatggtgattattcaatttagtaatatcttcacaaaacaccaaaacatcttatcattctctaagaaaattaaaggagcaaaaatatatcacacgtatgcatataaaaatgaatttgctttctaataatcaattaaaatggaaagaatatatagatttagtaagagtatttctgatcacaataattggaaacttaaatcccatgttaaacttaaatcaagtaagatgaaaagatacatgcatattgttctcatgccccatttcttaatccaatgggggaggcatagatgaataattcttcataaggatcacacaaagtcctttgtcggaggatgagtcatctccaatctaatcaacgaaaaatattacagggacttctacagctgttatcgcacaagataggcagaatggggcttctcaacaacggtagatatgggagatgaatcaacataacttaacaacaacgtcataatggggcttctcggcagtggaagaatggggagattagtgtagatagctagattgacatagcaatggaggagatagaagaagattaatcgtaaagggaagccttctattttttagcctttaattttttatttttttaaaggttaatcgtcgtttatttctaaaaaaacgttaaaaagttgttaaatcaacaaatgtcgttgaataactaactattttatatataaagatattaaaacaatttcttcataatataattttatatcattgttattttcttagttatttaggtgctaataaagtttagttattatattagaaaatttacacattatacttaaaaatagatttttttttttttatttttacgaatattttttatttatatttttacagttttattttgttttaacgtttcatgttatcgcaatattataatatattttccccacttgtaaacaaggatttcatttagaacaacgtgtaaacaatgacctgtggctgtaacaaaaaaaaaggtcccaaaacatgtgaaaaaaaacttaaaatttcatcaaaatgtaaattttttattattttttagtatttttgaaataatccttattatatatttttgaaggtgttgattttttatttgggctttctttgattactcagagacttcataaataagttttattttcaataataaatattctgaatttttttcctttctaaatattgtattaattcgtttgttaattttatttatgtttttaggtgttttatgaagttttttgtgaatgtgaatgagcggacccgctagttattgttaagggttaatttcacaaatacacaaaaacaacaaaaaaacaacaaaaatacggtttcacagaattttaa

SEQ ID NO: 163932 - DNA, 1625 bp, Cannabis sativa
  modified_base (1583)..(1591): a, c, t, g, unknown or other
cgccggtaacacatgagaaggtgaacatgcggtgacttttaaagcgcacaagtgatgatctactcctcttcggagctctgtctccctctccccctaatgatccaaacccatgatgaaactgttcactccccaccgagttatggcgccggtgatgataattattaccacttttcatcatcatcccatcattaatttggggttgatgatgatgatgatcagtcacgtaaaaatcagctatgttgtaaccctgttgtactgggacatgattactactatttccagaagacaaatactcgtattgtcttcgtgttctgttcttcttgatcgccctataaacaagtggtatcagaccctccattatctattataattagcagatcgatataaaaaaaaaacatggatatatatacaattggattgggttttttgtttagttatatcgggcggtttggtagcacgtattatcaactttttattatattaatttgtataaatatatatataataggcctatctagttgatgttgaaagagaaattatggacggcatggccttggcttatgttatagcgtgctttgtatattgcaagtccaacacgtcatgcattttgatttcttgactttttgcatgaaatagtagtaaattttggagatcaaatttatatcttatgtaaaagaactatgactgctatctaatatttatatatttataggtatacaacatgataattttgtatttagacgccacccaattgaaaacatatgttttattagttgcattatatatttagctatataattaggccacatattcgtaattatcaatatgttattcttatacatgaatcaaatcaaagatatggatgagtattaagatatatgtataaatatatgtctatatgtgattatttatttattttgagaggatatatatgtatgtatatacatttaattgatgattttcagcagcatatattatatccattaatttgttgacttgttaattaatttgctcattcaccttgccaagtcaaataaagcacatatatttttccaatgggcaaagtttatgcgatcgatttgttagcccctatcaatcaatttctgaaacaataaattattatattattattttacttaatttgaccgtgcaaattaagaagaaaagaaaagagagaaaaaaggtgtattatgaattgatacactaatagaaggcatatattattattattatcattattattatgggttagttttacaataatcagcattttacttaccgaacttttgatactatctaatttcgccccctaaaatatagagcttattaaaaatttcccctaaaatataacagttacatatttatacccattctattaggttatgtttcttttaccgttaaaaattaatatttttactccctgaactttgaacaatacaaaattttacctcttttttttaaaaaaatattaattttaaaaattataatattttttttgttaaagcaattataatattttattgattttgaaaaaataataataaaaattattaaaaaatctaataaaaatattaaattaattnnnnnnnnntaattttacttaaaaaaacttaaattattcctaa

SEQ ID NO: 163933 - DNA, 2491 bp, Cannabis sativa
aagactgtgatcaaaacttcacctacataatcccataacttgtcaacaaaaccaataggaatgctagaaattccattcaccttaccttgtagaatagtaagaaaagagcctcgaggcaagaaattcggaagtgaaatctcttttgcttcctccaaattccttatctcatccattagaaaatctctcatgtgatcactttcagtacaattatgaagctcatcattgtactggtttaacatctcaaccaatctagcagtacaatgcattctcttgttattgggatactcatcaaactcacctctcaaaagaatcttcctaagagattctttcacaaaaccaatgattctcataaaagcagtcatggcttcagcaacagaagacatatgtttaggcaacttgtgaagctcagccaaattaaaattcaccttatcattaatcttcttaacaatctcaggcaagtttcttgctatacttgaagcttgaatatgaaccaatttctgagccaaaaccggtacaccaacaatcgatttatcaatcttcgaaagcaaaggatgccctgcaaacagcctagcttcctccttccttgcctcctcataagactcatcaccaatcctgttcctaacacagacataaccaagtccaatattaacatcatcagctgtaactttctcaagaagcccttcgggggccttatcggctttggtaaccacagctagagtcctctccccagttttgtccacactctgagacatcctaatagactcacaagtaggaaaatcaacagtagcagataacacattgagtactatactagcttcaggttgtatatactccataattatatctctaatctgatcataaatattctcaggttgaccatgaacaggtactctagttataccaggaagatcaaccattgttaaatcaggaacacctttctttttcacaactaaagttaatggagcattagatataccttttccactacctgcaatctcatcagttgctatgttaatggcttcagagatgttattttcatcagttgttaccactttcccattgaactccaagaacagttccggctcgggattcgaatggtgttgcagcctcataatgagagggactctcgtgcatattccttggccacgagggagacttatgccagcaagggactcaagcacactagacttgcctgaggactgatctcccaccacaacaatggtggggagttcgatcccttcatccataaccatgaggtttctgagcttgtccactgcgtctagcaagggacgaattctgtcgttgtatgaagaaacgattggtgcgttgattggctcacttgggtcgatttgaactagtgccagtgatgatgattcttcttcatactgtgcctgagatgatgatgatgacttcttcttcattgtcaatgcctttgttattgaaaacagagaaaacagaggagagagtgttttaaggatttgagtgtgaagagatggaatggagaagggatttatatttatagagagactatcaaaaaaaaattattgaaaggttggaagttgataaggctctctcttcattgaatgtttaacgtttggaattttgaaggatatgataattttgtaaaattggaattgttgatttattattgttattagtattaacaattaataatgtgatttattgttaagattcgagattaattggtttgcttttattgagtatgatacgttttctaatatcgaagtagagtagaagagtccctacttaactacgggtgttaataatataagagtgttgttattggactgttgcttaatacattccacatgggttaaggatacttttaaaaaatattacattaaattatataaaatcttatacttaactagggaactaagccgcgcttcgcgcggtgttgttcaacttttgtaatctttttatattttcttttcgtacttattgagttatatataatctaaaatataaaatttttatgtatgtgtattataaacaaagtaatagtattaaaattagaaacgtaatttgctattttaaaaatatatagaaaaatagtgatattatttctgacaaatactaaaaatagtgaaattaacatagaaattactcttatgttcgcatcttggcttcaacaatgtggaggtcgaatcagaatgtcaacgtattatccatatcctgcagaagagaaacttgttcttggttgagtttggcctaatttttaaagatatttataatatttgtaaccgtgttaatatttctaagtttctcttttgtaatcgttctgcgaactttttagctaacaatctttttaaacttgcattgtctttggatatggtaagagtgtggtggccgagtttaccgggtattctttgataattggtgttgaaatccctttatatattaactaggaaacaaaagccgcgcgttgcgcggtcttaaaaaaatcataagctatatatattattgaaaa

SEQ ID NO: 163934 - DNA, 1155 bp, Cannabis sativa
gagagagagagagagagagtacgccaagagttataactgtcgactataaattgttacctatactttagttgatgattataaattgtcaaggattttaatcttatagcaatttcaaactgacggatatacttgacgactctataaaatcgatggaaatttttattataggtattggttttaaacactcttatactttaattagcgatagtccttaaaaaaagttaatttatggatcgatgtgaataatactttttgtataattatggtaaaagttgttgagtcgagtttgttagaattttggattcaactcttttgttgagtagattcttgcaaatgtatttgagtaaaatggtttgtgtgcttaggtggcgatcctattacaatgacttatttcaacaattttcatgtgagatttattagattatgtaattgcaaatctcgacacacacatatatatatatatatatatattaaattttgtgtgattggattgtctcatcattttataatatgtagatatataaaatatagagaaagaaattatgtgacatttgcttgttgcattttacttattatataatgtgacgtttttttaaaggaaaaaaaaaagtaaataggaagatcacttggtgtcaaagaaaatgtgtaggtgaatctcaaattctcaatcattatttacattatataattagtatttccttttgagaaaaatgaagaaaagttttcttttgataaatgtttgatttgtttttcttttgtaagatgtttgattggttagagtagggatatttactaattagtttggtataaatttttaattttttcaaaataaattaacattatgattttttaaaaatttaaaatcaaatcaaaccaattaaatgatcaaaccaaatcataatttatatattttgtaattgttgtaatttttttttccaataattattcattcttttaggacctgtttggcacaaattttagaaaagttaaaagttgctttttaaaaaagctgtgacaaaaaggtgtttggtaagcagttaaaaaacagtttattaaagaataaaaggtaaagctggtacaacttaacttttagaaaaagttgttttaattaataaactctataataaattattttttactaaaaatttatttaat

SEQ ID NO: 163935 - DNA, 3599 bp, Cannabis sativa
gcatttggtggctataatgaagaaggaaagcccgtatttgaggctggcgatgttgaggccagtgaagactatgctattggggaatacaccgaggctatccctctgaggaggtaaggtgcactgagagctcaatggatttctccaccatccatgcgaccatgacaaagatgaagaatttacttgatcgtcgttacctcgagaatgtcgaatgcttccttcccttccctgactagctgacggctaacccagagaaagcaggttgtgattttacccttactcccatacttcaaaaagatcgtggactattatcacctaagtctgacccagttcacccccaatgacctcaagtacttatccgtcctgctcttactctacgcctcacaaggatggggtgaaccgtccccgcatgataccaactggctttttgatctgaagttaagtcccaaacagaacaggtcgggatacttctatttttctcagatcgagaagaaattgttcacgggccccatggccaccgaggtgactaaaatagggggctttgtggatgagtactatttcgtcaaggaaatggacaccgcccatactagttttcagaaggtgtcgtcttactaccgccctccgttcatactggagcttaggaagagggctcaaacaattctccaacttcctcctgctacacaaaacatctctctccatgccaccggggccaattttgttaagtacaaactttttccacccaattttacaccaaaatgttgtgaagacagcaaaggagaccgtgcccagacatgagactccgagcaagaagaggaaaaagaaggctcctccaagaagccaagtacctgctgagaggtctataattatcagggaagaaactacaggagttgctcggccatccgccccagtggcaggaaagggaaaggatgtcctggtggaggaggaataagtagattccttaaacgatgagcctccttctctgcttgtttgggagaattctcctacctatgtgtagggtattttaactcatatttaatttttatctgtattggtttgtatcgtacttgcctttaaccctcttgttttgttcgcatgcagctatatctcaaaagatgttccaagccttgaagaagaggtcaggtgacagctccaggcaaatacctccggctaaatagtcaaaggtggatgagataccgcccaaggaaaagagcttgattgagtcacccattgatgtctccaaggaggtggcgttggaggttgagccattaaccaagaagacctccaagtctaagggtgccaagggaggaagcaaggatgggtctagtccgtccaagccttcaaatacttctatcgtgctaaaccttgagaccaagaagggcaaagagatgcttcaacattaccaggaccggatactccgtgaggtaaatgatcagctatttggaggagatgagatgtctgtggagctactaatgggcaggctcctgaaggaggcaacccgagtaagtattttgtctttggtttttatcttgtccctttatccgtgcaggttttaaccttttcccatgcagctcaatttgaagatggcctacacttactccagagccaagtccagtgccttgaaaaccataaccaccaccaataacctgtagaaggaggtggatgcagccaaaaaggaggctgaggtcacgagggcggagatgggagaggtgaacaagaaacttttggctacaaacaagagattttttcaactgtagaaggagattcaagacatgtcgtctaccacctaacttaaagtggatgtcgaggctctatccggggaggtcaatggtctgaaggacgagagggaatgtctctggaatcttcttgccacattaacccaggagaagacgaacttggaagaggacgtcaaatccaggcaaaacaaggaggaagtgcttcagaaggaggtcaaaagtttggagacggccgccctggaggttttctatgaattctggaaggccaacccagaggggaactttaattacctcggtgaaaccaaggagtcgtatcttagttattgcgtggcccaaaaagataaggaaaatctcgaggtagccaaccccacagctccgaccaaccaaagtactgaggcctcgaccaccaatgaccaagctgatccttacaaagaacccgagactcctatcgtgtgaaaccttcttttctttttttttgtttagttcggtccatgggccttttttaataaaatatggtcaaccaagcagcctttaaacttggtaatacttcattttatttaaagacaactagctgaccgggcagcctttaatcccgattttatgtcatgcttttgtcatcttttaaaatgaatattttccccgttttagtaattacacatgcaaactactatgtttgttttgagctttttatttacctatgctttgtactggtatagttgcccccgaagtaatcgagcagacttatgactcttggtgacttgcatttcacaagttctattttcgtctcttcggctttttggttcgagcaaaccctttgtacacattttaatggtaaattcataacttgctataaaaaactattgacataattagaatgataattaatatatttattcatttattggtcagaataattttgttactgtagtaacttacatttattgaattatgaaagcttttacataatctaactaatctttagctaatgaaaacataaaacaattgcatttttttaaactgtactttaaagatggccatccgacctgagtattagttattttatccaaacctttaagcaggatctgcccagaaggccatctacttaagagtaaatgttctaacattgtgtactagaagggggtcatcaaaccttgtacacttactagtagtatttcctcaaatgttccctgttccaatatcttggtactagaatgagctccatattttttgtcataccatcccagcttgtatgctccagagtctataacttcaaccacttggtatggtcattcccagttaggtttgagcacgccagcggcgctgtcttttgtgttcaggaatgctcttctaaggaccatatctcccgcaaagaattttcttgccttcacttgcttgttgaagtaccgagccacctttttctaatgagacactagctttaggtttgctgaggttcgtttttcttcaatctcgtcaagtgattttgccaagagggcatgattggtttcttgattgtaggttaatctcctgtgggacagaggttctaattccacgggcaacatggcttcataaccataggcaatagcaaatggtgtctaccctgttgttgttttctccgttgttcggtatgactacaatacttttggtagttcctccggccagttccttttagcctcttcaagctattttttcatggtgtccttgagagtcttgttgactgcctcaacctgaccatttgtttgagcgtgtgccactgcggagaaactttttatgattccatgtgtcacacagaaatctataaacatctggctatcaaactgtttgccattgtccgaaccttttttggatgtaatggttgccaatggttcggct

SEQ ID NO: 163936 - DNA, 1508 bp, Cannabis sativa
  modified_base (252)..(257): a, c, t, g, unknown or other
  modified_base (1094)..(1109): a, c, t, g, unknown or other
  modified_base (1437)..(1466): a, c, t, g, unknown or other
tttgagttggccttggggccggtttcagatatgatcagaaattatagagtatttttattgacaataatatattacataagttattatgtttttataaaaaatttacatattttacgttttaagtattttttttttatatttttataatttaatataaaaacaacacgaaaataccaaaaaaactacataaaattaacataaaaataacatataaataatatcaaaacaacaataaaaaataacatacagatnnnnnnaaatcaacaacaaattaacaagagtacaagactgtattttctgtaaataaaataaaaaaaatcataaaaatatttaaaatttcgtgaaaccgtatttttgtatttttttcttgtttttgtgtatttgtgaaataatcccattttaataggttgtaacaatttagaaaatatatgtatacttttttttttctttttctgaacgtaaaaatatgtgtacttatatgccaagataaaatacttaagtcaagaaatgatgcatgaattttaaggggtaccgtttttttcgtatccaatgtgtgaaagagtagtataataaaaataattagttacgattattcaaaaaaaaaaaaaaaaattagttacgaaataacaacaccctaataaatggacatcaattttctattcagttaaacttgtacaagctcactttgttatatgtttcatattagagaaatgacattgggtactcatggtgccaagcatttttgtaaggtatgatataactattagtgcaatttaatattgggtcctatttattttattttaataaatattataaaaaattgctaactaattataaggtcacacttcattgtgatgctaaacaccatataagtacatcaactctattttcatattaatttgttcttttcatattaatttgttttttataatctccttcttatctttttatactttgtaaaataaaaaattgtgaacacacttcaaaaaactgaatttaaatattttaccggatgttttttatattattttaatattttttttaaaaaaatacactatatttatactatcacacattattattattattattannnnnnnnnnnnnnnntattattattattattattagctgcttgaatcatatattttctagatttatcaattatcctttttttatagatctttattttgtgtgaaaattagatacaattttatctattttctcattattaattaatagattttatttgacatatttcttttataaaagaaaattgtgcagattcacttatttataaaagtgagtagttaacccattatttgatttgttttatttataaaagtgagtagtgagatatgaaaataacaacacccttgaatgtagtgttgactacaagtgagatacgtgttggaatttattttaccaggaacttagnnnnnnnnnnnnnnnnnnnnnnnnnnnnnntaaatatgaactttctaaaactataataaacacatataaagt

SEQ ID NO: 163937 - DNA, 5533 bp, Cannabis sativa
  modified_base (4610)..(4611): a, c, t, g, unknown or other
  modified_base (5091)..(5093): a, c, t, g, unknown or other
agaaaatgagagacccaaagtaattgttataattgcaatttagataagatgagcagttttttatttgaacgaaccaacagatgatgcagttttctctttctccaactctcgtggtgtttcatcgatgaattcggttggaggatggtgtggggatgatgagattcattcttcagctttggctttgaggatgtctgccatagattcaacatccatttcaccctttcaaagaatgcctccctcagttcatcatcatctctttctctgttgcttctaatttcagcttcgattcaatcatatgagattccagcttctgtctcagatcacttctgtctgcatttgaaatcaatacaaagtaaatgaatataagcagcattcgtattataatctaaaggataatcaagacgaacgaataagcatatgaaccaaacaaacagtaccccaactatgatctaaatattttcattgtttttgatggcaataggagtcttctatatatggaaatatgaaatataagaacacctgtaacatttgaaacgtctttcccaaccatactggttagtggtttctttcattgtgtttttaaacctgttgaaaactacatcaacaaaaaacttaaataatgataataaataacaaataaaaattgtttataatttgtcatctataaacaaaacgaaacaataaaagtttaattttgtgatttacaagttaccatctattagtatggaatggattcttttttctttttttttttgttgcatcagaagctttgacattattctccatttcattcaatgtttcagtcaggtcatcaacagttagctttgtcttttcgagcccatcaagtgcttgtgatttagtagtagtttccggcattcttttgtagttccttcctgacactcattcacttttttctgcattgaaatcaatacaaaatttggatcaaataggccactagtactacagacacttaatttccacaagtaattataatctaaagaatcaagatgaatgagcaaatcttatcaaccaataaatattcatccctgcaaagattttaaagtaaaaagagtagtgctgtacttaatactgattatttttcaatgaaatatggttatattgtcagatgaaagcagtgaaagtacctctttagctttggctgccatggttatattcaattcaccagctgctgctaatttcagcttggattaagtcatatgagattgccgcctctgctaagtagagaatgctctcaaatgacaactttctttctatggctatttaataaagaatactgaataatcaccaataatcactacaagagcaaacaccatctttgaatcgatgaaaccgactgttgtctctcactatgatctctctcccaacaatacctgagatgaactttatggcactatgacagtctccacagatcctaagattttttgtgatccttataggtacaccgggaggaatagctatgaggccaaaggcgagcgcaatcttctcactatggtaccacacttctgacactttctcttcttcttctaaatcgaacagagcgaaattggtgtcaggaatgtagcctgcctccttcatctccttccttaactcggttagcattcgttgaatctcggagttcctttcatgggaggtgtccttagattggaagatatggattgcattcttaacagtgatccaactgtagcctgtccctttcttgatcccaacttctttcatctcttttctcacaagagtggcttcttcccacctaatttgtaaatggttaactaactcagatttgtctaagaaatagggaaaaaaaaaacaaaacaagcaaaactaggtacctgccatcagcagcaaacatattagaaagcaccacatggttgccagagtcgttggggtcaagtttaaacagattatcagctgcaatcttgcctagttctgtcttcttgtacattttacaagctccaagaagagctccccaaactgaaattgtaggctgcattggcattttcttgataaaatcgtatgcacgctctaccaacccggcacgccccagcaagtccacgacacatgcataatgctcttcacctggttcgatcccgaatattgttgtcatcgactcaaatatctccatacccttttgtacagcacccgctctactgcaggcggataatacacaaacaaacgtaacataattcggtctggtctcactactgcttgacatcatttcctcaaacattgctaaagccatgttagcatgtccttggtgagcatgtgcacttatcatcgcattccaagtgattgagttcctttgaggcatttctttgaaaacatgttgagcatcaataacactcccacattttccatacatgtctacaagtgcactcccaacaaagacgtttccctcaacacaagccttaactgcaagagcatggactgatctgcctagttcaaaccctgaaagcccagcacaagcacttagaatagttgaaaccatgaaatcgttaagctcaattcctgctttcctagactgtagaaagatctcaagggccttttcctcctcatcattttgaacataaacagccatcatagagcaccaagatacatcatttccacgagtaattctatcaaaaaccattgttgaagacacaatgtcccgacacttcccataaaaatctatgagcccattcataactgagacatcttttccaaatccatatcttatcacaaatccatgtaattgtcgtccaagctccaaattcaatgtatccgaacaggcattgagaaatgcacagaaagtgatcgaattcggctccccaccaacacccagaaactccacaaacttgtgaatagtagttctaggccgcccaccaagaacagcatttgatatacaagcattccacattacaatatttctacgaggcatttcatcaaacacttgggttgcatcttcccaaaaacctgttttgcaatacatatcaaagcaaccacaaccaacaaagacatcacctatctgaccggccttcatcgcaagggcatggagctgttttccagtaacaggcaaacgaagagaagctgaggccttaaacacacaaggaaaggtaaagtcattgggttgaatgccctcacgacacatgtcagtgaagtggagtagagcagaagcaaaatgagcattttggacagaaccggcaatgagggaggtccaggtgacgacagagcgtgttggggtgaatgagagaatgaggtgagctgagtttagaaggtcaagtttggcatacatgttgatgaggtggttggagagaaaggaagggagtggggcgtgaagggtcttgattatgtgggcatgggtggctcggccaagggtggaggagtgagtcgagagggctgattcgaggatggaggcgagggaggtggcattgaggaagggcattggagcaatagcagtaaaaatgaatggaaggaaggaaggtgaagtgaatgaaaactcattattgtgtggtaatggtaatggtgaatattaggcagagtctttggaaattaatgatagcaatacccaaagagatgagtgaattgagatgaagtaagtgtggaggtgtgaagtttcccaggaattcgatgatgatcataataataaccacactcaactcaaggaccaaagtaacaccaataattccaacatatttgctttccaccattgaattcaggtgtgttcggtttacaattaattgtcatagtaataggaatagtaataaaatgtaatggttatagtaatatgaatgtttattttgtaatcaacattgtaattagaaatcaaagagaaaaggtaaaactgtctttttattatttagttatcattgtaatcctcatttatgaagtgtaagagtataatgagaatttataagattgggagtaatgtctattagaatggaattccattacaaaggtcggaaacacaaaccaaatattgtaacggtgactttgattccattacaatcttgattccaattaaccaaacataacatgctcaatatttgaaattttaacaaagcaaatatgtcaaacagtgtgcttgggcttgggctgggcttacacatatatggtcatggggttcagttatgtggcccgtctgacagggatggtcggagaaggctggtattgtgcaccgtgagagagagtgtgtgagaggggagtcggagaaggttgggtggcgggggtaggcgactgggtgctagggttttttcagttaagaagaagaataaaagaaaaaagaaaagtgttaaaaacggaatgcgagtttaggtagttttgcctctaaaaaatcaatttttgtggttaagtgttaaaaaaattaaagttcgggtggtttagccgccaatatcccaacaaaaaatatttttcaaattattattttttaattcttttaaatatttataattattattttaaaattaatattacgtgggccactaaaaatttgccacgtgtacaagtgggtagtccactgtggcacttaactgtgatttttggacaaaggggtatagagcaaaatagaataggagtttaggtagttttgcctccaaaaaatcaatttttatggttaagtnntaaaaaatttaaagttcaagtggtttagccgtcaatatccttaaaaatattaaattttgcatcaagttttacaattgtgtattagagcacaatgttaaaaattaatgcaaatatataatatatcacaaaactttttttgtgtcaaatatatcacaaaattaaaatgtaaaataaagctaaaaccatctccaatgaaatatctaaaatttgtgctaaatttgacataaaaataagtttgtgttatatttggttcactgtttacaattatgctccaaggcacaagatgtaagataataaaaaaaattattaattatattaatagtcatttaatattttattgagaatataaaaaaatattattttttattctcttattgtttacatatgagcattgttataaggcaccaatgatgcctagcaccttcccgacatgtcacgttgcgattgactagcggtactccctaaaaactattatattannntatatgagacctgatacttaattggaccaatagcgatattgacacataggagggtgctaggtaccactggtgccctttagcatttctctttaaatattggtaatatggtaaataaataatataaagtttagaaaaaatcaatgaatcataataattagtagtattgtagtaaataaaaatgtagtatttattgtgggtgggttaaatttgacacaatgttatttgtgtcaaatttaacacaattttcatgtgctaaattaacacactttggagaaaattattaaagacttagagcattaatttttcttaagtgtgctaagatataataatacatcacatttttaacatgtgtaatttaaaaccaatatttattaaacatacgaaataatagtggaacaacccaaaaacaacattagaaaaaccatgacagccctaatatt

SEQ ID NO: 163938 - DNA, 1278 bp, Cannabis sativa
acttaataataagatgatagcatcatcagttttggtgctacgtaacaaatactgtcctaaaactggtaattaattaaatatttcagataaaaagaacagggaatatttccttttgacaaaatttaagattacttggcagtctccatgttatgcacaatcataattatatattcaacaaagactctgtgcattacaacgttaattattatcatcagcaataatgaaattaattatctacaatatatttgagaatatctttaaagagaaaaccattaagctccttaattacttaccactaattggaattaaattcttatgaataatataattaatgtcaatatatctctaagctaacaaataataatatggaatgtgtagtgctaataagatttttgatgacgtttcaatttaaaattaattggcaacaaatatatgtatcattaaaatagtatttataaaatacttaatctaatttaatttatacgtttcaatttgtatatatttatatacttatgcaaattaaattagattgagaaatttaaattccacatttataatttacatgatacaaaaataattaatccatcgaattcaattcacacatatttatacgtatatatttaaaaaaaaattataaataagtaattgatttaaagtaaaaaaaaaatattatacctatagtatatatatatatattctaaaatttaatatgtcaaacatatagtacatatatatataaaatataatttaagataaaactaaactttttgcatacatttttttttatctttcttctaatttattattttttgtttttttatttaatttaatttgttgttggagatacataaaacaatagtaatatattttattttgttgttagttatgtgaaaattgttaagagttagacaactatgttttgttaattctgtttgtgtttgttatttttctttgtatagtataagccaactgtatgattagttttgtacagttgtgtttgtaattagtcttagctattcattcattattgaataatagagatttatacttttcacatccaaatcgtttctcaatatggtatcagagtgatcttctctctctttcattttttctcacttttttctcatctctattgtctcttgtgatcaattttgagtatctgtaacatctctgcttcaagcttttattgagcccttacacccacggaatgaatggctcttatacacgagtatgctactctggctgcttcatggaatgacgactgaccctacagaccaa

SEQ ID NO: 163939 - DNA, 4570 bp, Cannabis sativa
gccttagcaactaaactttttgacgacaagattccattcaagaagaaggtttttccatttccttctcctctatccatttccgtaaccaataaatacatatatttatctatatgtcttaacttatttgtttctcattaaactaagttatgtagctgtaatagtgttttaaaaagactaagttttatttatatttatatcattattatttatgcatttgaagaacaataccatcattcatgttatatatttgacgttttctttttatttccagttgaaatgggtaagaagagtggctactgttacacatgatggtgctgtaaggttcgatgttccgggagatattaaaccacatagtcttgatcttgaaactggagtcgtttataatggtactggagatgaagaacatgttgaggcaccagaagacaaacatgtgcctccattgcaaattgttatgcttattgttggaacaagaggagatgtgcaaccctttattgctattggaaaacggttgcaggttatacatagaatatttacatatgtatattatatctttatttatattagcttattaatggaatatagttctgttagcgaatgtaataggagaaccgaaggccaatattatgggactagacatttttttcttagctccctaaatctatgatatgctgaaatcttctcttcttactgaaaaataggttgatagttattacgtaaattgggagcctgtgatttattgtgtgctagcctaatgagtgtatctatttacttgcaggaagatgggcatagagttaggctggcaactcatgcaaattttgaagattttgttcttactgctggactggaattctatcctttagggggagatccaaaagttcttgctggttgtaagtatgttaatcccgttgaagattttctttttgatgtcagcttgttttgttggcaataacacattatgaacttgtaactttctgtggtacatttcatagtttgttcaaccttatttcttcttcgtgaaattataaattgacatttatatatttatacaatatatgtggatgtcctcttcctgcgtatattttcttttgtctttatattttacttctctattttaattaattattttaacgatataagagaatgattttttttatatttatctcttatatgcataattatgttcacgagcagatgcataaggcatgtgctttaatgctagactagtgtgatctattatattatatatgcttggaatagttttctgttctgtgttctgataccttttcaacgatttatagttataaagttgaagagatcagtcaggaaacgtaaattcttgttttgtcatgattagccttttaatatccacatttttttttgattagtccagccggttgagaacttagatttgattgaaaattattattaccacttttacgtatgtctggttgatatgtaatcttctcaattgccacttcacatatcatctgaatcttttttgcagatatggtgaagaacaaaggattcctgccgtccggaccctcagacataccaattcagcgaaatcaaatgaaggatattatattttctttgctccctgcatgcaaggaagatgatcctaaaaccaatattccatttaaagtagatgcaataattgccaatcccccagcatatggttagattccacatttattttcacgttttagtactgcagccttttaaatagaattactgtagtatgtcttaaccttgcagctggttagggaatgggaactatggatgcattcttagcagtttttcaacttgtattttgcttgttcaggacatacacatgttgctgaggcgctaaaagtaccaattcatatatttttcaccatgccatggacgtaagtcttgttttctgagataaaattttcagatggttggtttatttttagaatgaatcctatgattaaaagatagttactgaattacgtaatattcctgaagcgggatatatttatatgtgttttgtaatttatatggttttgactttgttaacatattatcaatttactttaggattgcataacaaaagtttattcttttttcagccctactagtgaatttccacatcctctatcacgtgttaagcaacaaattggatatagagtatgtctcatacactaattattttctttctcaaatctcatctacgctagattttcttaaaagaatcctctcatttttaagttttgaaattttacaatcacttttcatgttgtttgcagctatcatatcaaatagttgatgcattgatttggctaggaatacgagacatgataaatgaatttaggaagaaaacgctgaagctgagacctataacgtatttaagtggaacctctagttctcccaatgacatcccatatgggtatatatggagtcctcatcttgttcccaaacccaaaggtcatatgcgcatatcttcattactttaaagcatcttgaataacatgatatgtcacgaaaggcctagttttgttaagagtcaaatctgacagctgctgcttcttctggaaggatatataacacaatcttgtataaaatacttgttatgcagattgggggcctaatattgacgtggttggattctgctttcttgaccttgcttcaagttatgaaccaccggattcacttgtgaagtggcttgaagctggggaaaagcccatatacattggatttggtagtcttgtaagtttagttccatttaacttcatttatttaggacatacaattttttgtaagttacaatctaaactactgtcaacatttttgtgttatctgatattcaatacttgtttgtaacagcctgttgaagagccagagaaaatgaccaagattatagttcaagctctggaaataactgaacaaagaggcatcattaacaaaggttggggtggccttgggaattgtaagtttcatttctttccccttctataataataaatatcttatatgtacgcatcattgtatgtgaactttgtgtgtaaagaaagtgtagcatcacccttttcttaaagtcccttagcaagcaaggcactgaatgttttttctatgttttcccatctcattagtggaagaaccaaaagaatctgtgtacttattggacaattgcccgcacgattggttatttcctcgttgctcttccgtggtaatgttttcccattaacagatgtcgtttccttgttttactttttgttttgtttggctcctaataaggggcaatacttttcaggtacatcatggcggtgcaggaacaactgcagctggtctaaaagctgcggtagtagattctttctagtgatttttttgttgtattatttgccgactaaattttattgatgattttcaaaatcatttatcaagcaagcaatttacataatgagtattgaaaacagttctgggcactcttgttatttatttcatcagctaatttcaggtcatattttggctgttattttagtgtccaacaacaatagtaccgttctttggagaccagccattttggggggagagagtacatgctagaggagttggtcctgctcccatcccagttgaggaattcacgcttgataagctggttgatgccatacgttgcatgctagatcccaaggtaagaagctaataaggcccataagatggaccataacgtagacctttctgttataaatttttgattgttgagttggttgtgtgtccatatggaaattcaggtgaaagagcaggctgttgaaattgccaaggccatggaaaatgaggatggtgtggcgggggctgtcagagctttctacaagcaatacagaccaccaatgagtaatagtgaagccttgtcgcatcatcggaagagattttcagttaggcaatgttttggtttgtcgtgctcttgagattataatcaatacacctcaaggaatggtctttgctttcagtttcccatcaccaatgtaaattttgcttattattgtaattgtccttttgctgcagtaagtattctgtttattctccaatcaaaatcgtacgtttcttgttgattagaaagtcttttcacataattatctcgggcctattacatttacactagagttttgtgcaccttgtctattgtaaaggtaaaaaacataacatataaagttttggaagttaaatcctgtttttttagttaatattaacacgaacagtttgtgtatatttatctacacatgacacatttatactaatcaaactaatataatcaacaccttagcaccgccattttcttcaactgctttatttttctgctttggaaaaatggagtatgatatacatgatacttactaagagcacttaaacctttttgcaagagtttctatatacactatattaattcagtggttgtttaacaatcatcttcgacgatgccgttctgcattctcgccacctttgccgaagccattaggggtgttcatccgatccaatccgcaattttttggtcaaacaacatccaatccgcactaagtgcggatttcatattttggatccaatccgatccgca

SEQ ID NO: 163940 - DNA, 2346 bp, Cannabis sativa
aggaattttgatttattctgagagaaatgtacaaagcagtaaaaaaacaaagaaaggaaagggagctttatatagagctcagcctaagtcggttacaaataggggaaaagaaataaagaacctaactaactaacaattaacagaattcctaactacttccttataatcagaggagtagactaaagaatacaaaaggaaaaagagatatgttgcagcggtgtacaggatagtgtatatgtattctttaatagtataagctgtttaagcatgtatctatctaatcctgggaaagaccattggctatcaatgaagtggttactaaggtacctaattggaactagcaaagaaggcatgacgtacaaaataaaacctggaaaagtgactatagaaatatttagtgactcaaactatgtgggatacaaagacactcaaaggtccacatctgcattttttgatgtgtgaaaattatgttagttggaagtcacaactacaatctgtagttgctttgtccacaacataagtagaattcatggttgcaactgaagacatcaaaagatgtatttggatacaaggaattcttaaggaattgaaactatttgaagggactgcaatgattaatttagacagttagagggcctttcatttatgcgaaaaccccatgtatcatgacaaatccaaacatatagacattatgtacttctttatcagggagaaggtgacacaagggaaactctaaattgagaaggtgcatacaaacgaaaacccatctgacatgggaataaatgttgtaactttgcacaagttcaaccattgcaaggacttcctgagaattggagttggctaaggcaactccataagttttaaactcatatggcaagattttatttggtcaagtatgagctgaggtggaatatgttaggtcagctcacactttacttgccacgtgttctacatttgttcagattggtagttaaagttagttaggttctgtttctctttccatttttccagttctaactatttttaaacaacttgtgttagtggctcttgtacatataaataatgtaatttataattggtaagacagagatttacaaagagagtttagaaaagtgagatcaagagagaaagagagaaagagttcattgtggaactttggtttgtatagagagaatttcttagggacacgtttggtgttgctttgttctgtaactataaattctctaccattgaagtgcacgaactgactccaagtttctgggatttcagacaaggggattaggctcccccaatcaggaggaagtttgaacctaattcttggtgttcattgtttaatttttgtttttcttgttctgattgctcgttcttgtttttgcattgtgatttgtgtgtgtgcaagtagagtttgatggtttgtgatcattaaaaatcccaacatatagctattaatttaattacattgagagaataagaattagtagaaaggataatatatgagtgaagaagaatgatatgaaaaataataaattagaaacatttttcataataagtagaaaataaaaaataccaacacaaatacaaattcatagcactccaattcaaaaagaatgtttctaaagcaacatttaccatataaatcttttgcatttttttttttttgagtgatttcatgttaatgtatggaaatataatattataagatgtatggactactcatctcaatgctaatcaattttgagatgaaactacatgcaccttcatgataaattctaacatgatattagagacttctgactccgccttaaacctccacttttgggacctatcagccaatgtgtagtagtttctagggactttgacatgtttcaagaaaatcacaaatttcttggcgtgtacacccataaatttctgatttggccttatgtgattctttcaaatgtcacgttcggtcttgtgatgtttcattatagccacacttttaggcctaaacgtgaggagggtgtactagaaatagtctcacattgttaatgtgtagaaatataataccatatataagaggcatgaattactcttctcattaccaattagttttgtaatttttaaccgcatgcatcttcaccacaaactttcaaattctaacactgtgtgaccctttttttttgacgaaatttaaaatatttaacatttttttaattactacactaagtattatggcatctctcattttaagaataattaaaaagaatccttctatagtgttggattaaacctccacttacactgatattaagactcaatacaacttaatacaaaggacagaaaaggaaatacatgcaaaatccctaa

SEQ ID NO: 163941 - DNA, 1162 bp, Cannabis sativa
aaaaaaacatatttttattttttgcctaaagcaaaatagattttaatttttgtaaaaaaaaaaaaaaaaaaaatatatttcaatttctatatttaaaaaatattcaaaaataattttgtacacaacacaccctatataagttacaacttacttaaaaatacttttctttgtcaatattgtgcgcttggcctaccatctcaatgaattcgaagatggtctcaagtgttttattaagtttagttagctatcccacaccaactcaactcaaaattttccttataaatttataatatttgtctatatcaatcaatctcaacataataataaatttgctatgtatagaagtagacatatacattagtataaaaatatggatttgatttgagtttttcaacaatattgcatttaatatatattagataaaatattaagagctacttattcatcatgtctttctatatattgttaatttttaaatcaatgaataaaaataaataaaataaattaataaagaaaaagtcaattatttcattacatagacgaaaggcaattctattttaatatctctgtagaaagaaaggaagaaaaattaagtagggttatttcaaaagcaacacttgttattttaatgtggaaagcaacaattgttgaacatagagtggttggttgaaatttaaacatttatttaataaggtacagtgtattacgtataaaaagatgttataataagaaaatataaaattatattgttttgtatgattatggttgattgtgatgttagttgtagtgatcaatagagtggtcctcctgaatttctctatataatatatgaattcttaattgtatgacaataagacataagagtggctaatctgatgattttaaagggactttttcctctatagaactataaattttaatccctttaaatatatatataaattttaaaagagaactttatataaatattcagaaaaaataacaaaaaaaatatggaaagggagaaaaaataattatacttggaaattcgagagtttattaaattggagttttaatcaataatattagtgttcgatgaaaataaaaagggagtaggagaatatgagaaatttttgtgaatgggaaaataattacatttgaattctattaaatgtgaaatata

SEQ ID NO: 163942 - DNA, 1753 bp, Cannabis sativa
ttttatcacacttgttttcaaatcgattttagtgtatgctcatcataatgaatttatgtcaacataaaaaatatatattcttttaaagaaaaataaaattttattacctgaatacccttgtgggagagagccaaagcaacagcataagcaaccttggtaagatttccagtaagcaagacttgagttgttccttttggtatggagtttagtataacccccactgctaggctactgccatctacaactttcaccttcaactcagggtatcttttcacgtaaatctcaccatatgcattcaaatcttctttctgcatccacgtacatgacattttattaatttaattaatgaaaagtgataagttagagggtaacatatatatatatatatttatatatatatacatgcctgattcaagagacctagactcaatacttttacacccttttcctcagcgtcaagtatggctttctcaatcaaattgttaacggatgatttttgccattgtagaaaatactgaaacaaaaaaagaaaacatgtgctgattcaatataagttatagacagtagcatatataatgtgttatttgctcaatattaatataagttatagactgtagtatactatgcaattcttgcatacttgtatcttgtacttgggtatagcccaagtttgcaatgtgagtttatggaaacggtggctctcaaccaggaaaggacgagcatagagcccagccattagggttgacaaggcagtgagaggccacatcaaccaaaggtaccatttcgatgaagagtgaggcctagaggccaatgcaggaaaccctatctccatatggtatatggactcgggtgtggtcatatgtgttaaatacaccacattaggtaattcctcctttcttttcagtgacatctcatataagttttctgaagattcgtctacggttccatagatgtaatcatacattggcatgaacaagcaataattggttcggaactgagtgtggtgcaacgaatgaaacctacaatatataaaaattaatttcactacataacaagatatttggcacataatttttaaaatgtttatgtttataaccaacaactaccaaatgattgtttttagggggaaaagtattcaaaatcaataaaaaaaattgtaattatataaaagtttcaatcctgcaaaattaattgtaatgcgtcccttaaagtttcattttgaaatatttgtgagttgaactaatcacgaattcacacttattggttttgttaagtagattttatacataattacaccaataaacagtaagacaacgattaaggtactaagcacctatactactctttagcaattctcctaaaaaaaaaatctttacgctaccgtagcttataattaatgacaggatcaatcgattaaaattatatctaatatttcacaactcatagcttgtcaaactacatatatatttacttaaagttatgctctcatatatttatttaaatttaaatgcacacacttatatccatccatgaataatgatgattttgtcaaatttaattttaagtagtacgagtgggacctaaacatataaaagtaggtgtaatatatattttgtaggcaggtaacttatatttctaaaaaagtagcaccaatatatggtgccctaacactcataggtaccataattagttgaataatattagatatgttaaagtgccaaaatatcaataataaagagagagagagagagag

SEQ ID NO: 163943 - DNA, 1682 bp, Cannabis sativa
tatatatatttatttatttaccttgaagtaaaaaaaactaaattagccaacactgcattggccaatcaatcattagatatagcagtgaaattttagaagataagttaagcataagtgtatatgtataatttattttagaaataatattattttaaattttatattttattaatttaattctcttataaattttatattttctaaaatagtatagacagaactttgaattaatttttgtcaaaataaaacttaataatataatccaatttagagatattatgataaaaaaattattaaaaattgagtttaaagtcttatttttatctttttgaaaaatatagtatctattttgtcatttaacaaaactctaattagtaacttttgcaaaacatatcatcgaaaataatatttacccataatatattgaatgtcaatgtaccacctatttataccaacaaaataaatctacctttcatgaataaaaaaagaaaaatccatatcaaattttttaatgtaggacttattatttactaattttttgttaaaaaaaaaaaatcacgcagtgtagattccatccctgttctttagatcttaaggtaattctaaagatcacatgctagttaagagtctaattcttgacccaagtaagagataaagctattaaaaaattttctaatactacactacacaacaagtgttaacttattatttattattatgttgaacattaggtaagacttattcttttaagtaaatttaacatgccactttagaggagctaataaagaaagaaattaaaactatcctttcccaacaaataggcgcatctagttttttcttttgaataaaaataggcttatatagttacacgtacaaaaacacacaccaattattaattagttaaaaaataataaacaaaaaaaatttctctaactatatatcatcacaaaaacaaataaccctttttctcatttaaggatattattgttaagaatatttaccaaacttttgactattcattaattttgaataatttgtgagattattttagagataaataaataatttatttaattttgattttttagggaaagaaaagatagagaagtagccacgtacccgattaaagaccatgaaaccaaggtccaaatcaacaccgtcaaaagtaacagttttggcatggcctcccaaataatcttctttctcatacaaaaccacttctttaacgtcgtcgttttgacccaaaacgtaagccgaaaccagtccactaatcccaccaccaaccaccgccactctcatcttcttctctacttattaattctgcattttcacttaattaacattttattctcttcaaaaataataacaactataaatatacgaaatgtagataacccaagaaatgaaaaattataaatacaaatacagattcccaaaaaataattagatcttgagaagggattttcgatattgattattgaggattaacaatgtcattgtcatagaaaataaaacttaggatataataatgtataaaacagagataaaagcagagagagatatatatatatacctgaattatatatggaatgaatgtgtttttgaatgtttaatcttggttgtttgattggatttggggtagaaaataatgaaatgttgatacatataattgggaattggga

SEQ ID NO: 163944 - DNA, 716 bp, Cannabis sativa
acatactctgggattgtcatcgagttggttgttgacattgctggtgtcaagaagagaaacaaagacaagctgttgatcaccattgttgtaactccagtaagcaacaccagctgggatagcaacaatgtcaccttctctgacgtgtcgaagcttttggtgtcggtctggttgagagccttggctctgtccttgtccttgtcctctttgggactcttcaaaagtctcaggacaaccagggaaagtcactcccaaaatacctctacctgaaataatagaaagtaaaaaacagagccaaaaacagagtaagtaaatatatttatgtgtattaaagattggacctttaacaatgtagacgagttgaggagtgttggtgtaagaaggcaagtgaagcccattttgttcaatggtataacgaacaactgccacaccagcacattggaactggttgtggttggggttccatgactcgatgagtccggcttcggcttcgactcgggtatcgggctctcgggcttcgattctgtctatttggcattggttttgttggcgatatgactcatcttgagagcgtgagcgtgagcgagagatggctgaggtgccttgcaacagaagaaagaagcaaaaggaaagagagagcaaagccttagtattagccattgttattactctgttttgaggtgaattggagaatggattgtgtttggtatttaaagaga

SEQ ID NO: 163945 - DNA, 769 bp, Cannabis sativa
ctctctgtctgataggcaaaagataaaccctgtttactaagagttcatatataatatagagacaacacatggcccataaatagacctatacatacattcatcctttgatgattttcctgtctaaattttctgagatctaatattaattgcttcttatctgaaagtgatggctggttgcccccaccattgttggggtttctccctccatatattaatggttggttttttgtatattttgtttttcttttttcttgatatgatcataatcaagtgattattaattaattaattaatgacataattattaataaaactacatttttcggtagatgcatgaacttttatgaaccccacttagtatttggaagggaaggatatgttgagcgcaatgcagacagggccatatggctaatgtaggtagttgttgtttgaatagggctaaagggtactgaggcatatattatgtgaagggtttgacataaatgacacttttggctccgaaattcatatcatgtttttcctctctcaacacattttgtcagctcacccagctaattaattgcttggtctatttttttgttttctttctttctcatcatctgtccaaaacttctaataatatgtatacatatacattaattaacgcgtttttaaataaacaattattaatattaattgatgcatcaagcatgtgacacgcacaatactttgtatatataatatatgagaaatgttaaagggtactaatggattgtctaacatctttata

SEQ ID NO: 163946 - DNA, 2340 bp, Cannabis sativa
ttttttttttttttttctatcaaaggaagcgattattgaagttgtgggtttttgtaaatgcattccctgagaactgcttgaattctagcagtgcattgtgtcttgcacattttaattttaatttattttttattgaaattttagagatttaaaacctacgaaggagagtataaatggtcatataacattattttattgttttcggggaaagatactgtttatcgaaataaatggtcagatacaataacaaaaagttgagaaagtaaagcagtgaaagagtgacaatgagttgaatggaagtcatgactaaatctttcattaagagagtataaataggattttacagtagaagcttagggaagctaaacactaacggatttctacagctgtaacacaaaaacaattggaggtagaatgtccccaatgctacacgaggaacacagtcaacagttacattttgggaaaaggaaggatcagaagaggcatcagttaattgcttttgggaagctgttgacttgagctacctgtagacaatcagaaatgacttggagttggagtgatagtccaatattagattctcaaattaatctatgactaagaactagagactccatatcccttgagcttacataacattattttgcactagggttaaacaataacaataatttatgattgttttgtttgttttagtgggaatttgtcttgtctgtgtcaagtaggaactagggttaaacgattggagtcttgttgtggcaatgatcggtattgaaacagaggatacggaaatcccttcgtcatcaggtgtgaagtcgcatatgcacgattgaggatgtgcctttgtgccagttatcacacttgtgcaaatcttccttgaagatgtcctttcatacaccaaattaggattatcatccaatgatgagctgtatttttctcaccaatcagtgcctttctcttgtaaccgttccctcctatttattctcacgttttcctcatttgtaatttgagccaattaatacagtcaataaaaggaataattttagtctcttgtctctccatttaacttggtatcagagctcgtgatttgtatccatggcttccccacaagaatctgatacaaactcctctgcaacaaacaagagtgttgctcaaccaatcacattcacatccaccattcctggagtcaacatccttcaccaccgatttcccttccattcctacatcaattgtagcctactctcttgcatcttctagtcaagcccctggcttctttctttcttccaatttggctcctctcacactaaaacttgatcgcacattttattccttttggaaattccaagtctgccctttgagctcatgaacttgatggatacattctcggaactaaaatatgcccacctcagtttgttaacaacacaacaagaggaatctcgccaagttaacattgggtaccccaagaccaaaccattgtaagttggctcatgaactccatatgtgaattcatgtttggtcacattgttcggtgccaaacatccatggaaccatgggacgctcttgaacttctttttgtcactagctccaaagccagtactctacaactttattttcaactccaatctatcaataaaggaaatctttcaatccacgactatatgctcaaaatgcgcaacttggcagataacctctttgctgctatccaacttatatctgatgaagatcttatactctatatccttggggtctcggtcatgactatgaagcaatggttatcaatcttagctctcgccatgaacaacttacttttcaggaagtccaatacatgcttcaaagccaagagatgcatttggatcaactcaatgctcctactgaccaaagactccctagtgccaatttcgcatctcaaccttgaggcctccaaatcttcctggctcctcatctcaaccttttgttggttgtggttttaacaatagaggttgtggttgtgggtgaggtggtcgaggaaatcaaacaatatgtcaactatgcactcatcctggccatgttgcttccaagttctatcaccgctttgatatttcctttcaagcacccgtgggctcaaactcttccccactaaactagcaaaacaacattggtcatttcttcaataactccaacaactcaggtaatcaccaagaagcttttctctcctcaactgatacctttgatgagaatgtgtgtgttaggtcttagggtataaataaagagggtaattgggtaattgtaatgggagggattgatgctatatatatgagtgagtaaggagggtaatagggtagagaattattttgctaaagtgag

SEQ ID NO: 163947 - DNA, 1178 bp, Cannabis sativa
ccgcccggagccaccacgtccaccgcgcccatatcctcgcccaccacggctcgaaccactccctcccgattccctaccaccagagcgataagagcggaaaccgtattgagccaactcggcattattaggcccgtaggagttcgcattgtcaacgaacgagctgccaccgttgttattaaagctcctcaggtgtggaggaatgtaacgaaccgaccgagtccccttctgtgttgactcagcaccagaccaagccatcatcgcaaaaatcgtacggacaaaatggagagcttcgatactgatgagagagagagaaagagagatgtacggagagattcaaaactgtattgggtttacataagatgtacgtattgagtagtgtaaagatcgcagagtgaaatggaaatggaaatgaaaagactgagctctctcacttaacagtactcactcacagttttctctctctaaaacaaaaagctgcaacaaaaatttatatacttatttttataataataataataataattaaaaacaacctagagaaggaaagtgtataatattctcccaatatgtatatttattattttaatcttatgtttaatatactggcttcttgagaaaggatatgaaagcttgacatgaatggtttttctttttctttttctttttctttattattattataatattcctacagagcaggagaattacgtgggagagtggggttccgccttatggttttccagggttcaatttgtggtggcgcgtggaggaacgattgaaaatattttggacccacgaggatactttttatgatatgtcgcgttattattggttcgtggtatgggagatgggaaggactgcgatgtagggagtaatgagaattctacatttggtgatctgaccgatcatttacgtggcttgatgagatttgttggaaacttggtaggactgtggagtgtggactgtaagagtgggtgccggtggcttttttatttattatctttttttttttggtagtgatattttgttatgggtgtggaagagtgtgatgtggagttctgagaagctcaacggccttgaggctaaaattggaatctggacaatacattgagaggaaattttatggaaaattttatttacactccaaaaactttcactctattttaataatttttatt

SEQ ID NO: 163948 - DNA, 847 bp, Cannabis sativa
  modified_base (786)..(814): a, c, t, g, unknown or other
taatttactttactttctctctctggtatccactttctattttccaagccagttaattctcttcccttttgttttcctctctatcctatcccatttttgtaacaataatatctcatatcttcaaatctcaacccacctctcgactctcctaactctccacatgttcactcatgatctgttgtaggtacctccatggctcactcatgatctctaaagatgtttctctctcaatcatcttaggtatgtgtatgttctcctcttaataattttctttctctttcatattcttattgtaagagatgaaaataatttggaaaataaataaataattttatgaaattaaaataagaaaaaaaaaagctgatgttgtaatatagcaaaacatataaagaaatacactatttcactaacaaaagaaagcaaagtaggaagctcaaaaatagaagagcagaactctgaataagagagatgtcagagcagagctcagaaaggaaaagaatgacccaattaaaaagcttagaagatgagaaaaagagatgcaatgtacagcagatgagatttagtgcacgtggacaaatcagaacataaaaagagaaggaaacatgcattccttcctgtctataaatagaagatccctcttttggcaatttgttgttgagccaatttttggcatcaacagctagtgccgtcatgtgtgggaaccttttgaatgaaaatctgaagctaaggatacgaactaaaatgagatcgaaaaagatattggagaatgttgggttttgtgccctnnnnnnnnnnnnnnnnnnnnnnnnnnnnnttactaattaataaagatcaaaaactgcatttt

SEQ ID NO: 163949 - DNA, 1807 bp, Cannabis sativa
agttttgagatataaacatgccttcaccaagctcagaccagaattcccgcccactgaagcccatcccaggaagctatggccttccgttcttcggtgctctaaaagaccgccacgactacttctattaccaaggtcaggacaagttcttcctcagccggatcaagaaatacggctcaaccgtcttccgcaccaacatgccgcctggtccatttatctcctccgatcccagggtggttgccgtccttgacggagtcagcttttctgtcctactagacaactcgaaagttgagaaacgtaacgtcctcgacggcacgttcatgccctccacctcctttacgggcggccaccgcgtgtgcgcctatcttgatccttcggagcccaaacacgcagccattaagagcttcatactctctgttctggcctccaaacacgacactttcattcctctcttccgtgcttgcttgtccgagctttttactaatattgaggacaacgtaagagataacaagactgccaacttcaatgccttaagcgatgacatgtcctttaacttcgtttttcgtctcttttgcgacggtaagccgacggaacatgggcttgggcccaaagcaaacactgatttcgacaagtggatcttttttcaactccatccgctgatatcgctagggctttccaagttccttaacgtgttcgaagatatgcttctgcacatgtttcctttaccttcgtttctcgttaaatccggatacgacaagctttacaacgccttttactcgtccgcaggtgtaatcctcgacgaagcggagcatcgtttcaagatcaaaagggatgaagcttgtcacaacttggttttcgtagctggtttcaacgcttacggtggcatgaaagctttgtttccaggtttgatcaaatgggtcgcatcaggaggagagagtttgcatcggcagctggctgatgagatcaggaccgttattaaagaagaaggcggggttaccatagcggctttgaataagatgagtttgactaagtctgtgatctacgaggcattgagaattgagcctcctgttccattccaatatggtaaggcgaaggaggatatggtggtcaatagtcatgacgtggcatttgagataaagaaaggagagatgatcttcggatatcagccgtttgccacaaaagatcccaggatttttactaaccccgaggaatttgtgagtgatagatttgttggagaagagggagagaagctattgcagtacgtttattggtcaaatgggcgcgagactcagaatccaacggtcgatgacaagcagtgtccaggaaaagatcttgtggtgttgctgtctagggtacttttggtggaactcttcctacgatacgatacgtttacgattgaggcttccaagttgtcgttaggtacatctgtgaaattcttgtctttcacaaaggccacaatgacagtttgacatggcccttttgttgtgaatgcttagttctttcatcaccacgaatgcactatttttatttttaagtttgtttcttttgaatgatgtgtcaccagtgccaaggccaattttatgttagttcttgaataagctattatctatttaccgtttcaataaaatgtttatttaataaatgtggcaaaatgtttttcacgttatcaagtgagagaatttatatatctaatatttatactagtaaaaagttacgtgcttcgtgttaagtattttttattttatttaaaagtgatataattaaaaattaaagaaaaaatataacgccctgtccaacagggacgccacgt

SEQ ID NO: 163950 - DNA, 1141 bp, Cannabis sativa
gagcaaaacccattgattgtaataaccaaaatatgcactaaaacatgcatgttttggttataaagtctaaaaagtagataaacattctcaccaattaaattctatatggactcaatattcaatatagacacttagaaaagtattaagtaccgcaagtacattttaatatttctcttaaataaaaaaaatggaaaaaaaaaaaatagaagcaagaccccttaacgaatcaagatctcctgttaaaaattggtatgtgatagtatgttaaattaatttaatatgacaagtcaattaatttagttaagcttaaattttttaataaataaaaaattaattaacatgtcaaacttatgagacactattttttaataggggatcttaattcccttttaacatgcatgagttagttaaatggaagacccttgaaaatcggataaagtctttctctaattaaaaaaaaaagtctttctctattataggtcaatgtctatatgttttttttattgaaataatgtttatatatatattattatgtttggattttgtttttatttagttacaaacaggccatgtcggctataacgtcccacgtcaagtattattttaaaaggttataaaaagaagtattttttcaaagcatgatgaacaatcccactcattacatattttaatattaattgacattttcatgatatatattaagatgctctgcaaataaaagagataatctttattattagtagtagtgaaagaaacgtgtctctcctgtctatatgtgtattttagttttaaaattaagaataggataaataaatgtttatatatagaaaaaacaaattaaaacactgccataaagtcaaaatagatgagccaaaatttagaatacaagttcatttttataaaaattaataaacaaattgcgtttcgggtgcgattataatttgtttaaaaaaaatttaagtcatgaaaagtatattaaattttaaatttaatttcttttctttttcttattttaaaaatgtgagattaatgtaaggttattttaagtattaattttagattaagtttagtatatttttaattgaattttaatcgtgtttggagtatttttacgctcgttatcttttatttttgcagattt

SEQ ID NO: 163951 - DNA, 1288 bp, Cannabis sativa
ctttccaaaactttgaatccccagtcctttcgtcaacgttggagtcacgattcatgagtaattggtaagccgattttactgagtaacaacccaatttctccttcaaccaataccaagaatcactagcatcattaatagtaattatttataggtaatacctatgaaaaaatgttctatatatatttatacttatactattttgttgtaaatcagttcataattatgaacaattcttcacatttaaaagaaaaaaggaaatctttttactaacataaatactataattttaaaaaacgaaggattatagccatcatacattccattataattatttttttaacctaatactatatactagaaagtaagagtgtacatcggtaaatttaacgtggttatagtatattttcactaatccaatataatctggggttataaatatataattgtaacccgttcaattaaaaattttaaaaaaattaacctacccaataattttgatggtttggtcgggttactccgtccaaactgatttttattttttttccctttagtattgttattagtttttggttttcaaataaattagattagataaaataaatgtataacatatatatatttttaacttaaaagtgttataatctaaattaatgttaaaacataaacataagaaatatactaattgactgggattaaacaaacattctttcaaaaataatatatgtatatatatatatacatatattaaaaaatttacaaactgcctaaactaaaatgagtaaactaacaagaaacacaatcaaaattattaactaactattaagtacaaactacacaaaatagtttaactattaaatgtaatttatgtaacatttataaataattttaataagaatatattaatcagtttatttaggttatattgtgcggattagaataatattcaacccactcaataattgggttgtttgtattttgttgggttagttggattatatttttttgttggtttattcaatttgatttaagcagtatatttgagttggatggtttgtaaatatttttaaacatggagagaagagagatattctcccatgttggatgttgataaaaaaaaatacgacatgatgacgtggataacattttgatgcgtggcacgaagaaacaatccaagccccctaagacttcaagcagcacagcgtcacctgcggacatggtgggctgggcaaaggcccaacgcccaggtggacatagggtgtaacgccctaatgctaaggcacgctacagt

SEQ ID NO: 163952 - DNA, 943 bp, Cannabis sativa
aaaataatttccaacagattattcctcagagaaaactcatttaaagaataagttagaatatttggataggatatatgtcactatacgaccagcatcaaccttatagccagcttgcttacaccggtcagggtaaatgcaactacaatatttttagagaaactttccataaataatcaagcattcaatcttgatcacaattatgattttgtcggatagattcacaccaacaagaaataagaggaaaccttcctagcttcccttttagttttatctattttaggaaagtatacaagcttagaattttatttcttatttgttttgggaaacctaatcgatgtaattcttccgtataaatagtggagtcatttcactattaaggaatctgaaatcaagtgttcaggagagctcttacactgtaaaagtataagctttcgataaagatcaagaatttcttgcttcttttctcacaagtaatacaagtaaaaggacagtagactactgccactatcatagggctaaacctctataaatctctgtgttcttattgcttaattttttctaattattgttcttcattctaatcgctttaattgagtcaatatcgttggctaaaagtaaggtcaacaatatattcatttcttaatttgattttattttttatgaaattagtccacgttttaccgcccggatcaccactacccacttgtgttgtttttgcactacttcaggttcgtaatgtttttttcatcttaattgtattataaactgaatagtttatgttgttagttagtatgtttatgcatgttatagaagagtttaaatatcttaaatattcattcgtagtgaactacattctatgattaaatatactgcgatcggatgggtaaattattattattgtgtatatacttgttgctccaaaattcgcccaaaatacgtggac

SEQ ID NO: 163953 - DNA, 1819 bp, Cannabis sativa
aattataacttgaaatattcatatgattcctatcgcgctctccgcactattagtcattattatttttttttaatggaaatagcactactaatcattattaactatatccaagggtcaatctcaatatatactaattttaaatttgactattatttgaaaaaaaaaaacaagttacaataaagataaaagcacaataatttttgaatagagagtcttaataaataaaataaaatagtataattggtcacatgtagtattagtatacggctggacgcaattataatttaattgaattttaaataaataaatcaaataatttaattagtcacaacacatgtaatgttgatcaccacacatatattaattcaaataggggtggttttttaaggcaaaatacaggtggttcaggttaataaattattatgttaatatttagtaaattaggtataggtattcatcaatcttgttctaggataaccattcttaattaataaaattagaaaattaattaatcagtgtttaaaaataacaaattagcccgtggaaggtggtgggccaataactcattttgtttttagtagcatgtgaaaaaaaaatcacattaattaattaatacacaaaagaagaagaattagaattaattaattagccaggatagggatgaagagcactagatttcccatattattttcagggatgatgatgaaagtggtattgttggtttatttaataataaatcccaatattgtaataacaatatcaacaagtactgatattaatggatcctcaacaacaacaacaacaacattaaatactaaaactgatccatcatcagtttctattaataataatactaaccataatacttctttgttttggtcggaattatcatcatcgtcgtcatcaggaggaggtgaagtagataaaaccagcttaggtagtctacttcatggtttaaaatgtacagattttgtgaaagatgatatggttaaacatgttattgagcatgtaaatgcagatgattcaataaagtgtacattgaaaacaagtgcagaatttggggcttgtgtagctaataagttttgtgattgtttggcattaccatatccacctctttttgttggttgtatgagtgtacttggtttaaagtgcaccaaagatgctctccatgtacatttctctccttgttgtaccaacggcaacgccaccgccaacgccactaccaacgccaccaccaacgccaccaccaacgccaacgccaccaccaccgatcacaatctcagtaagtataatattattattacttttctttttgtaattaaataatatatgtatgaaaattttattgtttcaaattttttattttcacatagttttaatcttaattagttttatgctatagattatatgatggtaattatttaaaatattttgtaaatttttaaaaaatttaaaataatttaacgtgcttaaaataatgttaaaaaatatgtttattttattttacacttatatgaaatagagtttttgaatattattatctacattgcaaattattttaggcagtttttcttaataaaagtattaacataaatataaacttttcaataaattagaagttgaggtttgctttgaccatttttttgttttgagatagtattgttgtcattgataaagagataaatgttaaaaagtagtattggtgtctagtatttttaggtctgggattattaatggtacaattaagtattgaattatatataatgtaatataataaattttaagaaataggtattgaattttatataatttaatgtaa

SEQ ID NO: 163954 - DNA, 1721 bp, Cannabis sativa
aggtgtatccattaatagaaagaacctagtgttgtatatcttatccaaatcctaactgaaagttagttattagttactaagcaaactaacaaaacaacctttggcattataacagttagaagtttccaatctcggatacaacttgaatctgagttaagtctattctcacttagccttagattttctttctgttattacagttagaagcttcctaactagctaactcaactaggatgccatctaggttaagtgtcaccccatatgttgtagagatttcttgatgaagagattattctctgtctataatatgttgttaataagtgagttaatattctcaattgtacagctcccttttctttcaataaagattcagatattcaattcattgtctcaaatacgattagtgtgtgaagaacttgaagattgtgctgtgttcatattgttcttgtgatcattggattgtgtcgattataacattagcaggttatatatgttaaaatctgctgtatatatattttgtgatgcccaagtccacaaatgagaagaaacaagaagatttcagaattagagaggaaatatgtatgtgatcagaaaaataaaataaaaaattggacttgcaggtttacatcgatctgcacgaaatgtatatttatttatatataacaattaatcgatgtatacatatatatgctgaatgacattaattaaggaggtattaattggcggagatgatctttctgatctaaacttcatcacctatatattatatacgtacattaggtagaattagaaaggtaatgatcatgaatcatgatgaaggggggaccatatgatcaagtaattatatatttgtcgaaatcataatataatcatcgagctgatcatcatattcatctctggtttggatgttaacacaggagcaccgctgtatagacgcgaagaaagccacagccacgccatgaaacacccaccccaccaacccctccaccagtttgcaaccactcgctgctatcggaacacccatcgccggcgggacagccctaatcggcactactgcgtcgcatgatcttttgcgacgacaggaggaatttgtgcacccacaaccactccacgtcgtaaggattgaatccatatcatgtgttctatgaagaaaatattattaggcataatctatagctgtaactttaaattataagtttatctcaaaaaaaaaaaaattataagaatataaataaaataaaataacatcaatgctgatatatttataagagtttctttttctttttctttttttaatggagtattttcgtaaatagtactcttcagatcagtgtttatgtggtatggaatatatttccttccacctttatattttattaggatttctttttcttctaggaattttggagagaagaattaagttgggaaaattacaaaatgaaaaatgagtaaaaatatgcgcatggatatatatacttgatagatattacttgccaaattgacaaagtgacgtatgttaattttattttagtttttaatttttttttaatattgtaattttaaaattaataatattcaatgtagtgataatcattgaaatttgaaaaatttaaataaaaaacaaaaaaatactattatacgttgtaatagtaattaaaaaaattattattcgtcaaatttatcttcacaaaatgctcatctggttaaactatcaaaatatt

SEQ ID NO: 163955 - DNA, 2389 bp, Cannabis sativa
  modified_base (2326)..(2358): a, c, t, g, unknown or other
tagttgcatatttaaagtttatttcatttaaataattttattttggaatgtctgaggaaccaataatcaacataaataacaactgattaagcaatttattaatgcgtagaaggttgattttgttggtcttctcgagactagagtaaaggctccaaaacttggagtcttgtacttgaatgtgtttcaaggttggtgtttttcttccaacatagcatggcatccgggtgggaaaattgtaatagcgtggaatcctctgcgattcatggttgatattattaaatgcactagccaactaatgcatttaaaaatgtcaactattgatggttttaacagtttcttaactgtgatttatgctgctaataatcaggcagaaaggagaactttatggaaggacttgagggagctgatatacttcagataactggttactcatgggagacttcaacgatatactggctaaagaagaaagaattgtcttaagagtcaaatcctatcctgattctgacttccttcagtgtgtcaactcttgtgagttagaggatgtcaagtctagtggcaatttttttacatggacgaataaacagcctggagaggatagaatctattccaagattgataggattcttgccaattaagcttggataaatagatttgagtatgcagaagctgtattccttaacgaaggtgtttttgatcattcacccggtattttaacgcttcatcttggtttggtgagtggaaagaagccattcaaatactttcgaatgtggaagtcacaccctaagtatgagttggctctgaaggatatatggaggacttcggtaagaggctcaaagatgtatcaagtggtgtccaaaatgaaacaatttaaagtgtagctaaaggagattaataaggagggcttctcagatcttcatagtgcaatgcaaaaggcaaaggttgacttggataaatggcagaatttactacagcagcagcctttgaatggggaaatacatagtaaagaaaaagaggccagggaagtgttaatcaaggtgcatacagattattcttcgtttctgcaacagaaggcaagaatggcgtggattgagaatggtgatagcaacacggctttgttccatgcttgtattaagcatagaataaggcaaaaccgcatcctctcaatagaagcacatgatggaaatcaggttattgaaccagagcttatcactgaagcattcctgaacttctacaaagacctgcttggaaccaaaatggaaaatagaaggatagtgaagatcagtgtgttatctaaaggagttggggtttctactgagcaatcgtaaatgctaactcggggattctctaaagatgaagtgaagacagcagcttttagtattccagtgggcaaatctccaagtcctgatggattctctagtagtttttttcaagataattgggagactattggagatgacatatgtgatgcagtaatttcttttttggaatcaggtaatatactcaaagaaatcaactcaactattattacccttgttccaaaaattaaatgtcctaacactgttaaggattttaggccaattgcttgttgcaatgttatttacaagattgcaacaaagctattgagtgctagaattcgagacattctccctgaaataatttctccttctcaaggaggatttattaaggggagatttatagggcataatatcatgatatgtcaggacttggtgagacattataatcggaaagctaataaaccaagttgtttgatcaagctagatctacaaaaggcatatgacactattgaatggggatttttggaagaaatgctagaaggtttaaactttccaaagaagttcattcagctaataatgaactgtatcacaactcctaggttctctcttatgttcaatggatccttgcatggattctttggagctagaagaggacttagccagggggatcccatgtctcctctactatttgtcttgggaatggaatacttgtctagactcatgaggaagataggagagaagaaggactttcggtttcatgacagatgctctcaactccaactaaatcatttggcttttgctgatgatgtgcttttgttttgtcatggagacacacagagtatcacttatatgcttaaggccctcaaattattctccctcacttcagtattacatccaaatgccagtaaaactgcaatttattgtagtaacatgcaagaaggaagtgtgaagaagttgattaaagcatcagggttctctagacaagtattaccatttacttatctggggatactgttggaattattttaccnnnnnnnnnnnnnnnnnnnnnnnnnnnnnnnnnaacaccctaaatatgaacttcctaaaacgat

SEQ ID NO: 163956 - DNA, 1425 bp, Cannabis sativa
caccacaaaagtcgtaatcatctttggcggtggtgatagtggagaatatgaaaatcgattgggtttttggtggaaattggcttcaattcacaaccccacttaatgtggggagaaaggaactttgatagtaataaataataatattgtcaaaaatcaagaatttattattttctttacattttttttattcacaatttttattaagccacatagaagtccctgtaatgcatatcgtggtccattgatttttaaataaattcaaaatcagttcacaatatttcgtttggatcttctacatgtgctcaggttcagccaaattgttcaagtaggtgagaataatgtcaatggaaaatgccaaatctaattaaaaaatattaatgtgtattatataaaaataaaaattagtatctacattaaataaataaatgaagagagtaggccggagttaaaatacataaaattcttccaaacaaaaagtatgatgcatcatctaaatatttaagaagaatacaaaattattgagtaatcaaaatataaatattttcgttcaagtttcaaccactactaaaggttaaaatattattaccaattcataatttcatttgtaggtcaacaatatatttttgtgttatcatttaggtcttggattactacaataattattaatttttacaattaggacagtatttaagtgaatctttacttgtgattgacaagtaaactctctttaattgagataaagaaatgtatctcagtatctcacgaagattttgaagtatatattatgtatgataaaaaaggacaattaaattactctttttctttttaaaatattaagagaaggcatttaaagttgaagaccgctagatatggaaatttaaattaattaatatgtattttggtataaaataagttttcttaccaaaaatagtcattagtaatataatttattaattatgaaattttattgaaataaactaggtatgtcatactttttatatttgaaatttaatattatcatattttatgtttgacaacattaaaaaaataaaaattcgacgaattagccaaaatatcacaataatatggattagtattttagaatatcgagatagtgggataacaccattttacccctaaatttagtggttacttagtggtgaagtaagggtattttaatcttttgctaattaaacattataattcgagtaaattgcagcataatctctaatagttgcagtttgagttataaaaactgcatatgctgtttggtttgaaaaaatagctacaacccgcaccactcgcactgcgaatacccctacttgattcctttctatggtagagcattatcaagatctgaacttggatcttctcatccttttatttggttggattcttcaaaatctttcacgctatgattgagta

SEQ ID NO: 163957 - DNA, 2988 bp, Cannabis sativa
taaaataatttccaacagataactctatctatttactctccagtagctaccttcacaactcttatggtttacgagccaagtacttctgtgcagtgctagtttttccaagtttagagctacacaaaccagatacagtgccactcccaaataaataaaccaaaaaatggaagctctagattctaacataacctaatcacggagtaaaagtagttcaaagggtccaaattggagtgattctacaaagaagggaaagacccaagagttaagatacactaagtacacaagtcttgtagatcctcaggagaacatgtataaggcgacttgtaacatggttcattataagaagcctctgtcaatgtacaagggtagaagacaaaaaagagatccaaataagaagtgtgaatatcatgacgatattggacacacaaaaaatgaatgtgactatctaaaggatgaaattgaaagactgatacgaaatggacatctatccaattgggtgaggattccagtcatttatcctagacagggggttacacatggacaacttttcattccgggaaaacatggagccataaatcctcctcaaggagtaggccatccgcaagctcctgaaatccaagctcctaatgcacaaaaccttcagggggtgcaaaatgcatcagcagcagcattagctgtaaccttcagtccaagatatccataccctcaaggagctactctgccagctttggatgggcatgtaccaaccttttctggtggaccacacattgccagaagcacccaaaatgcacagacaaagtacttgaatgaattgaaccaaaacgaagtttgcaacctggtacaattgcctgcctagcatccaaggatgatgaatttgccaatgaatttcatagaagacgataccaggcatgtacatttcctcacaacgaccctttggtgatagaggttcatatagcaaacaaaagagtttccacaattcttatagataatagaagctctctcgatatcattttcaaaggtgcattgaaagccatcgatcttgtggaagcaaacatgctgccttgtctaattcaactacaaggcttcaatggagataccctgattccaatggaaaaaatacaacttccaatgaaaataaatggagaattctctagaagcaatgaattatcctctttcaagtatagtacctttatcgtagttgattatccaatgaattataacgccattttgggacaaccatttttgatggattttgaagttggaacatcccttctccacttatcccttaagttaccaggtgacaccagaagcattgggacaatcagaggtgatcaaagaagcgcacgaagttgctatagtgtttaaacaaggactattctcatggtccaggaaggaaatgtagtagaactaagaacatctttccaaccagcactgagggtggtccaagaagatgagttagatccacaaaggcgtagaagaagtatgcatcgataacggagaccctaccaaagtcatcaaagtggggaagaacctactttcggcaatgaaagaaaagattgtctccgcagtcaaagcaaatagtgatgtattagcttggagacactctgatacatgattggaattagtcctcgtgtgatttgtcatgcactcaacatagatcccaaggtagatctagtccgacaaaagcacagaattctagatccagtgagatcagaagcagtacaaatagaagtagacaagctggaaaacatttacttcttcaaggaagctctatatcccatatggctagctaatccgatcttggtcccaaagcctaatgggacatggagaatatgtatagatttcccaaatcttataaaagcttgcccaaaagactgttttccactttcacgaattgatcagatggtcaacacaacttcacggtatgagcttttgactttcatggatgcatattctagctacaaccaaatcaaaatgcacgtggctaaccaggagcgtacaagctttcaaactgacaaacgaatctattgctacaaggttatgccctttggtttgaagaatgttagagccacctactagcaaatggttaataaaatgtttaagaatgtattggggaagaatatggaggttgatgtcgatgacattctggtaaaatcaaagacttccatgagtaatcacgaagatttagaagaagcctttaccatcatccgggagtacggaatgaaattgaaccctaagaaatgcacaattagagtttcttcaaggaaattcctgggtttcatagttagtttgcaaggcatcgaggaaaacccaaaaaagatcaaagctcttctagacatgccttcacccagaatacacaaggatgtttaaaagttaactggaagaattacagcacttaccagattcatttccaaatccacagataactgcatacctttcttcaatgtacttcgaggaaataataagtttgaatggacgattgagtatgaagaagccttccagcaacttaatgaagatctaacacaagctccaatattgtccaaactagttgatggagagtcgttgttcctatatctggcagtgtcagatcatgctataagttccgcattagtgcgataagaaggaaaggtacaacttcttgtgtaacgccctaatgttaaggcacactacagtgcttaaatcaattaaagtgctatctttgctaaccaaagaattttctcgaaaaatgtgtcaaattaaaacttttataataaatattaaactttataatttacatagtcatctacgaattccgggatcccgtttctaaacttttatacaaaacatgccaaaatacaatatccaggtcgcacaacgactacaaaatataaccccaaatgtctcgagactgaacactccaggtcacgctgtcacgacatgtacaatcccatctcagtcaggctcactcctgttcagctttcacctttcctttacctacacatggaagca

SEQ ID NO: 163958 - DNA, 2490 bp, Cannabis sativa
gatagttattctaataatatatatagtgatcaaatatgtacttactgtgggcaaagactattgttgataaggaaaataaaaagcttctactaatttgatgagatgggggtccccgaaaatcgtcattaattcggtgttcaagaatccaaaccacgaaacctatgaagatgaaaaagcaagcacttgtaacccaaagatctaatgttagaggtttcaagaaaacccatgcactttttcttcttctgtccctaattggcacgatgaaagagacaccagattctgtgtatggcaatgtgaagtctacgtacaaggacctgttagctctaatagttgtatcgccaaccacaacatcgaatctctgtaaaatattaaatttaacattatatattattttagatcctatgtttcataatagttactgattgtaccctaagctcaatttttatcaattttattaatctaactaatttctagcacgaacagatgcgaaagtgtaactattttaaacacctccaggtcaagttacaattaagttttagtatgacaaaaattgagctcaaggtactcttttgtaccatcttgaagaaacgaagagtcttttaataaaatagagagttcaatcaataaaatttgcataatacaatatcaaaatagtataggtatttaccaatttatgcttaagtcaaccatacacaaatatataaatatatataaatcactagctaatgtatcttaattaaagagtaattataagtaattaatggatacgtaccctgtaaaagacttgatctatcaacttatcgtaagtactagagctcttgccatcatggatttgaaatggaatgaaatcataatcaacactatagggcaatgctttcataactgcttcaaaaatatctatgcaaaagccagtgacaatggagttgttagtcaccgaatcatattttacaccaacaaactcttggaaaccttttttcacaggtacacctattctcaacttttttcgatttgtgggaacctcccaacccttgggaataatactagattttccaggccataccaccgattcaatgcctctattaacactttttttattcgtttccaaatttttcgttagtccaaattcatgtctccaaaatccaatccttttaacttcttctctattaacgatattggttatctcaaaagttgtattggcagtactagagtattgtaacttcccatttacaagtctgaagtcacctgttaaacccttgaatctcacttctaatagtgctttgtgaagttttggaccgatttcagagaccccaatttggaaactagaagtagtaacagttacattcttatttctcaataaggaaaaggtttccttctcattactattattataataagcattttcaacagcaatggctaacgcttgaacagaatcataagcccataatccataaacattaagttcagcaactaagtcattgtcataataaaaagcagtagtaatccttaatgactttttccatcgatctctaaagtctttaagtgtgtttgtctctggaacataagtctttataccaatcacaccttgcattgaatcaatcacatgagattttaacgaactaagatagttagtcatcacatttgtgacgatccaaacatagccttgtctcatcattccaatctccttggcctgagcaaagatcctagtgcctaaagaaatatcagtgtgaacaacgaagactctagtttgcatagtcattaacttgtaaagctctttgagaatctggtcattggaagccgaagaagaaatgacactcctataaggcatacgacaatgatctatatcttctaaggcatcgttgaggaaaggaataaagccttctccatatgcgttgtttatgtatatgggaaccacttgtttccatccataagcttcaacaatcgaacttatggctttggcttgagatatttgttggttttgggtaacttggaaaaaatatgagctccttacgccaagagaagagcatgttgctgacgagtatgatattattggaactttagccttttctccaaggtcaaccacaaagcttgcatgtgttgactttaccggtccaataatggcttttactcccatgtttttaatcagatctaaggctgtttaaaaaaattgattattagtactaaataaaagaaaaataaaattattaaatatttagttatgcttatatgcatattagagtgtccaatataagggttcctgctatatgctaagcatcatcaaatataaagataatttaagtaatgttctcacaagaatcttcacgacttacgactctacaacttaacttacaattatgaatgatagattgtttagttacctttacacttgaatgatacctaactcataacagtaatatcttcagtatgacccataatacacactatcactacttcagaaatctcttaaagaaaatgtagaagaatattttgaga

SEQ ID NO: 163959 - DNA, 827 bp, Cannabis sativa
acaaccatttaatttttgtggttgaacaggaacaattgcatttttgactttacttgtaatactaccaatcatattagtaggcttcaaaattggtagtttggctttctttgagctgctgcatttattccagtaggcttttgttttgtttggtttggtttgattaaaaagtttttcatttaaattagagtatattaattgtgatattaaattttattaattgtctcacaatatatattgaaatacaaataatatagatgagatacctggggccagataatcccagcaagtatagcagccacataggataggagaacaattccagaacaaaataatgtcaagtttctggaaccatatttacttgccaaggttgatatgccaaatctgaattgaaaaaaatatataaaaattatttcatcaataataattattaatttaaactaattataaggtttatataaaagaatttaacatacttagtgtcgccttcaacgtctgaagcatctttgattaaagccaaagctgaacccattgatttcataaatgctagcaggaaagtaaaagaaggcctgaaaatcaaattgaaattcaaacatataatacaatcaaatttaaaatacagggaaatcgtttatgttattggaaaagtttacaaagtttaagtacactccaatctctaaaatacgtgttttagtatttatcagaattttttagacatgtaaatttttaatttaaaaatttaaatagtttatagtgttgaaaataatatttaattaaatatattattacaaatttttattttttttatatatgttagactatatatatag

SEQ ID NO: 163960 - DNA, 1228 bp, Cannabis sativa
  modified_base (1175)..(1179): a, c, t, g, unknown or other
tttttttttttttgaaaaaaactcaataataaagtgatacgtataaatattaattaacatagatagctagtcccaactcaaatatctgatgcctctaattataaataacaaaagaaatctgtcttgtttgacagttttagatgaatttaatgaaaaataagtattttaaatgtatcatgtttatacatgtcatattaatatatattgttacttttcttccaaagtaataattatataatatatacataaataattcatatataaatcggcatccacttcaattgaggttggagtgatttggtactaatcggaatcatatacatatttaattcccgtaaagcttccaaaactttgattaattatgttggactcaaatatatatacgtctttatatattaattaattaacaactcgcgcttcgccgtggatgtttaaaaaaaatttaacattactaatttttatataatttttctttgaataatatgagaagttgagtgtacaaacgggtcagcttgacatataattaccaaaaaaaaaagaaattataatggaagctcgacatagttcatataacatttttttgtatatcttgattatttaaaattgttctcatcattatacatcacctgttgttattactgtatctcattaactcgttatcattttggcttactaaaaataaatcatgagttaatattaactttttatacaatttttctttgaataatatgctaagttaggtgtgaaaaaaaaaagtttaaaaaattgtttaaaaaagtttaaaagtagatattttttgtagtgtaaatatttgtgagtggctagtatattattagctaaaaagtaaaactaaaaatctcctattctattctattaagaaaggaagcaagagggaagaaaactaaaaaaaaaaagtaattaattttaaagcttgtgatgcatgcatgttgtttattatttataatgatgtgaaagtttagagaagttagagatataatatcttttaaaattattattggaaaaaaatgagaaataggtaattgatagttagagtttatccgaggagaaaaaatcaatttaattattttttgtttattttgttttatcttaattcttagagaaataaaaagagaaaattagtgcatgtttggcatcataactaaaaaattgttttnnnnntttaaaaacagaaaattatttttaaaaacaatttggtttgtttgacctt

SEQ ID NO: 163961 - DNA, 1249 bp, Cannabis sativa
atatatatatatttgtatataatcagctgaagattcaattttatatatggtagtaactttagtatgacagacagttaattactttgtaagaaaacaatgcattttgcattttgccccattatataatctaaaattgatcttttttactttttcatttttttattcactgatgataatggccaaaagaataataataaataataataataaagatatactgggcgcatcatcattggcgccccactcaggaaaaagcttggtttgtcattcaacatattttttgttgaccacaaaaatgatgatcgtacttagtttcggctttaacaaaccataattttacgagatacaaacgaattacgtattacttaagcaagtaaacataaaactactattttgttatatttatgaaagctataaataataagggacgaaattaaattatcatttcctacctaattaattatttctctttctcttcgataaatatatatattaactgacgtctccacatagtaaataacaattactaaatttattcaagtcataaattaaatttatttattatatatggatatatgatgtactacagtactagtgtactactccccttgtataaatataatatatatatatatatatagatggatacatgctcgcaactaactcttcaataactcaaaatttattggcgtacgttatttatattaatgcgtatgtatattttccgtcccctctatatatgatcttcagctattttgattgtttcttaagcagtcaatttgtaaattttaacagaacatacaattacagatgggtatgtatattatgcgtatgcatatataaatttatagcatggtcctgtaagtgatgacgggagagtgtggaccaaaacggtggaccagaccaagtgtgataagcaaaaataatgctgcctttcctgagaccacatgccttgctttgcttcttctatataaatatataattgtatttctacgtacatttacatacgtacataaaaatatatatattttctattgatgaggagacacatagcttagttaatccatctttcaatatcatacaaatcaaccaattcatcacccaatatattgctcatattgcctatgtatccgtatttgttaacaaggcatccaaaaggcgccaatatatttcctcgagaaaccagaaaagacctttatctttgattattattaaagtcttgttataaggtgttgagtttgttacaaaa

SEQ ID NO: 163962 - DNA, 1023 bp, Cannabis sativa
ctttcataaatctttcttgaatagagattttaaaatttatcaatcaaataagaaaataaatgatcatatgaaccaaataacacattaaacaagtaatgaaattaaatctatttgtttattgataattgaatagaaacgattacattgaaatacagttttatttagggcacaaagcccaacagtggattcatcaaaaataacatctttagagatgtataacctgccagatgaatcaaggcacttgtaacatttatggtttagactatatccaatgaaggtggaggggaagatctaaactcaagcttgtgcttgatgtatggtctaacgtttggaaaacatgtacaactaaataatttaagactggactaatttggtgtaatgttaaataagattttagtaggacatttgacggaaagaataggtgtggggagtctattgtgaaaatagacagttgtcctaaattcctcatcccaatattttaagggtaaattggcttgagcaagaagggttagacaattttccactatttggctatgtttactttcagcaaggctattttgttcatgagtttttggaaaaggttttctattgataatatcagcttcttctagtaagtttttaaaggacctatattcccctccctaatctgattgaaacactttgattttggtacctagttgtaactcaacctcagccttaaaaaatgtgaaatgtcttaatgccattaaatttatttttaagtcagtatagccatgtgaatctagagtaagcaccaataaagtggatgtaatatttgtaatctttgtgagatgtagtaaaggatggaccccataaatcagaatgaaaaaattgaagaggagcagtgtaacaagattcagatgccgttggaaatggaaatttatgaaactagatgttatacccgaaattcgaatggaggatacgtgtcaagataaagggaatgtgaatcggtgccatatctttttatggaataactcattgattgtgtaagtactagagtatatt

SEQ ID NO: 163963 - DNA, 3474 bp, Cannabis sativa
taaaataaatttccaacaagaactacccgaatttgagtaacaacaatggtaagaactacccgaatagaggtagctttaatgaccagactataagtctcaacaaaatcaacactaggaatttgatgaaaccccttagccacaagatgtgatttacctttgttaagagtactattaggagtcagtttgtgcttgaacacccacttattcctaatgaggttgggaaggaattaaaatccaagttttattgtgcaagagcgcattatgttcactatctatagcagcctttcatttgggcgaagcaagagcctctttaactgtcttgggttcacgagacaacaaagaatatgttaagggatgtttggtagccaagaacatttttggcttgaaaattccattcttggagcgggtgatgataggatgactagaagctcaatcttgtggaagcaacagaggagctgtagctgttaaaatctcatttgcagctttaacaagtgaaaagaaatgactaatgcaatgatacatgtgatataataggagatggttgtcaccttgagtagatgacagaggttgttgtactaattggtcacctactgtttgtgagataggactaataggtgtcataaaagacacatttagaggagtttgacttgtagttctctcatcatcaggtagcttagcaatagaagttgatgcagaattaatggtagtggccaacacaagaatcttgtaagatgtactagataaagaagggggaccactaaacaaagatgagcatgaaaatttattttcattgaagatgacatttccgaacatgtaaactttgccacaaggatgtaagcatttgtatcctttatgaccatgactatagccaataaacaaacatgtagaagtacgaaaaatgtggtttatgagtttgataaagctgtaaatgaggaaagcatgagcaaccaaaagttcttacaaatgagtattcatgtttcttaccaaatagtttaaacaatggagtagaatgttgtaacagtggagtgggaagacgattgattagatacacgacagtagagaatgcttcccaccaaaatgaaagaggcatatatgcttgtgctaacaaagtcattccaccttcccagtcagtttgaacccacttgattatactattaaattatttatcagaaaaaatctagaaatttttgaaaactaaaatagtttgaaatttttgagtcaatgaaaaatccatgtgtatcatgaaaagtcagatataaaatggatataacattcgtaaccaagagtagacacttagttggaccccaaatgtcagaatgaataagttctaatgaagtagtaaacacatgcttagaattagaaaatggaaaaatatgtgacttttgccacattgacgagcatcacaaaaactaatggttttattagtaacctttagatcagtacaagattgcaatatatgattcattacagaaggggaggagtgtcccacacgcctatgccattgatctaaggttgtagacacttgagtgacattacatgagggaatagcctttacagatgtcttacaactctcaaactcaaatgtaacagtaaaatcagtattagtgtgctttattcacatgaaaagtttggacactagaagaggactctgcatgaggattggtgaacttgtattgaccattgctaagcttccctctgagtagagctgttcctattaccttgtccttcacaagacaagaagaagagtaaaacttaacaaaaactttattatcaacggtgagtttggatatgcttacaagacttttaattacttgaggtactcaaaaaatgtttctcaattttagcatagtagtagataaacaagtaggacaattagtgtgaccaatgtgagaaatagacaaagctttaccattagcaacagtcatttcctctttatcttcatagtatgaattgatgggataattcttaagcttggcggtgacatgaagtagctccagtgttagcataccagctaggatcaaatgctccatctgaggtagccatataggctgcagctccactatcatccaagcgatacgagtagtaaatggcaatgtgacctattttggtacagatttgacatgctggattatttccacgccttgaaccatattttcttctgccaccacagccacacatattgccattaccacaacctcgacctgcattttctccatttttggaggtgtagtgagcttgaggagtagtaatttccatagtagaattgtgttgtgcaattgcatagacctcattcacaaacattttctcatttcgcttgcgtgcagtaatgctgcaaacaattggatcgtattcaggaccgacttcagcaagatcttgcatcaccagttcttcatcatcaagaagctgacctgctgctgcaagttgtctacaaaattttctaattgagcaaagtaatcagtcatagacatactacctttcttgagattttggatctaaattttcaactatgaatcttagctggagatcgaatagcaaacatattgtcaatcgtcgtccagagagatcgagttgtttcgcattgcacaacttgactcaagactagtggagacaacgaagacaagagccaactcaagagtaactggtcttctttgatccaagctttgttttccagattgggaccttcacttgcctttccagtatcatcaaagatgataatactttcaagtggacacgacttagtaccaaaccaataaccaacaacaccatgaccacacacggttgggatgacctgagacttccacatcaagaagttggtgcgatctagcttgattgatagagctatgttgagagtagtggagcagactgagccagagttcatcgatttttggaagagagtgagaccagaagaaccagcaccactggaattgtttgaagctgccattgaaggatccttagaatgctttaataccatgtaaaataaacgtgcatacttggttttgtgaaaacgctctctcaatcgtgatgagagctaaaacaataatcataaatataggcacaaacgagatacaagacacatcaacaatccaagtgaaaatattctaacaatctcctgaacttcggacttgctgagttgtaaataacaactttgacagctcaaaccaaactgtccaaacagactcgactaagcttgctttacatagacgaaggctataacatcttattatttgaatgttatttatatattaaaacttattaacatatacgggatggaggtgcttgaaggacccaatttatcaatcgaaaaacttttttctggtggtcacgaatgaccatatgtaatattattagttataatataatataggttaaaaatttaaaatatttaaatgtgacatattatatattaacatgagattaatatatattatgtgttggaggttgtattatatcatatatagtttaataatacacata

SEQ ID NO: 163964 - DNA, 2603 bp, Cannabis sativa
aacacactataaaatctacatgaaaatacacacattattatttattaatgtaaatatattaagttagttaaaaatctatcttgagttgtcccatccattaattaaatcccatgtcaaactatcaacccatcagtgtaagtgagttgggatagttgggatttggtttccaacaataatgtatctagattatagatgtatagcataaataaaagttttaattatataaaaatgtattcctaaattcaaatgtataacataaaaattctaataaatatataattaattacaagttcaagacacaaatacataaaaatatatataataataataataataatgaagtgattgatgggtaactaatagaccattggatagtggcgagcatatctacagaagtgaagtgttttagagggaacgcagcgaccatgagaaatgattttatagtcatatgaaactttagcttcatagtaacggtgccatgctcctaacacacccattgttacatagtaattactactacgaagttttagtattctattcactctcacaatcttctgaaactcaagcttctcaccctgcattccattccatattaatatcataaaaatatgcatgtatatacattaattattattcaaagaaagaaagaaacaaagggaccttgtcgttgtcagcgttatactgttcgattgcccatttagcaagctcttgggctctgggatcatctaccgaacatgatctaacaagatcaagcctgacttcttctagttccggataagaatctatataaaacccctaagataaagttcaaaaaaaaacacacacatgcacaattagttcttcatttgttagtgttatgaagttgacataaacttgtgtgttagttaacaaggtaaaaaagtaatcaaaacgagaggtaggctgccactgtatgaattgggcagtatatagaggagatgggattgaattggtggggtggaaattgtatgggattgagctttggcttttgggagagttgacctcagcctcacttaaatagcataggcaagaaaagcaaaacaaacaaacttaggacataagcctagtgcccctatttgttctctttgtcattttgctcacctattaataatccaatatctgctctgtctattattttcaaactactttctcttccctgtttggtctattttctagtatctttcagttctagtgcgttgggcatgcagcagcaaattcatatatactccatgaagcaagatcaccaccatcactaagctcaactccaaagaaaatgaggaatttgagagatgtctatgaaatattcaattttggtattgttgaaccataaattctctaagaatgttggaggaattaaagcaatgaatgaagacttgttgttgctaaaggctaattatgggtaggtgcaatgcaaacaaagaaagaaatcatattctcaacagccaggagttgactttcatgaaaagagtgatatggggcttcttaatcaatttcaatttatcagctgatttgaaccggttctttaatttgatagtgaaaactatgatttctggtgtgtgcttattgtgtgtgaagatgggacctttaatggtgtttatatattatagtagtgcatttcaatctaagatcaatattggacccatgccatgagttgtgggaaacaatctttaattgatcagtgtagtgaaacatcaagtaataaagtacagaagacaaatttagtaattaattagtagagaatggtaagtagaggaagaaattcaaaagaggcagaatgaatgaatatatataatgcagattagattactatatatttacctcataaaacttctcttggcggcagtatacctttagtagatctctaagatgagggggggtgtatccaaaactaatttcacatatttatacatacaagagatttgtcaaatattgtatattaatgtaataaacacacatacacatgatgtacaaaaaaataattaaagaaagaaacttacataatgatatatagtacatacccttggttaatgaatttgacttgtatgtttggtgtaggagtaggattaggagtaggatatctagcgtgcataataatcaccggacttagtgatctcttcttcttcttcttcttcttcttcttcttgtcctcctcgtcctttgttgttgttgttgtttcagtagaagacttgttagtagttgcagtagtggtagtttcattgttggtgatcatcaaatcatcatcatcatcagcatcatgatcgttatcattatcatgatgaggaggcttagtaatagtagtagttgagatactaatattcttgttcttcttgtctttcttcttagtcttagtcttagcagctaagtgtgattgtgaacaaactcgtaatgaaggaggcgtgggtagttcttgtgttgctccaactctacatctattcttaagctgagtcttaataatacttgttctactcatacttctattactattattactattattactattactagcagcagcagagagcgatgttgccaacaaacttctcaagaaaaaagtcatcttccagatattaactaatggacagtag

SEQ ID NO: 163965 - DNA, 3047 bp, Cannabis sativa
tggtaaaacatattccaacaatcagagcatttcccgccccttgtggcaaacatggtggctgtgggaaacaatgttgctgctgtgctggaaacaatgctactggtgtagggataaatggagctcaaactcttaataggcaacttgatgtaaacaatgcctttctcaatggagaattacaagaagaggtgtacatggtgcagtcacctgggtttgaaattcctggccaagctgatctcatttgcaaactcaacaatgccctttatggactcaaacaagctcctagagcttggtttaacaagctgcagcatagtcttgtatcccttggttttctctcctctaattcagatcactcactgttcatactacacactcatacatctactaatttggtactggtgtatgtcaatgatataattgttacacgaagtgatcccactgctgtcactaatctcattgtcactctcaattctcaattttctctcaaggatatgggtcccctgcattactttctcggaattgaggttcagtatattgatcagggtattcatctctgccaagcaaaacatgctcgatatttacttgtgaaagctcaaatcgctgatggaaagccttctccaacacctatgacaagtaccattcgtttatcagctcaccagggggaaccactggtagatgttcaacactatcgatcaatagtaggagcattgcaatatcttaatatcacaagacctaaactctcctttagtgtgaataagtttgctagtttatgcaaaggcctttaactacacattggatggctgttaaacgaattatcaagtatattagtggcaacatgaactttggtcttaacttaaaaagacctagctcatatgatttggttgcattttgtgatgctgattgggcgttagatcctaatgatagacgctccaccactggtttcgcaattgtctttggctcgaacttgatcacctggaagagtaaaaagcaaccaacagtctctcgttcaagtacagaagcagagtattgaagtatggccaatgttactgctcaattgtcatggttgcaccacttattttctgaacttagaattcagcagcctcaacctcccacgatttagtgtgacaacttaagtacagtgttattaattcaaaatccagttcttcatgctaggactaagcacattgaacttgacctatactttgtttgagagaaggttctaatcaacaagatggtaccaatcaaacatgttcctgcctatgatcaattggttgatggtttgactaaagcaatttcgactcaaaggtgctctgtgttcagaaacaaactcaacattgaagatgctttacttctaagtttgaggggaggtgttagagctgattgacagctcagagttgttactgatctattatgttggttacacaactaactgttagtggttgttattttgttattgttgctgatgtcattggttgttagatgattcttgtgttgctgtacttgtataaatactcttccattgatcaatgaataactgagatattctttcatcttctacatttggctctctttctttctcttcttcttttctctgtttttcttatgtttaacaatggctaggagatttaacacttatagtcagtgcttgtccaaaaaaaatttctacctcattagcttccattttcatctgttctaataattcagtctcttctttgtgtagtgttagagtaatttctagtctagtgcttagcattctcctaaccgttttggttagttttagttagctaggggtggaaagcttgactggcagtaaagtctgttataaaaatttataacatatccactaatgcctataaataagcatcaaatacattgtattctcaaattgtaactattacatacatttgaataaaacagaggaattattcattcattctagaccgtgtgtttgttcaacttctgatttattagttcttgagttttggtatgtcaagtgcattgtgcttttggctaaaaatagtgaatgtgatcaagaattaattctcaacaaggggtatgaaagttggtgaggatgattcagagaagacaatcttagatcttggatcaagattagggtgaaaatctgtcaccatgggtattgctaagtttgatctggagaatttaaactaggaagaatgatttcggattgaggagggtgaagatgagagacctgcttgtgcagaaagggattcaatctgctttgtgaggggaagataagcttctcgcaagcttgacatagaaagaaaagacagaggtattggacaaagctcacagtgccatcattttaagccttatttacaaggtttagagagaagttttgaaagagaagacaactgcagccctctggtcaaagctcaaaagtttgtatttaacaaagtccatagccaatcgattacacttgaagctaaaactgtactcattcaagatgggatcgggaaagagcattgaagaccacttgtgtaacgccctaataattaggcacgctacgacaaccaataataaaaccctaatcctgataaatcgagattactataaaggtaagagagaaaaatttaaactttatttacagtggaatgaaaatataacttgtaataattttaaactttacacacaaaataaaatgataatatgtcttgggattccacaaaactttccacaaaatattacaagttaatttcacgtgctgacctaagtagcaaaatccgaaggtacaaaatacaatcactggtaccccaacccgcgtggtctagtgtggcctgaacatgtacaagcaccgccaagctctcgaactcatggttgattacacacagatttaccctttcctgcacaatagagcacccgtgagccaagcccaacaagacactataaataaaaatatacacaataaaatatatcacatagatatttatgccattacacttattgtctatttgtcatcgacctgcgtgttacgctcacacgcctaattatgtctatgtggcatagacccacgtgttacgctcacaagtcta

SEQ ID NO: 163966 - DNA, 1785 bp, Cannabis sativa
ttttttaagttagtcaggtttgtcttagtttatagtgtttagttccaagatttaggagttgtgtatattattgtgtagattttgttctaatctggatggttcgaaattttgttctcaatctttttccattttgaaacgcaagggtcaggccaaagaaacattgataactttctgatttatgttcaataaaagaatttctgtttcttacatgtgaatcccatttgtatggtattccttcgtaaatatattttttattttcgtactgtgttttagtttgggataattctatatctttgtgttgatgaactatttggtgacattgagaaacttggcttcaaataaaatataaattatggtgtttctaggcaatttgaattgtaattattttaactactcatagggacaatgagttacctggaacaattttgtgttgtcgattgattggagagataatttatagctgtttcaagttttatatccaatttaaaaggagaagcaaaataggcagtgcttcattaaataggttaccaattaatagcctgaagaagatttgaaccaaaatggacaatgcttggtaccaagtattaacgtgttcaaaaagttgtgaagaattatgatttattcaattgttttagctaacctaaaatgagtatatgatttctaattttgaaaaattgcataagcgtacagtgatatttttgatgtatctttgttttgtattgttgagttattagcttttatatatcagattttggagtggcttgaatctctcacattgttgaatagaattgtgagttttcgacctgcaactcttttaaattgatcagttattttatatcagttccaggcagacctaattttatataacctaaggtgtttataaaaattgtgtacttttaactaattttagcataattcttaaactgagaataatgggcaacctaaactttcctttatctgtactcaatcaaacgaagtaaacacctaaatgtttataaggatagcaaattgaaaataaatgtacatagatacatacttattgaacaagcactctgccacatgtctaattcaaccttctttaaactaaaatttgttgtgttatgtattcttctgaatttatgctcaatatttgtgtggtgaacgagtgataatttagaatctaaaagatagtgtcatttcaagaacatttttgaactgaggcaaaaaatattttgacacactgaaagtgacacaaaatggttttttttcttgtagtgactatgtgtatgatctttcttgttcttaaaaatataaaatttgtatgatttcgattatgatcatacataattatgtacaccaactgttagattaaatgcttcattgattgtatgatgattttgggtgggttttatgacttttatggtcacttatattcttggtttttggatttatcattattggttctttgaattgagtattttctcattttccatgtttccatgttttcacttttatagtctgcattcatattcttttgagtttattggattagggccttagcgttactgggctgtcctttttttttggtggtatagttctagatatactgcgtaatataagcacaaacgaaaccccatatggtgattatgatgttatgtattatcattcaatctacgttggatacaactacgttttattttctgcccagtttgaaggtcctaatgagttttatttattggctaattagaattttacctcctaaagtttaacatgtaccaaatcatacccctgaacttttttggccgt

SEQ ID NO: 163967 - DNA, 820 bp, Cannabis sativa
caaaaaaaaaaaaaaaacagcgcacgaaataaaaagcaataattgaagtatttagacaacaagcgccattaacgaagatattccatttgagaagcttgatgaacgttgtccatcttgagccaaaactccattctaaacgtaaaccagagacagagaggggaagaaggtgatatattattagtcttgttaaaataataaaattaataattattagcataggtttagtcgttatggttccataaaagtcagcaagtgacagaggagactgactactgggtggactttgagacggctacaatgaaaggaacttgctcggaacccaactctattcatgcgcaaatttgtagcgtttttgccaccaaaaacttgtctgttgactaagtcaaattaaattgagagttctagtaaggacgactcttgtttagccattaatattgttggacgactttaatccttgaggggataatcattgcaaaaaaaaaagttcttgaggataatattgtccacaatgtgccgtatgtagagatataatggaaggctacctagtgttaacaaaagggctcatttagaggaattttcctccaaaagcatataagacacgtgtcaacaataagaaacgttgagtaggatgcttctcatctttgaactccatgtcataaagtccaggttaagtcaaaaccaccccgcgttgacgtagtccgtaagttaatgaactgggctcggcccgtcatagtttatacagcccaaaagtattaaaaaaaaaaaaaattatattgtatactcattttattttagggaaatttataaaaatactaaaatt

SEQ ID NO: 163968 - DNA, 3707 bp, Cannabis sativa
  modified_base (3177)..(3181): a, c, t, g, unknown or other
  modified_base (3242)..(3254): a, c, t, g, unknown or other
cccagcaccccttatacgtggctccccgggctgtcccagccatacctcgtgctgtgccagaagcaaaaccaaataggctagcctctgaaacagatgagccagctgcggtggttgtggtatgagttccatggccttcgtcatctcttggtgatcttgattctgttttgttgtcaaccggtccaaatgctctttcgtacccttccgcgaaaaatctcgcaccaataagttttcggttacaacttgaagaattgaagttgttgcccacttggcactcccctttccatctagttgggggcttcccaagcccggtgtcatcgaagcttttgctttcaggccacacacctgtgtccaaaactcctatcaccacctcgctaactttgtctgaggttggaaagatagattcgctgtttccaagcccaagaaactcaggtgttcgagtcgtatgaagctcatactggatttcaggtaggatagagagaacccctggtttcttttcaagctgatgggcttcttcttccgtcagccttgtggaaaagccgttaattactttgtcataggtgtaaaacatttgagccgaatgagaaaccgattttaaagatgactcgtaccatttgagatggtcatcagaacttgcaggcttatgagacttatccatatgaacaatgtaagtcttcttcacttgtttgtgttgtgtatcggctgctgctacacataaacggaaggcagtgctcagaagcacggctatttgcaaaaggtgaattagtaactccatactattatgaggttttctcatttttcagtttctgttcttctctcggcaaaattttactttttctttatggttttttctcaggagtcaggaatacagtttctttggttctcaattggcttggcatggaaaaataactttgaatcttcctagctatataggtctcgactccactcaaatgctgataagatgtgttatggtggggcaattaaatcaataatacgacgctatttatattatcattattattacgattcctaatttattagacccaattatatgattacatataatttactttccatattctctttctggtatagggtgtgaaagggatgtggatcactttcagaggtagcaagttagaagaagcataactaagtggggtcaagtagagttcttacttcgctacaaaaattatgactcacggtctgtcaagtttaattattctaccttaactataatgttgatccacgtcagaactcaaacactcatctacaaattaaaaggtcagaacccttaaagttcttattttatgttccctttagatgtaattctcgatttcccatttcataaaaaattcacctctgcatttgcattgccatgattggataagtcattggagttttgtatagcaacccacttttattattatgttcttatctttagatcttctgttacatacttatataatgacaacatccacaatgttattggttaatgattcacccccgcacattttggtggtccattatcgaagaatcgattttagatatgtcactattggacctaaatgggtgggcacaattttgccgactgcattagttgttgattttagtatctttatcatctataataataatttgtctgccacttccaaatccagtgccaaattatttaagtacaatgtcatataagctaaattatctttgttaatgtgcgattgttcgactaagattcgtatcagttattggcgtgattcacttttatcaatttaatcaaaatgtgtaaagaaagattctgcaaaaagaacagatgtgtaaagaaagagggcaataccatgcgtttgacaatgtacaattgaagtatactaagtgaagtaacaataaatgtgcaagcaaaacacaaacgaatcaatttatgaccgctaaataatagagtagaaggaaaaatatgttttggagtctccgtatgcttttattttttgtcgttcatgacgtaaatgctgaagattaataaatattttttttgtttagcctatgttttgacatttagtacctgtcttttatttaaatacaaattaggtatcttatgtttttaataatgcttaagtggtaatttgtattttaaaatcatacctatttagtattttaaattcaattttttttgataaatttttatcaatacagttaaactgtcaaaaaattttataatttctaaattcaaatttaattattttattacatataactgagatctggttaaattaataaaattttattgattaaattttattttagagtgccaaatatgtataattttaaaatatgaggtaccaattaagtattattgaaaacacaaggtactaaatatgtttttcatgaaaacacaaagtactaaatgagtatattcccgtttgattttggtgagaaaagaaaaagtaagaaaaaatgtataaaaaaatgaaaaataataaataataaatttttttaatgttgttgctcacactttagttaaatgctagaaaacaacttgcgcttcgcgtagaggtgtttaaaatatttattttcaatagtttggatttttatctcaatcgtttattaattttattttatatttattgttattattaataaataaaatattgtaaaaataaaaatgataaaataaaaatctgaatttgaaattttaaaatatctaatttagtgataatatttaaaattaggtacaaatctatccttagaatatgtattacaaaatataatagatcaataatttaaatttaagcctagattaggtatttataaactatttagaaatttttaattaatattttattatgaaatttaaattatatatcatacatatttttaaggaatatttattcaatttaattactatatttaaagtcgttgttattactatttctcatttatattttatatatagtctctactacatttaagttaatttaattaggatttttttcccccaaactttgacatgtaccaaatcatgccctctgaacttttaaagtcgttaaaaatttcccctaaactattgagattgttgaatttaagcattttcgtcaaattttagtaaaaaaaagtctaacatagataaaagttcagggggcatgatttattacatgtcaaagttcgagaagcatgatttggtagatatcaaannnnngggagcatgatttagtatataaataatcactgaaatagtagaattgaatgaaattagacannnnnnnnnnnnnctaataatctcaataattcagaggaagtttttaacggccagaaaaatttaggggcataatttggtacatgcatgttaaagttcgggagaaaaaaaaaatcataattaacctttaagttattgtcataatcttatctcatttataatagtcactacatttaaaattgttatcaattcataatgtattgtaatagtgtcattatttacaataattatatctcattttacatttgaaactaatatatctccataatgcattgcaattgcatagttattatttacaataataatatttataattaattaattaatattattattaaatttagatattttgttaattaattgttgttattaatataaaactgtgctatataatttatgtaaagtaagtcaacataataaaaaaaatattaaaaatagaaaaatgagttaaaagttaaaaaaaaaaaaa

SEQ ID NO: 163969 - DNA, 789 bp, Cannabis sativa
tttgggtctcttccaagttccatgtgtatacataatattctagtgaggtaatgatgttgtaataagaatactgtctttgatttttctttacttacactcaatgatcaaatcttgaataaaaacgaagcaaaaacaaataaggcacaacaaaaaggggttttatattttttgcatatagttgttgcacattcactttctcataagttggtcattcaatttattttctctctaagtttcctcctaaccaaaccatcgaatattgatgagaaagagttacaccttcattttctctctttccaaacatatatataaactatatatctcctctatattctcatcaattatctctaaaaaacacaccttcttaataatatggatcatcatcccaaacaccaatattcttattattttcatgtgtttgtagccatagctatagctttggctgttttagtttgttgtgaagaagaatctgtaaagccattggttaagacagtaaagggtaagaaagtatgtacaaaagggtgggaatgtaaggtttggtcagagtattgttgtaaccaaacaatctcagattatttccaatcttaccaatttgagaacctgttttcaaaacgtaactcccctgtagcccatgctgtgggattttgggattaccattctttcattactgcctcagctgattaccaacatcttggctttggtacaactggaaccaaacacactgccatgaaggaagttgctgcttttcttggccatgttggtagcaaaacctcttgtaagtactctcat

SEQ ID NO: 163970 - DNA, 1984 bp, Cannabis sativa
  modified_base (1931)..(1957): a, c, t, g, unknown or other
gctatatagatataaaatcaaactcatgagtcatgatcgagtttattgttcacgcgagtaaaacttattatacacctaatttgacttttttacgttgtgtggaccactttgttcttattataatttatatattcaaggaaacctactaattaaggtcaaaaccccttcttgactgatttggacttgtgatatatagtacatacaccatttggattttgttttgtaatatgtacaattattgttatttgaaatgtgtatactgtaataataaggttgtgtgaatataggtaacgaattaactgtgtatgatacatgttgagtgagactacaattgttttctccatctctggttttttattttggaagcagttcaaagctggtattttcttttcatattttttcacttggtcctttcaaatgtattagctatgctaattatttatttactaaatagcttaacggaaactttattgactgtaatcttataataaattatgttattaacattttttcatttatgattttatctattttttttttttttgtaggtagtaaactgttggtacgagaaatcaatactctaattattgccaaaaaagcgtattaacaagaccatgattcccaaattacttatgttgagcgagtgaagaaaaaacttgctcgaaaggactagctagaagaaacgagaacttcagagacaaagaagggaccccgaggcccacaggctggggcctccctcgttcccgggctccttaccccatgcaaggagcccctcatgttgcaccatggtcctcagtgaggggggactcccctcgtgtcgcaccacggcccccagtgatgagggggcctcccctcgcgtcgcaccacgacccccagcgagaggacctctcctcacaacttgaccctcagcgagggggtctccctcatgtgacgtacaaccccaacaaggaggcctcctccttccccgccatgaccccctacgaggggtgccttcctcgcacgtcaaggctccaacaaggaacttccccatcttgcatgacatgacctcactcacacgagagatcctatcacacgaagatcttcgttgaacaaaggcacttttcaatacgtaagaacaagagagggtcaataaagaagagtgtcatctcttcctattagctactcatcaagggacataggattaggtatccatacactcttatgcatagcgaactttaggatgcagtgtatgaaggtacaacacaaaacatgtctcatactaggtacgtgtcaaggaccaactcaaagagcctccacgccactacaagacctgggcaagtagttggtgtacaaagtgtagtgaagaccaaatctataggtgtcaatacgaactgactcccgaccaccactatctctactacccacctgtagtgtgattccttgggtacaagtcaaggtttattttatgcttttgggatcccatgcatactagggtaaatagtgccactacaaataggactctcctccatgagaaagggagttggaaaattattctttgttaccaatattaagaagcaatacaatagtagaacttcatcatcttttattattatagtttatcattcaaaccttaatttctaagttgattttctgtccataacttagttgacgagtacttactgtcaaccatatttggtccttttgttggaaagacaaagctacaattttatttttctcttgaaatacttctagaaaattggactttagaggcattttctcgggacatacaacattttggcaaaatttgagattgacactgttccaggggtcgctaagggaggtgaataaaccaaaagcatagaccctccctatgttgtcgattattataaaatatttgacgtcattgttgggaattattttatcaggattcagatttactaccatgtatgttnnnnnnnnnnnnnnnnnnnnnnnnnnnaaacaatggaatttaaacacatataaa

SEQ ID NO: 163971 - DNA, 2151 bp, Cannabis sativa
atatatatatatatattactgtattctgatgttttatggtgttgatatagatatggtagtatcagtttgtgtctgtattatattctactagaaagataaaacagagcctgtcttcaaggccgttttatctaataaatatagtaatgaaattttcctttttaacccatgaaatgagtatctgagtcactcaatcaccttaaagcaaaaagaagatattcattgagagaattaagattattacatgcaaatacaaaatttgttatacaacaccacaagtcttttattgtacacaacacaacacaattataataaaattttggagcttaaaaagggtttggtgagacccaaataggagtaggccaataatcagtacaatgggagttccatttcctttcaatggttccatcagataaacaaaaaatgccagaatcaaattccccaaatacactctcgtagttgagctcagagtaatcgtcagtaaaatatatgcaatttccaacacatcctgggaaatcagaagccgataaagacaaagacgaatttttcccaataaacaacatttgatctcccaagtcgttaactttatcccacttgggttcatcttcatcactccaatccaatctgaaaacgttgaatccaaccgttcgataaagctcctcagaattatcgtaatcaatctccaagtaccgagaaaccaaaaccaaatcatcctttgaactcaccaaatactgcatatcggcacccacttgtgtcggcgtttcgatgatgatcgaaacgctgggtgatgttgacccaccgacatcgcataccgcaacgacgccgtatttgttcacagcgtaaaaggaggagttatagtgtatgacatcctcactgtaagaagatgcaccttcgatgaaagtccatgtttggtcaccggatttacagaatgccaaatcccctgtttcgtgaagtatggctaaagcgacgaaaccgttggattcttttgggctggatgagaggaccactttcttgacgaaagagtcacggatttgtctcagattttgggtgtatgactcgccggagggggatcggagggcgtattctcggccaatttccgagtaagagaaacggaggacgttggggaaggtggagattggagggaggtggaatttggatctggtcagagggttgaggaggagaagtgagggggtttcgtcgaggattacgagccagccatgagaagagccgcaacaacgcttgccgtgagataaagcttcaggaaggttgatgagatatactttgttgcttgagaggttgaagaaggcggcggagtggggtcggcggtggcgggatttgggtagcatcagccatggaagttgtggaggtaggttgtttggggtactggggacggaggatcgccagctccggcagacaactcggaatcggaggtaatcggcataggttgtgaggttattggagatcgattctacaagttctggaggaagttgagtccagtccacggccatttttgtgggtatgaacaatattctcctctgttttctatattttccggcatagttattacaaaataaattagaagaagagaaaaggaaaagagagaagaaatatgaattgaatgctgaccaataaggtagagctaattctgaattttgtggatatgagatagtttgataacaattttttttaggattttttttttcagttttaacccaaaaaaaaaaaataataataatattataaaaatattttcagttggttaaataaatatatatacaatctaaataaaaaaaaattatgcaaataacatttacacacctttaactcaggatccatactttttggacaaccatcacgtaataacccaactcaatcgaaacgaaaaattcaaccaaaaagagaaccactattaattctggcaacttcacctgagaagacgatcagaatcaatcaaaacatgggctgtttcgaattcatgaaaaaaaaaagtgtagaaaaacaactacgaaactaaaattcaatcgaaaatctagtttaatttgtataaaactaatgtcttagattttaattttcatatccataaaatgcagatctaaaaaagttgaactggagttcccaaacaatccaactcaagtataatcaaaaaaaaaaaaa

SEQ ID NO: 163972 - DNA, 541 bp, Cannabis sativa
tctctctctctctctcgaccttgttttgtcttagttttaggagattcattttgagatctttaactctattaaattacaaccagtactcaattaattagccatatataatactttatgatcgattatgtaatgaaagaattttgttaaggataggctgagctgataataatatgctcatgaatgtttctttcttcgaaaaattaccaagatatgctctgaaactttgctttaccaatcaagtaattgcttcacattatagcacgattccgcataaatcttaaaaaataatcagttcatataaaaaagtttagatgattaaaaaagagatagctaagagttagttaagctaagctcgcgcggttagttagtgagtcgtgagttgtttacatctgtttttttaactgttaaattaatctgtactccaagatttacgaagctggcttatttcctattacttgtactattattgattcccttaatctataaatcaaaattaattgacaatgagagaattatctcatatatcttatatatagtatta

SEQ ID NO: 163973 - DNA, 718 bp, Cannabis sativa
cttcaaatctagtgaaaagtagattgttcattcaattcctttgggataatatccacattgcagcaaaaatgctggcaaaatttttattcctctgtccggtacctttatggctttgaatgatgtttttatcttcctttcgattggcctttgtcataatcaatctaaccatttggaatggatactccatgagagatttaattttggatgtaagattcaatggagacctctccaagcaattataggataagactctctttcatctctgatatcttcttttagtatgggtaattaattatttggtctttttttttctttctctttttagaacttattatggctgacgaagatcaccatgaggaagatacagtagacgaggcagaaattgatgttgaaggttgtagctccaaagattgtactaaaatagcatcatctttagcgggttaggaatgaggtcttttagagcaaaatttaaaagatttaaggtaaatctacagaagatataaaatatcattaaatgtagaatttattgatttggctaaagagtgttagcgctattgacacaaaatagtttaagaatttataattgtatagttacttgtttggattgtatagtgttgtaattccagcggaaataacattgaggattcaatcataaaatctgcaataaacttacaactttgacagcaataatgaacataaaccaattaatcaacacaat

SEQ ID NO: 163974 - DNA, 2151 bp, Cannabis sativa
agtgaaaaaggacaggggatccttgaaaatgcagggagcaaaggaaggcagaaaaggattaatttcaattcaagctgagatatatgaattcacacctgcctttcacttggttgaggtaagcaagtccagtggtgatacattggaatacaaaagaattatgaaaagggatataagaccagctttaaatgacattgtttgggcatggcaaggtgaacaaaacaagcaagaataataaaaacaccaccatcaacaatttctgcacaattacattctattttagtgtgctcgttttcttaatgtatacatatacatatgtagtacttatgttgtattatttgaggttttcctaataacaattgtgatgagattatttgggcacaataaagcaataaatgttggatgtttcattcctagattgagttttctttaatagagttttttcatttttgatttttcaagtttttatttgcttaaatatagactgaattattaagctctctcgtcgtaatttaataactaccgcaagtattatttttgttcttcttcttagtccatacccttggaacgactccatccgtacaatttattttcttaaaaaaattaacatacaaaaatagtgttccctttgcagtaattctccacagaagtgtaaatcaaattggatggtgattgatcattttctgaaaatgaaatatagttgagcaataaacatttgtttattagtaactaggaaattaaactcttatccaatttttgtaatttttttatttatatgtatttttttatttattcagtgacataattttaaatgtaatattttgatgcatctattacaaacaaagtaataatattgaaattagacacataatttttttatttttaagatatatagaaaaatgaggattttgtgacaaatattaaaaactcgagaactaaaaaggtaattgcatgtgtttttctaataaaataaataaaaaataacacttatgaatttagtcaattgggctgatgatgtagttttcacattttattttgtagtatcagtggaatgttatgttcctaaagatgaatttggccagacaactaatttattttgtgggactatttctaaaacatataatggaaattgaatgaaaagaattgtaaaaataaaatgaacattatataaaatgccacttaatttattttgcgtgttcctttatataaatatatagatttagattattttttttagtattttacacacttttcttaatgctaagattttgacaaaacgataaatgaaaaattataactatttaagcatgattaaattgaatactaaaaatattttattcaaccaccacacatgaaagttaaaaaaactaatttttttttccaaataaaagtaaagattaatgaactttatttaacacttaaaatggttcctaaataatgtgagtaaaaatagaatgaaattatataaaatgccacttaacttattttgtgtttttctttatataaatatataaataataaaaatattttattcaaccaccatatgtgaagattaaaaaaattaattttattacaaataaaagtgaagattaatgagctttatttatattatatagtataacacttgaaatagttcttaaataatgtcggactattttaaaatatatacgttttgcacaaaatgaaaaagtcttacaaaaaagtaaaaatagaatgaaaattatataaaatgccatctaatttattttgtggttttctttatataaatatattgattatcactaataacaaagccaaattatcaagattttatttattttttaatctaaatccaatttgaaaatctaaatattagggtcaaacattcgaagccacattcgaattagtgaagccaccattcaatgtgcagcaactctccacatgattcactccacagcatatatctttgagaaacatttgatcaaaacaaatggtgaaagtgactaagtgtccattaacatctctaatggagtgctaaaaaaagatgtattattatactttagcacatttataaaaaaattactattcaaatcgtgttattaaaagtgtaccaaatttggtacatgttcaaatttatactaaatttggcacaagatataaaattgtgtaaaattt

SEQ ID NO: 163975 - DNA, 1340 bp, Cannabis sativa
gatagatgcagagaccactggttgtcctcctatcatcaggatctgaggcccaatctgcattacaaaatcccactaaatcaaaagtacttgatttcttaatgtgtaatccataatccatggtccctgttaggtaattaagaatccttttgactacattctagtgtgactgcagtggattgtgcctgaattgacatacattgttgacactataagcaatttcatgtctagtgacaataaggtattgtagtcctccaacaatagatatgtagaattgaggactttctataggatcactgccttgcacagataatctaagaccagaagtcatgggggttgagtttggctttacatattgcatttttgctctaaacaacatatcttttagatacttggtttgagatagatttagtacccttgttttgtgtgaagcacttcaatcccaagaaagtaccttatttccctaaggtctttaagagcaaaaatgttgtgaagatcagaaatcaagacaaaaacaagaaatgaattgctccctattatgagaatatatcatccacatagataaggatgagcattgtttggccaagatgatgcttcacaaagagagattgatcaacttttgatgactggaaaccaaaggagattagaatagaggccagtttgtcaaaccatgctcttagaacctgcttgagaccatagatggccttgtgaagcttgcacactgcttggggttgaatgggatcctcaaaaccaggaggttgttgcatgtatactttctcagtgagatatccattgcggaatgcattgttgacatccaattgatgaattttccatgagttgtagatagccaaagtgaggacgattcaaattgtacaaggcttgacaactggactgaatgtttttgaaaaatcaaagcctggttgttgtagctatcctttggccacaagtctggcgttgagcttgttaacagatccatctggattctctttgattttttacacccatttacaacctattggagttctgccttcaggtaaagaaacaatcgtataggtcttgtttctttttaaagcacacatttcctcattcatggcagagtttcatttggcatcaagcaaggcttctgagactttggtaggcagaagagtagtaaagaaagctttaggctttttgataccattattggctcttgtgatcataggatgttgattaataggagcaggggcttgtgcaacaggggagattgcaatagctggagctggcatgtgtggtcagcagcatcattacatgttgcagatgcagtagcctatttagaaacgggagaggtacctgcattcaaaaaa

SEQ ID NO: 163976 - DNA, 2463 bp, Cannabis sativa
taaagctgagaaatttagtagcactaacacaaaggggttattaaagatatatggtcaatctcaatcccatatgaagtgtttgtagaaactggcataacaaagtgccaccattacagtcctattctacagagatattgtcttaaaatgacaagaacatgtaataaatacaatgacacacaagaaaaaggggacatgaaaacaataatcactatcatacataagacccaactcagtcaccaaacagttcaatactcaatgcaaagacactaaatttgttctaaagtgctaagacaaacataattctatctttgatttgaccatggtcttttagcaaataccctcgtgagatatatatgatgatttctcaatgaaagaaaaacactatagcatagacaaaatatacatgtttaaccagcatatctcacaaagctctctacagtgttagttggtttcaaaaccacacctactgttcgattgaaatgctccaatgagaaaaacgcaactagaagctaaaaagaaagagagaagatgagaaattaccttggttccaggggcgtactgatggatctcttcttcaggaatgaggacaggccaagactcccctgcctcgcggaacatctgttcagtctctaggtgctgacccttttcaagaatcatgttcctaatattctgggcaggcgtggaagtggcatcaaatacctcctccacaccattgacaaaggttacagcgatcttcggtggctcatcgtcagtacggcgcttgacaagaacctgacaagcagggttagattccttggccttgcgggcattgcactgagcaagaaactccaagcaggaggctgtgcgagggtccaaagcattgaattcaattctcactttcgatagaaactttagcatttggatgtggcagtgtcacaagatagcacaaaataacgaaaattgtaaatcctaacaaaggtagtgtcaacaaattccaaaaaagaagttattgaccaaaactcatcaattttaagcataataataactaaaacagagaccagtattataatggacaaatacaaacctcaactaatatgaataaaaaaatcttaggcaatactaaagcaaaacaaagcagattgtcttttctagcatttattagatagagatcaaatccctctacattatatatttcttacctatacaatagtcaataaatgcataacaaaaatttgttgtggcatagcagaatatttattaaaactctgttatttctgacagaaaacctgtcacaatactaacaacaatgctgaagagatgcaaatgaataaaccatattttttcacagtttctctaaacagtttattagtcgtagctttcaatgaagtattgtctattttgggtcaaaacttctctaaacaggtcaatatttggtaactacttaatgaagcagtgcccattttgcttctcctattaaaatccccaataaaattctaaacaactacaaattatctctccaatcaatagcaacacaacattattccagttaacttatttctcactgtgagtacttaaaattattccagttcaaattgcctaaaaacaccataaattggattttatttggagataattttcttaatgtaatcaaacacttcctcaacagccaacaccaattccattcccagatataaaattatcttaaacttaaaaccatttccccacaatattagccatgtagaaagatataccatagaaatgtgatttgaataaaagaaacaggatttcgtaatcccatttaaccaaaatcacaaaattataataaaagtttctttggtgatggcgcttaggtgacatggaagtgtaagagatgcacaatttctaaatcttagaagtaaagattttaaacagttataaatgtaagagctgaaaatacgaattaccttgggggcgcagagaggagacgatagagagatgcttatgccgacaagagagacccagagtcagagagaggttgcgttgctgtatgagaaagaaagaaatgagcttttaatctgttttttttttttttttttgggataatttcaaaaaataaaaaattataaaaataccaaatttttaatatttttataattttttagattttaataataaactatttaaaatctacctcgagaattcaaatattgtatgtcataaagagattcgtccttttcactttaattatttgaacaaatattttcggctaccccactcatttcataaaggattctacctggtttaatgacatctatccgatattcgagagattcttttcccgaacccatacgtgtttttgtaggtcttattgtaactaatttgtctaaaaatatacgtatccatatttttctaccgcagcgggcgttttgtgtcattgctcgtctttctacttctatttgtctagatgtgatccaagtgggttcaagtgcttgaagagcatatcta

SEQ ID NO: 163977 - DNA, 4767 bp, Cannabis sativa
tctctctctctctctctcatgaagtattcttttcttactgacttaaataatgatacagattgttagaagataaggattagagtttgtaagatgtgattaagctaagtcaagtgggcacatgagatctgcttctgctgtggtcttgccccaacatacacaatggcttcgcgagcaatcttgctaaggaagcgctactaccctttcaattccttgaatcagcttacattcttgattcgaggttcctctagtgttgagcgcgaagaattatcccattctaatgactttcgattgttttcgagtcaagtgttggtaactactgatcatagagatgatgaggttgaaacttcatttcttaagaatgtaccttctactcttagagaagttggatttttcaggcataacttctttttgagcaatggaattggaagggaacactttggttcctcaatgggagttatgcagactttgcagtctatacgatattattccacagggatggctggtcaaccagaattcgagaatggtaggcatggaaatgaacagcaggtttctggacagaaaaaggaagcttcaccggaggagtgtgatgaagctgttgaaggtttgagcacggtgaaagccaaagccaaggctaagcagatacaggactctccaaagagtgataaaactgttatgatgagaatgtggactgtgcttttggggattggaccagctctgaaagctgtggcttccatgagcaggtttatgacttttcgatttttgtaaggttgtgcttggtttagtttgatgcatctagtaattatctcattttttagggaggattgggcgaagaaattaattcattggaaggatgaatttaagtcaactatgcaacactattggttaggtacaaaactcctctgggctgatgttagaattagctcaaggctgttgttgaagcttgctagtggaaagagcctttctcgaagggagaggcaacaactcacacgtaccactgctgacattttcagactagttccttttgctgttttcattatagttccattcatggaattcttgctgccagtattccttaaattgttccctaacatgttaccatcaaccttcaaggacaagatgaaagaacaggtaaacattctcaacaaaatcttttcggtttatcattgctgcactgcatccctttgtgatatctgtttttgctttccaagttttatttgtctaagaaggtttgtgtcaaaattcaaaatgtaggaggaattgaaaagaaagctaaatgcaagaatagaatatgcaaagtttcttcaagacacagtaaaagaaatggcaaaggaaataaaaacctcgcgaagtggagaagttaagcagacagcagaagatcttgatgaatttatgaacaaggtagggatttaactcttgatcttttatctctcctttataagaaaagaaagcttttatgctgtttttggctttactgttttgcatttggttgtattgtaccatccaacaggttagaacaggcgagcgtgttgctaatgacgagattttaggctttgccaagttgttcaatgatgaactcacattagacaacattagcaggttgaattatttttaataagattaacttatttgggaatttgtttgctcatttataggtcaagattatcttatgtgatgttattgatttgataatttacaatttggatgctttatacagacctcgtttagtaaatatgtgcaaatatatgggtattagcccctttggaaccgatgcatacttgcgttatatgcttcgaaaaagactacagcagtaagataattttatcattatccattcataggtatatgtttagtttctaaatttttatgtaatgcatatattcatcataattggacaggatcaaggaagatgataagatgattcaagctgagggggtcgagtccctttcagaaagagaacttattttagcctgtagagaacgaggcatacttggaacacgttcggtagaggaaatgagagaagaggtttgagcttaactaatttcacctcatttgttactgtcagtgatgtcaacaagccattttaagctttgactcgctgcaatctcttctaaacagtcacagttatatcgtcagcttgaagtacactatagtgaacaaaatacatcgtaacatattatatatgccgatagcctgatatggatctattttagtatttgaaactcttcttcattttccatttccctcttttctgataggaattccctatcaatttaattttagtaactggtatattgattaatagaacgtaagagtacaaggttgctgagaggctcagttctctccgaagtgttgttgctcacttaactaattcattgtctgtcccaaaacccttcactactcactcatatgtatagcataaacttctccttttacaattaccctccttatttatcctaaggcctatcattttcatctaagattgaacaggtttttgcataaaatcagaagaaaataataatagtaaaagcttgttcatcaggcatgtaactttctgtctttgcagttgcacgactggttggatttgtctctgaattactcggtaccatcttccctcttgatactttcaaggtacttacaaagcatgtttgttttaaactatttcaaggcgaaactgtgtgcaactttttctccttttggctggtaaactatgcagagctttctcggtgcatggtaaagtcaagccagaggaagctgttcaagctacgctctcctctcttcctgatgaggttgtggatacggttggggtgactactttgccttctgaagactctgtttcagaaaggagaagaaagttggagtacttagaaatgcaggaagaattgatcaaggttggttgattcattatgctataacttttgatatttgttgctctataactgtgttatgctacagttgcgtttacttcggttagtgggtctaatttgattgtttgtgaaggaggaggaagagaaagaggaagaagaacaagccaaactaaaggaatccgctagtaaacaaacagatgtggctctagaagagatgactattccaacagctagagaagcacaggaacaagcaaaagcaaaagctttagagaaacaagggcaactttgtgagctcagtcgtgcattggctgttttggcttcggcatctgtaagaactataagtaattttacttgttgtgagttgaccaagtgattttcttttgttaagtaacaaaattcacattgactttaaaattttctttgtctaccactctcagtcagtcaggctggagcgcgaaaagtttttgaaacttgtgaaaaaggaggtatgcctaataattgatttgtgagaaaaatctgctctttggaaaattcatcaaaatgacattgttatatttgtatggcaattttccaggttgatctttataatcatatggtagagaaggaaggaactgatggggaagaagaagcaaagaaggcatacaaagcagccaggaaggacagtaatcttgctgccgagacggctctcggtgacaaggcttcttcagcacttatagacagggtaaatagaactatccaaaacaatcttaagctttcttttaacataaattacaactaaactcgtcagctatatggtgttgtgctatgagtaattagcttatgttcatatgaacaaacaggttgatgctatgcttcaaaagcttgaaaaggaaattgatgatgttgatgcgaaaatcggggatcgctggcagttgcttgacaggtttctcttgttgcattttcttgatgccaaaataataatgatgaaagagtttcttatctacttttttgtttgtgcagagattatgatggaaaagtaactcctgaggaggttgcttctgctgctatgtaccttaaagacactttgggcaaagagggcatacaagaacttattagcaacctatccaaggatcaaggttagtatataaatctgaatagaaacatctaacagatgcaagagtcgagagtcgagcttcgttttctctttttaatcgttatacattgttcgaacagagggaaaaatactagtcgaagacattatcagattaggcggtttaacggaagacactgacacaattgaggaaaagaaagcataggagatgagatgaaatcaaatctcaattgtggctctgctgctgatcatgtcttgcattttactatatgcttatatgatgaagcattgattagtttcttgaaggaagcatttttcacagaccaataatgggaaggagattcattggtaaaacatcttgatcttgcgaacataccatgtaatctagatgtagtgtaatgtcaaatgtgttatcattctaatttaatatttgaagtgatactttacaatggattatcaagacaaacgaaacaagattcaccaaagaacttgagtgagtaataatgcacgagtatagaagaattagaaaacgattattgttaatcatgataataaagaatagttacttattatgatcaaatattaatagtacattttggtggattgaataaataattttttgttaattgagaattattattaaagtttagggaaaaaaatgaatccgaattccaaattcaataatgttttttaattacaatttcacacacgtgcgtttgaaaataactgtgtaattactaggtagggtaattacgcaatgtagtaattacactatattttaaaatgcaaggtatgtttggatatgaggtggta

SEQ ID NO: 163978 - DNA, 2371 bp, Cannabis sativa
tacattaattgacgtgaatgaacgaagaaaatatgtagaaataaaatacaactttggatttaacaaagagacattaattcacacaatttttccaataaagaggaaaactatacatatgttcttttgcattttctttttatttcaaataacttttggctcctacttcttctagaaacaaagttatattgctgtgtgaagacccgccttcttcaacagttcttttagccatttctccaaactttttagctcttttccttctctctatactttcttctccttggttatccaacactttctctatagcaatctgaattgtctcactcttcaccattacttgatcctcttctcccggttctatatactttgaccccactgttacggctgttttcaaaacttgtgcaaccaatttctcattcagaaattggtctgtaaatagtggccatgtaaccatgggaatcccggagcttatcgcttcgagagttgaattccatccacaatgagttaagaatgctccaattgaagggtgtgacaagattaacacttgtggagcccaaccccggatcaccataccccttcttttaatcctttcttcgaattcatattccttaaaccatttctctagctcttcatatctattacttccagagtcccttacaacccaaatgaatggtttgtttgaggcttccaaacctaaagcaagctctatcgactgtggaagtgttagagtaaatatgcttccaaaacaaacatataagacagaagatggtttccatgaatcaagccatttaaggcactcatgttcatcaatagaagactttttacctctttcagcattatctaactcatttttgttgcataaggaagccggaccaacacaccaaagcttaccattcttcatcttcttgtactctttgacatatgatggctccaattcttcaaaactatttatgatcactccataggaccccatctcagcctccttcatttgctcctgaaattctttcatttctgaggttcttggctctggtagctgagctttcatcacatcaattctatctggaaggccagggataccaatatactctgtttcgggaacacataacaagtgggaacataactggaaaaagttacatcttgcatggaaaactatccttggaatattaagctttcgagctatgttaatagtccaaggcatgtaagggtccgatattacacatgtcggtggcggcgtaagctccgggatcatagtctcgactggcttttgtagcaaagaagttgaaccgaagaatttttcacccaaatcgggagaaggcaaggcgtccaagctctcacacccttgaggtaatcctgcttcaacatatggaaaattgagttgaattagattgatgctaaggccgacttgcttggcccggttgagcactccttggactcgagttgcattttgtgtggtggtgaatatggtgatgattacaccacgttgagccaacattcttgatatgtcaaccattgggatcaagtgtccttgtgccaagaaaggaaacaagataaagtgatgaagctcttttgcttgaatacccatggtgtaattctagagatcgaagaaatattaaaaaccgaaaggtaaagcttcttttatttttggatgatataagtatactcttagtatgtttaaaagaaaagaagtcaaagctagattgaactgctgtggtgtgagtacatatacatgggtttatattacttttataatttggaaaacttcatagaatatgaaatgtggtccatagtagcatagtgtaagaatgaattatttaaacacaaatacggttgtttgggttcttggattgttttgagtaattaaatgttcacgtggggtgtggtcgagctatcagctgtgacgtaagggcatacataagaaaattactatcatatatattggtaattttaatgtagtacccttagtttctacatcgagttagttttcttttgtcaataagattaaactggaaatttataattttacgtatattatactacttaattaaattatacgtttttcatctttttctctttcaaaaaaaaaaaaaaaaaaattaaattatacgtgcataaaaaattatttacaatttatcatatattttatttagactaattaaggtttttacctttcgaattttgacatttgttaaattatgcttctaaaacttttaaggttgttgaaaatgctccatgaaggttgttggatttaagaacttttttcaaatcttactacaaaatatctaacaatcactgaaatagtaaaattgaatgaaattaaacaaaaatcctaaaatctaacaatctcaatagttcaggtgtaatgaccgctctagta

SEQ ID NO: 163979 - DNA, 2176 bp, Cannabis sativa
aattaaagtaaaataggttaggaattgaaaagatttttcctataaaaatcgaggagaacttttccttttattttctttctaatttctgtgagcctcactactttatttcttttcaaaattttataaacaatattaatactatattattcattcttattcttcttaagtaaacataccataaaatttataaacatgaataaatagctcataaaattataattaaaattgttttggtatggtgtattcattatatgagaatgataatctccaatagtatgagttttttatgttttctgaaaaattatatgagattactctattggaagataatctttttataaaaaaatttcaaaaaaaaaatggttctaaacaatctcatcaatcataatataaaatgtattaatcccacattctacatattagtaattgagatacatgtgcaaacttaagaggaatctaactaaatactctcatctacaaagcaaacacaatttacaaattttaatattttcaaacaataatattctatcttaatattttagttaatcataccaatcactacataatgccatgttattggatattgaatcattgatgagggcatttgtcacttaatatatatgtaacaatgcagatatatgaataatatatataaaataaatgaagccaaattgaatataaatattaagtactatgagtaataaaaaaaaataataagaaagaagaagataaatgaaatggaaatatagaatatctcaaattgattcataaatactaatttctattcctcgagtgtagtgaaagtgatactaaattactaattactaaaacatagtagagaattttgcacctgaaacaacataagttgagttatatatatatgtgtataatatgtttaaagaaaagtgtagtattcttttgtccaaccaaaccaaaccaaaccaactgttaaaacacattacagcactcactaaaatgatttacagatttagattaaagacgtacgtacgtgtcagtcaccagctcaaaggatcactaacatagtcttttttaagtggttaataagtgaacacatgtggattctattctatcatccaaacaaataactataaacaaaaattcaaaaacttgaacttgtgaatgtgatgaaaatttatttagatgatgccacttgagacccaactaagattttcttaaactttcattgattttaagtttgtagatttgggatcacaattctacctaaaatcatattacatgtggataccctactatatagataagatattattactttcaataaattaggatttaagttaaaaattgtattttaaaaaatattgctattagtaaggccggtcttaaaatttagcagtatataagaaaaaaaatcaagcctttgtttacataaaaatataatatttttcaaaattagtaaaaaaaaattaaacttctaagttaggtaaaccctaggcacaaagcccacttataggttgagcctgttattaattaggattcaatgacatttaatatttttatgaggtaatgtttcgtgaatagttaacagttgtaataagtaggattctacactaatagaaacataaagtattaggtacttgtttagcaattttattattactttactcatttaaatttttaaaatatatagttaataatagtactatttttttaaattaaatataaatatatttaaaacttaattaaaaatatacaaatttaaactaaaagataagtacaaataattttcttactttgtgtattatctatttaaattttgataattaaaaatacagagtttcttatttttttacttttttgtatttttataaaaatttacatagcaactaacgaaagaatttaaattgtaactaaaatttacatagcaacccacatagaaattagcgattaacaacccaaaccataaatttgaaaaaaaaaacaaattaaaaaatagtatatgaaataattctccttttaaaagtaatagtaaataaattaggtcacatactcaaacgaagggctttctcacacatgtttaccaattttgattccaaaatatctcaacacaagtttattaaatagtaattagaatcaaataaaattaatagagaaatgtatcaaaataaatgaaaaaaagtaatatttataatatatt

SEQ ID NO: 163980 - DNA, 2042 bp, Cannabis sativa
  modified_base (1766)..(1769): a, c, t, g, unknown or other
gcccacactagccccttgaaactcaaccaacgcctccctcgcaagctttacaaccccacacaaccgtgattgttttttcccgaacaagaccgaattccgatcataccacacccaccaccacaccattgagaccaactcaaactcatccttgctaatcacatcaaataaataaacaagcaactcagccaaagaacccgcccgaccccgatacaaataatgccaaacccgaagcttagtccacagaggaagcaaagacgagcaaaacactaacgcatgctccggagtctccgattcctccccacacctacgacaaactggttgaacaagaaccttgcgtctaattagctgggaattagtaggaagagcctgatgatacattcgccaaaggaagatcttgactttctgagggaccttcaaattccacattcaattccaccaaagagattgggtacaagaagaggagcctaacctttcacccacaacatcaagagccaccgcatacccactcttcacagtataagaaccatttgaactataatgccagcaccaacgatccgcacaatcactactccccagtggaataccaaggatggcatctacatccatctgtaagaaattttgagaaaaagcatggagatttcaaatcccacccccaccaatcaactcatgaaccatcacactgcccgcaggagctaccgtaataggacgaaatgtcctcggccgaggaatccaaggatcacgaaacgcatcaatagtctgaccatccccaaccactttccgcatccccatcctcaacaattctaacctcatatcaaacttgaccacaaatgagaggaaccctggcgatccttagcctccaaaattgacgattcagggaaatacttatgctttaaaattgactattattattcatgtgtttaaacaaaaatgcagacgatacacttcctagcttatacacttttaataaagatcaagaaatatgtcaggtgattaaaatgaagtatgccattgtaaaatggattgttatgtgaaaaaaaaaatgtgctaacaactataaatttataaggttaattagtaatttttttttccaaactttgacatgtattaaatcatgccccctgaattttttggctgttaaaaattctccctgaactattaagattgttaaatttaaggacttttgtttaattttagtaaaaaaattctaacattgatgaaagtttagagaggatgatttagtacatatcaaagtttgaagagcataatttggtagatatcaaagtctggggagcatattttagtacataaacaatcactcaaactcaacttttatatctctcattgaaaatggtctaacaaatgcataagccaccgaattaactgaccgcttgataaaattaataaaaacattcttcctaccggcaagtaaattttacatgcatgaattataagaccaaagaaatcatgttcactaaagaacaaaataggttttaataaaatagaaatcaaaataaattttggcaattttctctaaatttaaaccaaaatggtaaaaatgtaaaagaaataaaagtaatttgcagtataaatatctaagtttaactctcgcttaaaaataaatacttatatttaatttttcatagtaataatagttaagttataattttgaaacttatgtggataccgtgtaagtatcaagtaaattgacaagtgacaatctttaattagtgaagtcattaaattttaattttttatttaaaaattannnnaaatataccaataaaaaataatattaatagcttaatatctacgaaaattagtgtaaaaaattaaatttaactacagtagaacctctatctatcatggggttcgtcatttattgacggatttttgggaccccaaaagattgaaatgactattcaaaatttaagaatacacttaggactaagcaaattatattctaattgagaggttataactagataaagttacactagaaaaaaaatttaaaatatctaaaatgtaacaacaataataataaa

SEQ ID NO: 163981 - DNA, 820 bp, Cannabis sativa
atattaataatatcccaagattataaacccttataacaattaaaaaaagaaagaaggtattccttaatattatcattactttgttaacattaattctttctaaaaagtttttaaaattttaagagcaatacttaaaaatattttaatttttaatatttaaatggatattaaatatatttttaatttttatttaattttatatatttaaattaattaaataaataaaaaaaaattaatttaaacattctataccatgtgatcacttacctagcactaatcaatcatgtacttttcaaagttctagaactttagtaccataaagtattttcactgtcaaaacatttaattaagtatttaaaataacataaataaattattaatcccacatactaatccaccaaaacaaacaattttgaccagccataaacactttttctatatcaatgtgattaacttttttaatggagacgacggatttccactactttcaagtacatcaacgagtgcctttactttattaaaaaagaaagaaagaaagaaagaaagacaaggaaaaacgagtgacttttactattttgctccttttttttcctttttgatgattagcttaagaatagtacatatttagggtttcttttcggaagtgaagtgtagttaactatactggcttcctaatgtaagagatttatatatcaatggatgtgaaaaaccgtgttttcgtaaatgttaattatatataagaaaatataaaacagaatgcgtttgcagaagcagaaagtaattctgatacagcaaaacagaacaggcagaatataaaata

SEQ ID NO: 163982 - DNA, 1618 bp, Cannabis sativa
  modified_base (1544)..(1550): a, c, t, g, unknown or other
  modified_base (1576)..(1580): a, c, t, g, unknown or other
gtattgtgttcgcaacataatagctactacatagtagccttatggtttggagctaatatatttatatataaggaggtaacatggataatttagatgatataagttcagtgttctctttgtttgattttaaatcctgtatttatttatataaaatatattagtcttaacctaactattgtaaatctgaaatgaacaaagaatatataaataaaagtttttttggatggacaaaagtggaagttgaatcatgtagaattttatttggtttttttgtttattaaatcatataatatttaaaatcatatgaactattttaatgaggagtaatctagtcatactagaaatttaagtctattaaattcaaagtgatggtatcaaatgtgtaggaataataaataaagggtaccaaatgatcattattagaaaaacataaggtactaagtttatatttaaaaaaaatacagggtaccaaatagttaattacggcttaacaaattgattttagaagaggtagaagtttactttttgtaaaaaaaaaatgagattttattgtaaatattataatcaaataatttgaatattaaaaaaaaaattataatagggatttaaatgtaaaaataaaaccatttataaatactaattacaaaaaaatattattaaatatagtaattttaatttttttaagtatatagttaatcataattaatttttttaagtatatttatttattagtaaactattattaaaagtaagagaaaatataatcatatattaaaaatgtaacaattgaatagtatccataaatatttgttctaaatgtacatagaaaagaactgaacgaattccacttaaaatattctttttctgtacagtagttaaattaatgatctttaaggaaaaataaaattagataacgatgttatgactggtaagaattaatagaagaaaaggcatgtctccacgtgaataataatatgaaatgtcatactgatggctccattgctcactccactgtaattttgaaattttgtaagtttaagaaaataattgactaattggtaatgagtagagtagcctatgttcttatatatgactcaatattcttacatttgatccatgtgagacaatattgtccaatattaacttagggatgataattgaaaatctgtccccaatcccatagccaagatcataatttactcaacccaataactcatttccatggagattgtaggaaaggaatctccccactcgtgtctaataatgcatcaaacttttgtgttcactcacactaatttcatgctcattgttgtcgaacaacatcgcctacatcatggattgatacaatcatattttcaagctccgcatgaaaaaagcttcatttactcaaagtctagtagtctcgccttcattgttgtcaacagtgtgtttatatatatcttaatacaaattttagttacttaacaaaaaaaaaaaataatataaattttagtttagttgaaagggtaaataccattttggaccctctgttttacaaaagctannnnnnngaccctgtgttttgttaaatgacaannnnnaccctgtattttctaaaatagtataaataggaccctaa

SEQ ID NO: 163983 - DNA, 1103 bp, Cannabis sativa
ttttttttttttttttaatgcatgcatgggagcgaccgcaaggacaaattgttagccttttgaaaactgagttcgtataaaaataaaaatcttaaaagacattaaagaaaaaatataaacccttatttttttatggctatgtatagtaacccatcaattcctatagggtggaccttgataaagacattgctagaaaaaaataattaatatattgtcactatacttaattaatatatattttgtaatattagtcgaccttcatattcagtctgtccaactcatgacttagaagacttagaaaaatctaaaggtgacatttactaattatatatttatttatttatgtattaatttaaatacttgaccaagactctactcttgtgttgttcttgttactaaacaaaccaaaggaaactagtaagaaagacaataatagtaatatataattttaataatatctatatatatatataataagttgatgtacctacaattagtaaatttttttaattagatttaattaagtaatattaagtacaatacatgtttatttacttttttttaattaagtacacaaggtatttttttctttttaatttttgaaataaggtatggacagataaatctcatgtgacctttcaaatttaagtctttggatgtactacttatgcacgtctatgtctgggaaacttagaacctaggaccttaagatgtgtgtttctagggtaccctaaaagtactaaaggttagaggttatgggtaagaaaaaacatgggtttaagaccattaacaacgagacgttatttttaaagaagatatatttctttgtattactaactataatattctgtctaatccttctatagatactaaccctgcatgtaccttagttgatatttccacaagaaatactagaccagatattgttcaagtggaacctaaagagatagtaacagttcaagaagatactgttcaagtggaacctatgaacaagaactagggaaacttcgagactatcaacttaccaaggatagagccaggagggtgcctacgaaataactgactccataggagcttcctatgcttttttttagctttaaaat

SEQ ID NO: 163984 - DNA, 1039 bp, Cannabis sativa
attttctcccctacacatactccttcctattctcagttttaatctccccctattcttactgtaccgccgacccctgctaccgcttttactagttcttcgtccacttcgttatcacatcccactattccattgatggttgacttgcccgacccacacactgccactgccaattttaatttacatcccatgattactagatctaaatcgggtatacgcaaaccttatttgttttatagtgtggttgcaggtattcctattgaaccgtctagtttttgggaagctagtgtcgatccaaagtggaactctgccatttatactgagaccattgcctggtctaagaaacatactttgattcttgtcctacctcctcctaattgcaaggtaataaaatgtaaatgggtgtaccgtatcaaactaaattctgatggtactgtggagcgctacaaggcatgccttgttgctaagaaatttcaccaaactcaaggtcttgactataatgagactttaagtccagttattaaacccaactccactctattggttctatctttggcggtctcctatgacttgactattaagcaactcgacatccaaaatgcattttctcatggtgatctcactgaaacagtttacatggctcaaactgagggcttttttgatcccctccaccctcatcgtgtttacaagttgtctaagtcactttatggtctaaaacaatcaccttgggcatggtttcttaagttgaatacaactctcttggcttggggttttattactttcaaagcagacacgtccctcttcatctatcgatcttctactactatcattattctgctcatatatctggacgatattatcatcatgggatcctcaatttgtcattagagatcttggccctttacacttttttctcgatatccaagtgttggaattattttaccaggatctagatttactcacaagtatgttattaacatcctaaacatgaacttctaaaacgatatgaaatgaacatatataaagtatcaggaaccttaca

SEQ ID NO: 163985 - DNA, 1275 bp, Cannabis sativa
tgataataaatttaaaaagaataattgacttttaataactttaattttttagaaacacaaatatgtttaaataattaaattattaaatttattgataatcttcattagtaaacaaagtagcaacatgcattattgaccatatgactttgtttatacataattaaatatttaaattaaattattagtgtgactcgtattttcgaataggtgatacgtgtacttataaggtcccaaaattaattaagacagacccattcacaagccaaattaagccaatagttaagtccacgacgacgacttcaaatttaactgcatgctagctctaatctctataaggcttggtgcttttggtcccaaaagggatactcgtcgagcgaatgaaaaacttatattatatttgaaaataattattaaattttaaaacaaatataatattagtttactttttgagctaaatttaacacaaaatttactttatttatttacgatagtcttgtccataataaatatttagctgcagccacaaaattaaagttattaaaagtcagttattctttttaaatttattatcacttttcatacttatttagacaaaactatatatttaataagtgtaatgggcttgatatagaatgattatcactcttttagtaaacattcatgaaaaatgtttaataattaaaaatataaatttaaataaattttagttgaactctactgtaactattctcaactgatcacaatcaagctttactaaaactataatctcaagccttgtgattcatcttttttctcaattattttgtgtttcactttgcaaaaataagaattttaactcaaaagccacaaataataataatatggctaacatgatatttgcattgttatttttaggacttatgtatgaagaaacaaacatcaaaatacaattcttatagatttcatattcaaaatcaaaaattaaaaaaattaggattttttttcacttactttgaatgtagttacttatttgatatggaaaatttcactattttcccttaataaaatatctcatatcaaaatttagaccctccactaatttgtacaaattaattccattgattacatgaactttccaatttacccttttttttaaaaaaaaaaataaaattgttaaaaactgaaaaattccctttctcttcctctttctcttccctctctctcgtgcaccactctctctctctagaaaaaactgaaaaaacttcccactctctcgtccctctctctcttccctgt

SEQ ID NO: 163986 - DNA, 682 bp, Cannabis sativa
atataaatatatacacataaagggtaccatagtacgtgattgttttaagtatttttaatatatatctagttgcaattttacaacaatacataatatacttacataaaatctctcatcaatttcatcatcctaaattattagaattgaattgcgatttgttctttcaatattgatgttgagttgcggttttatgactgttgtaattttataggtttcagagcgattattttaaactttataagatattgtgtctgcaaagacttcgacagtgaatcttttagttttatctgtcgctgaaattatagttatattaattggattgtaattgtgctctcatcttaaatatcataatatttaaaaagagacgggttattaaattgttacaacactcgtaaacaaaaaaaaaaaaaatcttgtttgacggattatattttagttttacaaaatattaatttatttaggataagcttaattaaattttgttttgtaatggttctacaaacttaatagtttattataactttgcaaaatttactctttcttttgaggcaagaatttagtgacccgagttacttgaatttttgtaagtttttgaacttattttagtcttaagctgtaacgtcctcgcttcaagcctccattgggcccttacacccacagaatgaatgactcttatacacga

SEQ ID NO: 163987 - DNA, 1779 bp, Cannabis sativa
aaaatgttatttatttagtttttttaattcaagttagaatttgagataagttgaataagaagagattttatgttaaaattaattacaataaaaagagtaatttattcatttatttttacacattaacaattgggattaactttaatgaaagaaaaaaaaaaaagaaaattaaaaattcatgtaataaaatatgaggaaagtcgtagaaagagaaagaatggcgagtataactgtctaatgaagggtagagaagaggacacgaatgataagaaagagcataaaattagattaaaaaagaatcccaatttattaaagaaagagaaaaaaatccaggtggcatacatcccatataattgtgattaagggatattaattgaacgggtaagattaagttataaagatataataaatgatatcaaaagcacgtgattccacaaataaaacccgatgagaagaacaatcaattatgaataggcttacagtttcttcttcagagagatagaaacaaaaattaggagagatggtgttaaagcttgcggcaactccgttcacgtacgtggcacacgtgttgggaatcgtaggacttgttctagtgctggtttggactatacacttcagaggtggcttggcatgggatgcttccaacaagaacctcatcttcaatgtaagtattactcttctatattaacttttagcttttgtttcttttatcaaaataatttcagcctttaatttagtattttattataattttttttctgtcacatgctattatatttagaaaatttaaatgggtattttttttttcttttcaaattaacttgattcgttttttttccctaaagctttctgggtttgtttttcgttcatataatgttcagtttgattcgtccaattttagactttacttacctttttggaagaataggctgatttgtttgttgagaaattctaactttgactatatcaattattagaatttcctatattagttgagtttcgttacttagtgcgttttgattcttttctagtgtctattgctcctagtgttttttttttcttcaataaattgtggttcttgttttttgcattggaattatcttaggacttaggatcatatcctgtttattcgatgactttttttttcgacttgccagtctgttaagtagcccataatatatgataattaaaaattcaataatttttaggaaatattaataattatacatatacatctctgacattactatggctgaccctttattataacaattttcacattatctttattcaaataaatatataaaagcttggctattggtacatttaatattaaaatttaacgtttttaaataatgtttttttaaagggctagatggggtctttatcatcgttatctaacaacattcttatgaacaaaggaaacgtatagaggaacacttattacattataaaataatcttattcttggatggttaaaaaatcatcttatattttgattttagtttttacagacataggacttttttttttttcttttcttttggaagcaaaataacacaaaataaagagttttcattgttattgaagacgttacattgttatttgaaaagacctgtgtaagtttctcgctgtctattaggaatttaacttttgagaaaagtagcaattaatagtaatattttttggaattttattattaaaaaaaaatataaaatttaaatattttttaaaaaattactcttaatatttttaaaattttttttctcacattatttt

SEQ ID NO: 163988 - DNA, 1618 bp, Cannabis sativa
gcctccgccaccgcctccgccgcctccgccaccgcctccgccccctcctccgtcgccacgtccgtcgcgaaacccaagggccagacttgacatagcacgtaaaaccattcaaaaattcaagcttcaaatcgatgtaaaatcagctccaaaaggcgttcttgaatcatggaaaggtaataacgtttgcaaatacaaaggattcatctgcgacaaacgccctgactttgggctacaagcggtagccggagtagacttcaacggattcaaattctccggcaaaaatgacatattaagacttaataacttccttgacggattacctgaccttgctttcttccatgtcaactccaataacttcactgatggagtcccacgtatcggccctgacaaaatcaactaccttttcgagcttgaccttagcaatggcaaactttcagggccattccccaatgaagttctcaaagcaataaatctaacattcttagatcttcgtttcaatcaattttatggggaagtcccagaaggagtgttcaaactcgatgttcaagtaattttcctcaacaacaacaatttcgagggtgaaattccttcaaatcttggaatcacaccagctctttacctcacattcgcaaacaacaaattcacaggacaaattccttcaagcttaggaacagccaacacttcaaaaaatctccgagaagttctcttcctcaacaaccaattctctggttgtttaccttaccaaattgggaatcttaagagcttgactctgttcgatgctagcatgaatctcatcactggtccattacctcagtcctttggctgcttgtctaagattgagattctcaatttcgctaataacaaattgtacggtgaggtaccggaaagtgtctgtaagatacagagtctcagtaatttcaccttatccgataactatatcactcaagtcggtccattttgccggaaacttatagatcggaagcgtcttaatttgaaaggaaactgcattagggatcttcccaatcagaaatcgaaagaggagtgtgctgaattcttctctaaggcttatccttgtcccaatatgaagatgatgaattacattccttgtaagaatcagttttaccgtaagtcttcgtccttgaccggtgttactgatgatcaccagtctgagtctgccattgaagaagaagcaccttctccggcgccggcgccctctaagtcggtgacttacggcgctttatcacctcattgatcctaataataataataataataattatattattatagctttgattaattaatggtaatttcaggggatatgtggattagtactgtttcatatatatatagtttttatttatagtagtaattaatgaataaataatctttttaagttgtgtatcgaaattatgtaatcttattttggcatctaaaatggaggtgtcgaattatgtaaaacaataaattaaggcaagttttatctctatttttagcatattatgaaaggggtgttcggattgaatcagaatctccggttaaaaattggtgttttatattgtgttattgtgttaaactaattaaagtttgacacgttatttaatttttatttataaaa

SEQ ID NO: 163989 - DNA, 894 bp, Cannabis sativa
ggcaacccaattactattctttcaatgatgaaaaccaagagtacccggatggttcgaggcgtcatattcgtgccaaccccattgtcacttcaacatctccgccttctgctcttattatcgagtcacctactactacaaaaacctttggaaagacaaagtttcagacatgaaaacatgttctaaatttgaacattctcctatctcgtcatgctcttggactaagtgaacaaatgaaaagtttttgttctgatttcttatgaagtttgcgcattccaactgttgtttgtttatccaccactacttttacatcctttctactcagaaaggtgactcccacaaaagtgtgctcaccctctcaaccattaaatatttttcttcaaagttagcaactgttgtcactaatccattttccttacactcctatttatcttctacagattcctttgctcccactgttgtcatcaatccaagaataaaataagccaatatcatagtggaatttagtcctacaaaccattgaaagcatagaatttaatttattattattattgttatggtatgtgtctccctcatggaattatattgaccaaatgatattggcttggcaagcattccaattgatacttttggcaacaaaaaaaaaatcaatgcaaagattaattagttaaatattatattaaagtaagctttattacatgtttggaagagtcattacattaatttattagatctatagtatatacttatagatttggaccataacaaaagtttttgtctgctctcttgaccaatatatttggtcttttgtcatcaccaaccacatatcaattttaccatacaggaaaatctctttttaaatgtgacagcctccttctccttttttttttttttttt

SEQ ID NO: 163990 - DNA, 2567 bp, Cannabis sativa
cccaaaagcttgaccaatatacccgacttggctatatcagcactgatttcaaagtcagcttcaagttccaatgttgcttcctccaaaaattggagtcgcaacgtctctatttcatcatttgtcgacgagttaccttcaccttcccctgccatgatcagcttttcaagaaaaaataaagatacaaaggaatatctcagttggatgaaaccaacatctcattcagagaaaattaaaatcaaaatcgccgttgccggcaaaagttgtttggcatattaagtgtgcatgaccaaggctgctgtttgccacaagtcgaataattggtggaaacataatctcatatgggcttttgtttggtggtgtttgtacacgaattagtaagttcatttttattttttccttgctctcagggtgcttttaccgttttacgctgatcctctaacaaaattataaaccactcgtaaggactaattacataaaaaaaaataaactttttcatttttacaaatctaaatatttttttttttacctttttatggaattttatataaaaactcatattgtaattagcactgcaatctaaatcgcaataaaaaattgtataaaaacccatattgcaactagctagcactacaaccactctagaaacacaaaccgtaaatttaaaaataatttaaaaaaacagtataggggtaatttctaataaataaaaaaacacaccactgacactgacactgacactaacacacacaagtaataccttatattattttactagcatattttatatttcaaatttaatttacaatcctcaaaacaactcaaattaatcatcaaatctagttcgttgtactgattacaattattctagtttagtaattttttaataaaaccattttgtttcatattaattatcaaaatttataaatctttactaaaaaagacaaaatttacaaatctctaaaatattgaaaatacaatgaaattttcaatattcacaaaaataaaaaaatgtacatatgtattaacattttataatattaattatatatttataattttatacatatttatataaatatgtgttactttcacaagtaaaaagtaagatttttttttacgaatcagaatattgtattgctcaactttgtttgtgtaccaaaggctctatccctttacatcatgaacccaattaacactttaaagactacgcacccattcactatatccttctttgtaattccttttggtaaataaaattgagtctatactttacatcagccttaattttctttacaatggagtactcttttgtataagtgccatttgactccaatgtatactctgttatcgtcatcccgaatctagtatgtcaatgatgcaacaacaattgaaaattaattttcaatgtgcatatataaaacataatttgcaaattggattatgcaaattgaatcggaatgcgacaccgtaagtatatgttcacatgttaatttatgctctttaatcaaattagtaaaggaagttgtgaataaaagaaaaaaaatgttcagctgcaaaacttatactcgtaaagtaattaaacagagatattggggagtatattaatatgggaatagagaggagaaatattgtatgtatattttcaacaaagaagaagatatattaattttatgagtgtttttgcaacatgataatattgtgactatatgataagtaaactacatatgtatttttccaaacagaaaacatatataaaatgcatgaggggcggagctagagtattattatattttagatggctccattggatttctttttagtctaacttttagactatatatttagtttttagctaattaatttacaaaagaaaatagaaattggcgtggctaagtcaccatgtgtgtatgttatttggaataataatatataaacttaacttaaaatatatgtacacttaaatactaagagtgaatattattttagattttgtattttgcataaatgctgagtacaacttggtagatcctattacaaagataatactacatactacacttgatctgaacatcaaggtgttgagattaattaaaatacatttttagttttatattagtgcaagtgagagttttttaggattttatgccctaaataaaactgatttcaataaaattagatttactaattaatacaagattagaaattattttatgttgcatggttcatatgatttctttcatgattatatttttaatgtataaattctatcaagtccagaacatatagttactcatgattatagtgttgtcacagtcaaatataatcatgattatatgtttcaaaattatgtcctgtgatttgtgagtacacttgatttacactgacatgatagtcagcgataaagtttacttacacattggataagtgttaagtccttttcaggacattggcactacaagaaatgtcacttttgccagcacattttggtgctagcaaaagttggtattgcactggtaaaatagaatttacctatgatatgttggcgaaagggggttggcaaatcaatg

SEQ ID NO: 163991 - DNA, 823 bp, Cannabis sativa
aacctaattttaaaatataccaaaaataatatgatatctcttgttgtgctttgcactttaagatgaactttagtggcttcttaaggtgactgtttctctaattattaagtgtgggtttttcgttaaagatgaagcgtttcaccaacgagaatttttggaaaaaaaaaagataattggagtcgagctatttgtccgttttagaaattttatatagtgtaatgataataaatatgcacttttttaaaatggtcgatcttatctaaaataaatgtgatttttcatttcgaagactgtccaaattattgtaatttgattttatattttgtgttacaaaatagttggacaagtgtccgtttagagttgaattggcatgtatgggctacaacctgtgtccttctataggctcattgtttgctgccttagcctagagattgagacattacactcacaattcaacaacaatataaataatttggcatagacattgccaacccaactattcaactatagctttgtgatttaacaagatatttcatatattgccaaattgattttgtgtacatgcaaataaaaaatttgcacttaagacccatattatgtttgtcatgtatatacccaccagatatggacacacaccacattatggcctatccatgcttacagacattgtatccctctctgtaaactattcccaataccttttaaaaaaactctcattaatggaataccattttagaaagcattgttattggacaaatactttttataggtattgttttacgattaattagcgatatttgttaaaatttattttcttaagtta

SEQ ID NO: 163992 - DNA, 1422 bp, Cannabis sativa
ctgagtaggtctactggctagatttgcatttttccaaggagttacaggagttgaacggttctaaccctacttttgcttttcccttgtcttgtacaggagcagaggctccatcatcagcaggattttccttgttattttctttgacacattccactgaagggtcatcatcggaatctcccccgtctagatctccaaacttagctcaaaggcgagcaatcactctccattctctgagaaaatttatcttgatgggccaacttctatttagtcttgagcaactctctaaacactcgaaccacttcggggtcctgcttgtagtggtattcatctttgtaatatccatctttatgtatttaccatcattatctttcccctcattttcaacatcttggttttcgtcgatgcggttgtgttggttgttcaggtcaccctctcgattgtcagtgttcgatgcatcccctccccttgcatcactcgactgggtgtgctctggtgagagagggtttacatcttccataatagcgtcgaaggcgcccagagggatctttttgggaactatttttctagtaattaccatggtcacagtagcattatgggtttaggtctttctttagctctcaatgaaagtaccaaaatatttatcgagatttttgaaaactaaatatttacgagctgaagaaatgataaaaaaaaaacagtaataaatgagatagaaatttttgtgtggttcaggtgttgattaatattagtccacgaatcagtctattcacctcaaagagcacattcgatatttttacagtgcttatgcaagaaaaccctaactttgtttctctaagtttctcttgaagaagatgaaaggttagagagtattttagcagagcttcgactaagtagttttttcgattccctcttcatatgaaatatagaagggtatttataggctaaggggcgggtatggacatgccaatgactcgcctagggtttttgcaaaaagtccactaatggggtaaaatacatgcaaaaatagcgactattatgcccatttgaagggtttatgcttgtgcgttgctgcagctagacaataagggaccacaaatggtgcaggacatgtgttgccaaaaggtttcaccttacagaataaacattcggacaagacacgtgtcgccaaaatgtttcaccttgtaaaggagatgcttagacaaaccgtcaggcaaaaaggtatgttcagagatgaggggtacgcactaccatggcctgacgcaggaaacatgatctgatcctgtgtaagacaaaccataactgtcgctagggtcatctgggatcctctatatatgggagatttttggctgccttttaggtacagtagaacctctatccaagaatacacttgggaccaagaaaataatattctaattgagaggt

SEQ ID NO: 163993 - DNA, 1214 bp, Cannabis sativa
ttatcgttttagctaatgagcttagcagtctagtaaaagcagaagcgtgagataatctaattaactgaaattattgatgaggaggctcaaagggttttcttgctcccttcctaactctattaatacatattttttcatcacaattgtatgtttttggttcatctgatgatctgcttctgttttagggacattacttctcaatcatctcaatggattcctgatgttttataaatttctaacaaattgaacattagttcagaaaccaaaatcaaaatgcaattgggacttcatgaagtgttcaaatgagtgataacatagagctaaaagccactgatttacctgagggccttgttcaatgcctgccttgaatggatcaccaacaacacgatttatggcacgcgccttcgctttctctacaaactcttcatacacattttcatggacataagttcttgaaccagcacaacagcattgtccctgcaaaagggaagtaaatggtttttaccaatgaatttattttcttttttcttttgcagaatcaatccagtttagagagaaatcttttattacatacttgattaaagaagagggcaaaatgtgccaactcaacagcatgatccacatcagcatcatcaaaaacaataaatggggatttccctccaagctccaaagttactggtttgagattgcttcttgcagcaagttcaagtacagttttacctgtcacagttgaaccagtaaaagcaagctgcaaagagattaattggtagatttagcacgaaaattaagcaaactaaaatgctacaatcaaagtaatggttcagtctgtttgcttacaacattcttagacaaaaaaaaatggttcaggaaaaatggtggtaagtattaatgcaaatgtttcaccttatcaacatccatatgactggcaagagctgctccagcagtaggaccataaccagaaaccacattcacaacaccaggaggaagtccagcctgacaaagaataagattatttagacatctaattaaccttttacaaatggaattagatagatatgtaggaaaaatctaaagtacactttctaaaatgagtgtttaggtacaccccttatctgtttcgtcatccaggagagctttttagtctaattcttttcatgatcatatataatatagttatttaagatcacttgtaaattttcagaaaattccgaata

SEQ ID NO: 163994 - DNA, 1060 bp, Cannabis sativa
actaatgatactaaatatatcatcacaacacttgtttttatgaaaaatgttatttattactgcaatcaaatataaacattgttgtagagagattggatttggatatataagattattcttatgtctttgtgataagtttttaaacaatgtgggtcttaacaaagctaaagatgaaatgttcatcttaacaacaatcaaattaaattatggcctaaaatagttaattaatcaaaacaatggtacattgataattgttaactcaatgatttattttaattttgatattacttttatattatgatgaggctaaaatttaaatgaaacgaatcaaatataagaatatgtttgaataagttgctatataattacacagcataataaaatataatttatattttacttgattaaacaaacataccaaatcgacttattatcccaaattacacctaattttgaaaaacacttcaagaaaaaaacaatatccaatggatttatgatgttaatatttggctcttgctatatgatagtgaatttgattatctaatttgcaatggaaaagaatatataaacatgtctataaatttatattgtctctttctttaattaaaaaataacatttgtgtaatgtttgatcttttaatgtaagagaaatattatatagaataatcaagaatattactttgttatattttgttgggattacaagactactatacacctaatttttataataacataagatttcttagccatgaatttggcataaataagaaatcaagatatattatttaaaaaaataattttagtattagctataaataatttgttaataatttttttttttcttaaataatggaattttattaatatcaatcaactaaaataataatctataatttaattgggacatctccctgttagagatatgaccatgattaaaattaaaaaaaaaacaagtcaaatatcagtcgcataatttctagggaaaaaaacaaaaaaatacaaaaaaggaaaaaaaattacaaaaatactttgggccggcccattaaacatttataca

SEQ ID NO: 163995 - DNA, 870 bp, Cannabis sativa
aaccgtgccaagatcagtcaattccgacctcagcttcgcaaaaccaaactcaccaactccctgaacgattatcttctcaagattaagcatcttgtggactctcttgcctcaatcggtcatgtcctctcgactcaagaccacatcgaagctattttcaatggcttgcccagggaatactctgttttcatcacctctctctcaacaagaaaggatgaatactctgttgctgaagttgagtctttattaatggcacaagaagttcgcaatgaaatggccgattctgaacttgacatagcaaagcctgaagcaaatcttgcagctcaatccaaattcaccacacccagacctagcccttactacactcccccaaatgtatcaaatcaaggaagaggtatgtctttcactcctcgtcctaatttccctgtgtttggctcttaccctacacctctgtacaatggatatggtttactgcctcccccactgtaccctccctttactggtaactatagaccttctcgtggtggatatcgtccctccagtacaggtggtcgtggttccaacaacaagacaaaggttacatgtcaattatgccataaacaaggtcatactgtcaccaaatgcttctatcgatttgataaaagcttctctggccctgagtgttttcaaaatttcaatgggggatctgccaatctggctgagatgcaagctatggtagctactgcagagactgtgaatgattcaagttggtacccggactcaggagctactcaccatctcactcccgatgcttccaatcttcaaaacctgcaagaattccaaggcagtgatcagatttacatgggaaatggctcaggtttgcaaatctctcat

SEQ ID NO: 163996 - DNA, 2383 bp, Cannabis sativa
aaaaatacacatacatacttgaacatatattagattgtaaataataaagaatatattttttatatttcttgaatttctaaggttgcctttaattaggacaataacttagacaatttattttccataactacaaggtcacctggtatggtgtcatccatggcaaatattttttgatatagctcttttgtaataattaaagaatattccaagatcaatctcaacatatcttgaattcctaatacgaaaaatatgggtatagtggcaggtaatgttttactaatatatgagactaggaacatatgtttactcccattgaacctgtgatatatacacaatcatcaaaagtttttatgtcataaccaaataagaatacttaatatcaattgtgttatcattgacgagaatcttacttgaatttttctaatttgtaaactatattatttgtatctttggatacaaaatttcttggttgaaccacataaattgtgtcataatatattgagaaatgacacttaataatctatttgatataacacaagaccaaaatgagtattcagtgccatgtttgtcctaaaattgtctttcaattaaaccaaatagaagtctatttaaattaaatgtcttttttatgagcatattccttagccacaagacataacgtgcacatctccatattgcaatttgcatttctcttggttataaaaatccatttataacaaattagttttgcactttttaacaataggaaaaatattcaaactttattgtctcacatcaatttgtactccttatttatgacataaattcaaatttaaaaaataaaacattcatgacatgattagatatattatctcattctgatttttcattatgccctttttctcatgaatctctttaatggcactttgaggttgttaactttgctttctaagaaaattaccttatcttgaatgagaagttgttcgatattttcttgtcaatgttctgggttcacttcttgatcaatggaagttatagaaacctaaacactataaaaagtgatagtaggaattgagtttaatgtcaatttttcctccaaaacaatatctctaataatcttgtttctactcaaactcaatatattaactttttctcgtctcaaacatagaccttagagtgtgatcagaaaatttgtaaatctttatataaattactattgtatattgtaaagtatagtttcttactattttggagactaaattctctttatgtacttataagatattgccttagttggacatctacacaaatgcaatatatccttatgttaagattattagtctaaataaatgcatgtttatgaagagttttaactaatacttgatacccacagtttaaagatttacgttgcaatattaagtttctctccccaaaatgatttgatgaagaagaatggcttatcaaacttcttaccatatatacttagataaatgttcatgacgtctctcaaatacccttgaattaagtttgtttgacattttgtattgcaagatgaaattatattttctttggtaattgtattgcaaaataattttagatgttcatctgatttgtcatacctcccatgagagtattaaccaccatagttgatttaaatgacattaattttcttgcctaactaatttgtcagttgtggttttaaaaatttagaagtacttttattgtgggaataattacttccaccgaggatagagtacatgatctgttatatataaatatatgggcgagtattcaatggttacaataaaaatgtaaatatgatcgatggttgcatttttttatgacttactataacaggtcattgacggaaaaatttcattacttaaaataaattaattttttaattaaaatatttaataaaatcttttttagaaattaatatttatatatatattttttaattttaaggaaataaataaaatcaagttagtattaagttacaagtaatttattgcattattttagtaaatttttcaattattagtcacaacttgtctaataatgatgtaacgactataaaaaatgtaaccatcatggttacatatttaatgtaaccattgaaatctcctccatatatgtataaatatatatatgtatatatatatcatataatcatattcatcttcttcatttaaaattacaccttaggtgtagtacataagttgagagaatatgtgtagttaatgaaaaatattagagttaattaaattggttagttcggtaattacagttagtattctaactacactattacaatctaagcctttagcttcccttttttcaatccaatttataaaaagggaagctaaagggggtgaatatatctgcattgacatttagaggc

SEQ ID NO: 163997 - DNA, 1523 bp, Cannabis sativa
  modified_base (1461)..(1471): a, c, t, g, unknown or other
ggaaaattggtacagggcataatgttcggtgtgcttcagatccatggttactggaaaatactacctttaccccttactcctactgtggcgatcctcttttcacagttgcacactatatctctatggataggcaatgggatacatggatcttagaacatcattttggcgctattgacattgatcgtattctttctattcctcttagtccttttccaagagagaacatgcttaattggcaacattcggacacgggattatacactgtcaaatctggatatcacttagcagagagtttggaatctatgaatgtgcactcatcctcgtcatctcatcgacgatggtggaatcagttttggtctctaaggcttcccaaaaaagttaaaatctttgcttggcaattcataaatgatgcgctttctacctccatgaatctagctcataggaagatcacttcttctactacttgtacagtttgtatgtgcgcgtgggaatcagtaggacatgcaatctttcagtgtgaccatgctaaggccgcgtggaaaaagtttcaattccaagtatatatgctgaatattagtaaccttaaaggctttgatattttttcccacattgcagttgctcacaatgatgctgatttagaaaagattacatgcctaatgtggtgtatttggtctgaacgaaacaaaaaattcatggtacaagcctaaaccagcagacattatttgttccttttcagcttctcatttggctcaatatcacaaaaccacaacgactaaatagcagctataaaaaattcagactccaatagctgcaatgttcaagcttaaccgcctacatcagtgaggactttgcctacatggctgccaccggctgctggttgttttaaattaaatctagatgcaacatgtgataatgcaggggctattgtaggttttgaagctctaatccgtgaccatgttggctttgtcatcgctggtttctctaagcctatacgtggatgtttttctccaaaagaaatggaggctgctgctatatttcatagtgtgaaatgggcaatcgagcatcagctgccaatccattctattgagactgtctctctattggttgccaatgcggttaataacatgtcttctactagatttgtaacacacttttatgatttggtagatgacattatttaccttttatcctcttttcctagagcaaaggtatctcatgctaaaagagatgctaataaagcagctcatgctttagctaaatttgctcttcgattggataaagatatctcttggttggggaaaattccctccccaatctactctatttttattaatgactctcaattttaataataacagtttatctcaaaaaaaaaaagtgtgactatgtaatagaatttttagtttaacgatgctttttgggtattcacgttaattaacagaatattctttattaattttnnnnnnnnnnnatatatatttaaaaataaaattatgtagatattttatataaatttaaattta

SEQ ID NO: 163998 - DNA, 1439 bp, Cannabis sativa
ttggtattccaacacttctctttcatggcacttcttatttttctttgtgtgctacgaccagcatttttttgcatgagcctgagaagaaggtgttgtctgattcagagcccttttttattcctaatttccccgacaagatcgagatgactcgacacaaattacctgaatatttgaaacaggaagaagggggtcagttttggaagttgttcaaatcgttaagagaggctgagtttaaaacttatggaattttggttaatagcttttatgagctagaaccaacttatgctgactattacccaaaactcttgggaacaaaagcttggcaagtaggccctttgttcttatacgatcaagattctaatcctgaagagcatgactgtttgaagtggcttgataccaagagacccaattcagttatttatgtgagttttggaagcatagctagttttgatgaagaacagcttatggagattgcaacagggttggaggcctcagggcagcaatttatttgggtggtgaagaaggaaaataaagaagagtggcttccccaaggatttgaggagagaatggaaggaaagggtttgatattacaaggttgggcaccccaaattccaatccttgagcacaaagcaatcgggggatttgtgacacactgtggttggaactcgagtttggaaagcatctgtgctggggttcccatggtgacttggccagtatcggcagagcaattttataatgagaagttgattagtgaagttctgagggttgggattgaagttggagctaagaaatggaaacgaaatggttggtgattttgtgaagagggatgccatagagagagcggtgagtcgggttatggaaggagatgaaggtgaggaaatgagaagcagagtgaagaaacttgcggacaaagcaaggaatgctgtcaaggaaggagggtcatctgttttggacttaaatgctttgtttcatgatttgaggtcagctcaaattgacaattgttcaatatcaacttagaagaatctttctgtaactttctaaatatcatgaatgaagtgttagtaatttgtccaattttgcttcttgtttttttttaagagaaataaataaaaaataaggcttatatgttggggtgtttgcggtgcgggttgtagccattttttcaaaccaaaccgtatatgtggttcttaaaatttctcaaaccacaattacaccgcgagattttaaaaccgtaaaaaccacaccgcaaaaatgtgctgcaatttgagcagtttacactattataattatcaaacattataataaaaatttaaaaatcaaactattaaagctttaataatataaaacaaaaaaaaatttattaaaattttaacattataataatcatcaactcattatattgaattgtttttaaaaaaaaaataaagtaatatacacat

SEQ ID NO: 163999 - DNA, 1097 bp, Cannabis sativa
aagattgggtagtatgagttgatcaaaattatattaccaatttcattaaataatcgtcccacaactaaaactagaatatattggagtagtaatttttgtagcaactaattaaaaacaataagggtgatatcacaatttcttacaattaaagtcatgtatccatggcatataaatttggataataattctagtttgtatacttgcaatatgatggcaagcaataatgtgccaaaactatgttaagaaaagtgtacaagtagcatattaggaattttaaatatatattgtaatgctatgatttacaatcatagaattccaaaatttcaaaatggaagcaagtcaaacggccaatatttttatttatatacaatttaattaataacaacattagggaaattagctaacttgagacagaaaagttgacaaatagcatttcaatcttggttaatgattgccaaaatttctcaagttcttcagaatatttattcattattcaattcaatgttataggtacctatacaaatcgttgtttggacattatactttatgcctcatcaaccataattagttcatcttcaatacaaattaaattatctaagtaactaatcaaaccctatcgcaaaaagaatattatatatataccaatttgtattataaaattaacctgtgtgtagataggttgttcttaattttttccaaaatcattggggcctaaaatgaatacaacaggaaaatgcattgagcaattattcacaagatcatcaaatatataatagtatataacaaatattagagacaaaagaggctcaagcatctctagcattactagttacacataaaagattacaaaaattcaataaagtttttacaagattcaatgaattatatacaaaactctgagacaatatataatacattctgataaaattaataaaatagaagagactttaaagttcgttgatcgaaacatagagcaaataaaatagaaatattatatatatattgaaatcgaaagaaaaattgaaagatggtttaaaggatgatctgactcaagataaagggaaagattcaggaaaatagagagaaacaaacagaga

SEQ ID NO: 164000 - DNA, 1238 bp, Cannabis sativa
  modified_base (1192)..(1195): a, c, t, g, unknown or other
aaaaaaggaaagtaatacagtcatgttagaattatcaccgacattcaaagaaggtaagattcactcattattacttgattaatctaaaaatataaatatctagcaaattgttttttttttttattctttttataagaaatatatagcaaatttaatgttagaataattaggaaagagttcattttgtaacacataatttattttatataaatattttgtgataatttttttatgttaaaaaaattgttacaatttatattttcctagtgatttaaacatgattaataaattgggtcatgttcaatttgcatgaaccaccattattattgttgtttcttttttacatactttcacatatgtttttgcagtataatattttatttaattgtataagcactactactactattaaaagatctttttgtgtcatatatttgtgataaggcaaaaaattatacttaaaaaatgagtaatagtgacacaataaacttattcattattgggctgtgattaatattgggcctggcgtttaagtcagttatgaacttatgtaaattatgtcacaaattttaggaattattttagaaataccaaaaaaacctaaaaatttatgttttcacggaattttgagttttttttttgtacatttttacggactttttttttcttaaagaccgttgtttacacattgttttaaaaaactgttgttttaactttgtaaaaatatagtataacgttgggacaacatgaaacaatagtaaaataacacaaaatcataaaaatataagtgaaaagaaagtttgtaaatatgtaaaataattctatttttaggtgtattgtgtaatttttttcaaattttattatttgtgcacatggcccactgccacaaatgatataatgtttttaaatctttctctaaaaaagaaaaaagggcaagccaatctgccataattttagcaaagaaaatgacaataacagatagagagtggtttgataagttgtagtataacaaaattcaggcctttctttttaaatgtgttgttaggatataaaatttaatatgattaaaagtcataatagtaatacattctcgaatatagtactacattgtcaaatatttttaaaaatatcaaaccaaccttagagttttgttattttgtctagttattttaagaggaaattacactctatnnnntttttatattgtcctcttttatttgtaccctcttttttaaagt

SEQ ID NO: 164001 - DNA, 1000 bp, Cannabis sativa
aaaaaaaaaaaaacagaataaaaaaacaaacttgtatcaaagtcaaccaagtaaatgagtcgctttctcctatgcaaaaaggaaaaaaaaattatgttagatatgtacataagagtttatattattcaaataacataataataaatttgtacattctcacaaacatagaataaaatcctcaaacttttgtaagtgaataattcctccaaaaataaagaatataataagacaataaattcttccataaacaaatctaaaatatcttttggtagtaacattatgcatcttatacacttaagtgagcataagttcatacataatgattataatagttgaatcacaaaataattgctcaattttagtataaagagtattccaaacaatactctcataccaaatttttctaacaatattaaaaacactcaatataaatattactaatatatataatgcattgaattataacattaacaagttcatatctacatttcattgaaaatagtttaaaattaaaaaagtaaatagaaaccactcaacaatgatgactatattgaagattttcacgaatattaattgagtttcacactcaatcattttagtaagttcaacatcttttagttctagcaactcattaatctattacaataaattgatataagagttagaaaatatattttttaaaaaaataaaaataaaaaaataaagtaattatagaaaaaaatatattttacaggttaccgtccattgttgctgttgttgttagtttaacgtccattgttgtagcagtaataagattggtaggaggagtaagagtgataacagttagtattaatgatcatataaaaagatgagttgtttgtagtgtagttaaagggataagtggtgtaataagtaccacactacaccaaaaatcaggtttagtgacatttttatgatattttaatgacatttgttaaaaaatgtaactataatgagaataaatgacattttaattagtgac

SEQ ID NO: 164002 - DNA, 1195 bp, Cannabis sativa
ttcctcaatatcttgttcattcgacatggatgagggccatttgacatgcatgctatgaggcccactcgacatacatgtcaatgcctcaagagagggccactcgacattctccaagagaaagccactcaacatgcatgtcacagggccacttagcatggatgctacgagagccacttagcatgcacgtcataaaggccactcggcatgcatgtcataagtttcacttgatatgcatgtcacgaggtcactcagcatgcatgctacaagagccactcgacatcacacaccttcgggacccatttggccttcaagacacactcaacatcatgccttctcgaaacccactcggcatcattctcttgagacctactcgacacaatgccttcgagacctacttgacatcattcctttaagacccactcaacatcatgccttcgagaaccactcgacatcatgcccttaagagcattgttggtctggctactggtctagcgatccctcctagccacaacctaaggtacagaaagacccactcggcatcatgccctcgagacccacttggcatcatgcctttgaaaactagtcgatatcatgccctcgagacccacttagaatccttagagacccactcaacatcatgcactacatttgatcattgtaatgagtcgtaacctctctcaacgacatgactaacacttaatgagttgttaggtaaggaatcaaatggatgaaaccctctcattggaacgccctaataattaggcacgctgtggacaacaagtaatataacctaatcccactaaaccaggattactagacagataagagcaagaaaatttaaaaaactttaattgcaatggaatgaaaatataacttctaataatttaaacttacaacaatcctaaaagacaacatgtttcgggatcccacaaaaactttttgtaaaatattacaagttaatttacatgccgacctaagcggcaaaaatttgagatttcaaaatacattcgctggtagaccccaacccacttggtctagtatggcctgaacatgtacaatccatcgtcaagctctcgaactcatggctgattatagatagatgtaccatttcctgcacagtagagcacccgtgagctaagcccaataaaacattataaatatcaatatacataataacacatatcacatatataaa

SEQ ID NO: 164003 - DNA, 994 bp, Cannabis sativa
ctggtaaaatatatccaacaactaacttatctctgtatatataagagccttttgcataatcagttaatgaaatatatattcattcctcattttctctctcattttttatttatacgcaacatagtatcagagtagttcttttctccttccgccgaccttggtgatccaactcaaatcattccttcttctctattctttcttctcgatcatcttccaaacaacaaaacccaaaaacacacacagaagatcaaaaagtgcaattaatgactcaagtttgagttttcaaactcaaacttgttcattcaccatcaaacacaccaaaaccagcatcaagagctctaatataactcaattaagctatagaaaataattcatggaaaactctagctgaaacagccccaaacgttacaatctaaagctcaaaccaaagaaaacccaataaatcttacaggggaagatattaggatttacctttgaattactctagtcaaaaccagctgaagaatcctcaaatcacactaaaattctccaaaattgatgcttccctaattagttcgagaaagagagagagaggaagtgaagcttgaactttctaatgtttgtttttcttttctcccaattaattaatcaataaccccattatgctgaaactaatcaatgaccagttgtccctctaaaataaagccaccaaatcttcaaataaagaatactaaaaatacccttaacctctttagttaaacaattataagcttaggggtaaaatggtcaaaagtcataaccttgctcaaatttggtatcccaaatatctcgtaagtttgtcctactaagaaataaattctaaacttacccatgtgacataaacggccatccatcacaattttagtcatcgccgagcaaaaatcgtaaaaattacataattcatatttaacttaaatattactcttaggtggcgtttggttgggaggaatgaaaaacataggaatgagaatgagaa

SEQ ID NO: 164004 - DNA, 1327 bp, Cannabis sativa
aaaattaaaaaattaaaatgtaaaatataaaaacccctaaaaaaatatatattattagaaacttgttataattaaataagtaggtacatatgaaaaacaaaatatgagtacgtagtactagtggactgaagtcttgatcaccaacagctccaaattatatataataattgtggtttttgagtgattgacaaaaacaactggacaacctaatcaaaacttaccctttcttatgaataaaatgcattcatgatcgaccaactattcccttcacgtggccccttcactatatataaatgtcaaatttgtagtcttaatggccttgtacctattcatcactttggtttcaaccaattaagaccacatgatgaactttatcttctcaactataaagttccattttttattattattattaattaattaatgtttagttggaaattccacaaccattccttttgctggtcccttgacaatttttcgtaattttattgacttattttcaactatacatatagacttgtagtattatatcaacttaattttattatgttatagttatattattcttatcattcatatagtagtccattgttgaaattaagatctcatcatgaaatctaaaccacactaatccctttttaatttcttattgaagtattattgcatgcttaacacgtacattttatctatgtatatatataatgctaacgcctttatatttatatgtatatgtatataaatgctcaaaatatagaagacaatagtgtaatattattagttaaaaatgatccctcacatgtagtcatgatcatgatcataacatatttccttatctaaaaattgaaaaaatggggccaaattggcaattgtactatagagctagctagaatattcaaaattaatataaatataaatatcttttttgtgtaatgtgtatcacgaaaatgctttcgtcatttctaaaggtgtcaatttctaatgacatgacctataacgtcatctcaccacaatcatggtaagatgtagtaatacacaattggtcaagattaatttttttaagaaaacttaaaatttattaatcagcaacaatcaaacgtttgaagaaccatagaaattgtatcttccacaagagtacgacctgatcaagaacaggagttatgagcaacacaatacgtaactttattagcagatcgtttaataaaacaaatcttgacattcaatagaaaagataaaagcaattgacattcaagaaccaactgttagacatttatttatatagactaaaacatacatgattatgaataaagtgcggaattaataaatcata

SEQ ID NO: 164005 - DNA, 2242 bp, Cannabis sativa
  modified_base (2196)..(2210): a, c, t, g, unknown or other
acaaactgcctgcgcttaagagagaaaaatcggtgttcatcaacatcataggcatcagagaatcccaaatttttcaatgccttcacagccaaagccgacccttcaccaatgcagagagcttttccaccattactcaacagttgagtactccttagctctctgaccacattaacagtcaaattcatatattccttgcattgcgtcggttcaatggaactccaaatggggttcagctggcgaccctgaaatatgtaccaacttggagtgaagttggcagttaactctgtcagatgcatggcgcagtcaccggaggtaatgggcgcaaacattttcaagtacggcccggtcaaaatctgcaccaaaggtattatggacagagctaaggcgattaagaaagatcgtaaaagcacacgccttgctatgggtccatgaaagatcggaaatttcaggggcttcaactccatcgtgattgccccttattttttccgttatctcactcttaaacgcgtaagagtagattttttggatcaaaggatctgagttgtaggagaacaattttcttgtaacgaatttgcgattcttaattgtaaaagaaaatctttgagagagtaatcgaaatcgagaagctagagaaaaagattatcgtgtgcaaaacctggacgaagtgtgatttccacccacgaggactcccattgatttttgaaaccctaaccagacccttctcggaattcttcttaccgacggttcaaaccaggtcggatccatctcggggtaaaacatcaaaatcaagctctgggttttggacgaaatctacatttgcacgatttgagaactagcctacatataatctttcctgatttgggaacgatttttagaaaccctagatctgaatcaaagcagctgactttgaagtttacagcataattgaccttttggaacggggtggagtgaagtgagaagacagtgatgaaacatggcaacttaagaactaccgacatggtgtaacacgtgtcaactgatcgaagcttctttcattgttaaccttaatatgaggatataatattataattaatcattaagaaatcaaaacaaagctaacttcgaagttacttcattagttcttttctcttaactttttttacggacaaatatgcaagtgaaaacatatggtaagaaccattgagacaccattcgtcgttttcagcgagcatgccttctacccaagtctcttccttttcttcttcgaacagtgaagatcctcgtgaccctctgcaactttcccacctttctaggtatattttctaccttgacattgtcgtggtagcaccatatttatggggattgacacccaactgcctctacccaaggtgatgaggtcagcctaatctcaagcacaaaattttttaaagtatggattggcattaatgaaaatatttcgggtttgatatgttaatatagtaaacctaatcattattttctctcgtatttattttcgagtgtccttctagatcttaatttagaatttaacttttattattgagactaccaacctgaattgtggatgaatttagatattctttcgcctgaattagccatttatagctattacccctatcatctatggtacttgaatgtacctagaatttgtaaccccatcgtttgccattttactcattttgactacttaagttgtaagttccaaaattttttaattaccatttttgttcacgactacttgccttgtcttttagctcatatattactagttatagaagacttagcttactttttttagtagctttgcaactcactggcacaaaaaatattgtgcactcactcgttggtcatatcgatattcacgaagggcttctactagctctacccatcttccacttgatgacaactttatacaccaccaaaagtttcaaccataactccctcaagaatttcttggagaagtattggaaaggaagattctcagttagtgtcaaagaaaggtcccctaactcaaatttgtatttggttgctttccactatgagggcgataggagaaaggtcataattaatcaaccatggatcttcgataagacccctattcttctcgagatctctaaacttgactccactcttgccctagaattaatgcgtaagatgttggaatatgttttaccagtatctagatttactaccatgtannnnnnnnnnnnnnntaaatatgaacttctaaaacaatgtaaataaa

SEQ ID NO: 164006 - DNA, 3033 bp, Cannabis sativa
cctatcggcaggcagaggatcctctgtatttgctaagttggtcctgcctatcaaccacctttccccaagtatggaaaccaaagactcagccaaaattagtgcctgaagcttttcagcgggcactggaaaaaataatatacaagtaaaaaggccactaagaaaagtcaggatattacattctgaacaaaacatagaccaaaaattaagtctaaaaatggtaatttggctgttttgtttttagaaacactaattaggttgcattttattgttcattcacatcaagtacatccattaccagaagaaaaaaagtaaaatttgaattgtataatatggtataaaatcatggcttaagaaaaatgaacatgtagtccaggaagattaaacactgagaaagtttggaagaaaagtactatgaaaaacccctggtccgacttctcgacgaggaaaaaaagaggggaagtagtctttaaacacttacaatcctatcttaacaccaatcctatatattccacataccaacacggctttgtagaatagccacaatgccatcacgcatataatttggccaattcttgtctggcaatacttgaagagcatcataaagtggtacctgaattaaataaagttcatcacagtcaattcccaaatgctacatgagtaagaagcatagcatctcaacacaaccagctcattgatttgaatgtcggtcaagctcctgaaccccaatgtgtacaagcataaccagccacatagtcaagagttgctaaaaacttgcataaacaaagccagctttccagatatgaatatatggagcataactgcataccgaatgatttgaggagagaatagctgacagtaggtgcaatgcttcaaatttgatggcatcatgcaagacagaaaattgccttgatattgtagccacctaaattgaaaagaaaacattaaacagaaacatttaccacaactttaaaattaagcacatagctttaacaataaaattaatgtgtgggtgtgtgacattcaacattgagaacagaactgcaaggccacaagtatatctcacaatcaaggagaactctttaaggttgccaggaaaaacagtatccagagacagcttagatattaggagttgcacaagtttcaaggcaagctccatttgatgagaacctatacaataataacatttcatgcagttaaaaaactgtgagcactaactaaaatactacacaagtaggcaaaacatttttgttattaataaccaaaagggagcatacaatacgcaggacctcattgcactcatgcatcaaaatttagaacaatttgaacaatttccacatgaccatgaccatcctcaattatgcatattaacaacaaagaaatgagaaggttcataacacaaggaaacagcactgcaacaatgcaacaacaagaactacattctttataggccatgtttggtaatcatattgcattttaataaaaaataatacaatattattgtgtttggttttacgtgtattattagataatggcatattggctgcaaactaatagaactatacattttgttacacttaatcccacaaattaattctttgagggtaaaatcttccaaaccttactttcgttgtgattttaccaatgtctatgtgtacaaaattgtacacgtataatgtttcaatttgtccacataattttaactattataaaaattaattaaaaatttcaaaagtgtcagaatattagcggtaaattagctagaaaatagggtcaactgtaattatttcatttcctattttctctccaactttcctaatttagtttctctaaggttgtataaatatatgttatttacatgaataataaacacaatttcattcacaactttctacatgatatcagagcatctcttaagattgaaattcgaaattcaaaattactgtttatcacaaaattggaatttttttaattagggtttgatattttttttcttttttaattttagggtttctttttcgaaacccttacttggagtggttccttgttctcaccgctagcaccagacgattgcctaaccattcaaaagccaaaccccaccgtccgacgatcgatatcccgtgtgtgggcttctttcttcaagcaccaaatgggtcattgattctggtgctaaagaccatatgacagatatagcttattttctaatcttcaacctcacgcttagtcgatgggtcattatctcgtgctcttgggtctagtacaattacacttactccaatgcttcctttgtcgttcgttttacatttacctatcagtacaagggagattgtacactattagtaaatttgcatctaagaatgtaagagtaattgcagttcatgtcctttactaataatttgcatctcagtcaatttactcgtgatcttaactattgtatctttttttttcttgatcgttgcttacttcaggattttatgacgaagcaaactattagtaaaggacatgaacttagatgcctttacattcttgatagaacaatacctaaatcagttgtttgttctagtgtacaatctcccttcgaggcacattgtagattaggtcactaatcttttcctctgcttaaaaaattgtccacaatatagtaagttgtcttcgttagattgtgaatcatgtcagtttgctaaacatcatagccttagttcaagtcctaaagtcaataaatgtgctagtgttccttttgaattagtcaattctaatgtttggagtcctcctatcttgtctaaacttggttttcattattttgttacttttgtggacaattattctcgcgccacttggttgtttttgataaagaatcgttctgaattgttctttattttactgtcttttgtgctaaaatttaaaatcaatttaatgtgtctattcgtactttgagaagtgattatgccaaataaatacaaacatggtttatttcaatcttatattttttttttgaaaaagagaaagaagccattgtctaagactgacccctccccc

SEQ ID NO: 164007 - DNA, 799 bp, Cannabis sativa
tcaatctgtgtcggcattcttttttaaatgaaatggcacattccacactgatttacaggacgctgtactgtacatgagcaacaccatatgataaatttgatcatatataacgaacattaaaataaaataataaaagaacgacaatacaaagttaataataaaaattattttctcaaaaaaaaaaaaaaagttaataataaaaatttatatggcaattctgtcggtatataatacgtacatattgactgaagttggaccatgcatttataagattaattcatggacagtactaatatataattctggtcgttaatgaatggtcgaaagtcttttatatattaaatggaattaattagaagaaacatattaatgtatcaacatcaaaggtaacatatttgggccaaaaatgagtcagacttttctgaagctgagtcactgtgacgatttatatattaggcacgcggaatggcatgctgtacaattatatcaatgtattattctttgttgcataattatatattattgggaactagtgtgcctataaatgacaattaaaattagttaatggtatttattaaaagaaaattcttattaagtatgattagtgtctagtactttttaaatatatcattttgtgattaattagtaaatatttttttttttgaagggaaactgatatagactaaaataacaaaggtaacaaagttatgcaattagaggaggattttcttccatctataacagttcattaccttcagagaactagacaataaaaccataatataaaaaaaaaaaaaaa

SEQ ID NO: 164008 - DNA, 1470 bp, Cannabis sativa
  modified_base (1404)..(1416): a, c, t, g, unknown or other
caactgtgtcattgagaatgtcatagattttcaacattcttgtcctcatacatccgctcaaaatggctgagcggagcggaaccataggcacatttttgaaatgggtctaacctcacttcctgtagcctttatgccattaaaatactagtgagactcattccaaacagctgtttatctcataaatcgtctccccactctagtattgaaaaatcagtctccttttgaaattgtttactccaagaaaccagactataaattccttaaagtctttggagtagcatgttatccttgcatctgaccataccagtcacataagttccaatttcactccattaaatgtgtgaatttgggatatagtgagtcccacaaaggctacaaatgtccaagcacaatggggagactttgtatttctaggaatgtcattttcaattgaaatgacttcccctttagatcaggtttcttaaatactcaacaacttgagcaaactgtcaaagttagtgtccctttttggtctgctgcattttctcccttatccaagacacaaaatccaacccaagctagcaccagcaagcaacctactgatttttcccttgaaaaggcaccatcttctctaatacattccagtcctaatgatcaagatcatggcttaactatcgatttagttatgccaggtacttcatctcacacttcaaaaaccagtaattgtgatttagagtgtactcagaatgtagagagaaatacaacccatccaatactcgtggtatccacacatccaatgattacacatgccaaggctgggatatttaagcaaaaaacttacattggtgaagctaaatgggactgtgaaaatgctaaaccagtcacggttgaagaagcattgcaacatcctcggtggacagcagccatggatgaggaaaactcagtattaaagaaaagtaaaacctgggtgtcagtgcctcgacaatcttgtatgaatgtcattggaaacaagtgggtgtataaagtgaaaagaaacgctgctggtacacaccagagatacaaagcctgcttagtctcaaaaggcttcagtcaaaggcctggaatcgaatttggagagacctacagtctggttgtaaaagcttccacagcccggattattctctcaattgcagtggcaaaatcatggaaataaggcagctcgacataaataatgcatttctaaatggacaacttcaagaaaccgtttatatggaatagccgcttggttttgaggacaagaaacatccggagtatgtctgcaaacttactaagtcactatacggtttaaaacaggcgcctagggcctggtatgacaaattgaaggcaactctcattagctgcaggtgttgggttttgtgccccaaataaaacccattacaatctgannnnnnnnnnnnntagaattttgaagtgatttatgattacatgcatgttacatgtttatggtttaat

SEQ ID NO: 164009 - DNA, 2193 bp, Cannabis sativa
aaaaaaaaaaacaacaacaaaaatgataataattatttagcttaaattttaatttacttgggttgttgtttcaaattgattattttttttagtaaaaaaaaacatcataattaaaaaagagaggaaaaaaatagtaaaaacttgagaatggacaaaatacaaaaacaggggtaatttggggattttcttgtgtattaactctcaagccaaaaaagtatatattcaaaactttttttattatttaaatgaaataattagaaaaaaaaagattaaattgacaggctgacacttgtaagcttggcacaacgtgtcaaatcaataatgagtctcattttggggcccacttccacgtttatcccttcttttatttttcttttattttttttaagaaataataatatttgtcaaaaaataataataataataatttatttttagtattttccatcatgggttgcttagctgtgtaaaaaataatataatatataatttaagcaatggccttccttcctagacgtcttgatatttcactcacaatttttaaatagtaaaaataaattgattaattaaaaacattatttaataataataatggaagttatgaaagctagtgcttgtttagatctcaaaaataaataaaataaataaataaagagctaaattttcatatatggaaaggaattaatgtctctatggattctaaaattatggaatatatatattgattatttgtttaaataatttgagaaataattattttaatcacaatattttgttttgatataattagatttgagaaggggttaagtgtgctagtaaaaccccacattaagattaattcattaagttttgaatgattaaattaactagaaagttacccaaaaaaaatcaactaaaaagttaatatggatcaaatttatcactatcacatgcaataatcatatacaagcctacacatcacactaataattaaatatatgaataatcatacaatgtaaaattatgtagagatcttgaaatggaaccctaaggtcttcatgaaccaagcaatggcttttttagtaataaatttcaattagattggaaaaaaaaataagaaacaacaaaatatgaggttggatggtttttcgcaagtaaattgatagttgaggggattttgccgcaaattactcattaataattattattgatttattcaccatcttaaaaagacatttcgatacacccttataagacatctattcagcattcataaaaaaaatttgtaacttttttttatgatcgtatatattgtaactatataagataactataaatttttaaatttttttaaatagttaacaataccgaaaataaaatttaaatattttgttataagcatgattgatttttatatatgcgtgaaaagtaattatttgaaccttattttgagcattgtatattaattagaactttttgaatgtgttcctaactatattaattataaaatagtcaatccaatctaatcaaatccacaaagtgtggatatccacacttgtgcggattggattgaaaaattcaaaatctgcacttgtgcatattaaatgtcgattgaaatgtaaaagtaaccaatccaatttaattcacacatatttatataaaatttaaaaattatatacaattactatttcagtgtaaaaaaaaaataataatgtaaaactttaatacatataatacaaatatattttaaaatttaatagattaaatgttaattatttgaacaattttttaataaatattaaataaattaatattaagaagtaactaatctaatatagtcgattctgtacttttgtagattagattagatttaaattattgtgcagattagataagatccaaaatataaaatccacaatgcgaattaaatgcactatgaacaaaatattgcaaattgaattgaataaacacctctaacttacagcatatacaatcatgaaaaaattaaattaaaaatctcacataggagggaggtgtactacagattttctgttagcattttaaggatttgttataactaatatttttggctaatttaattagcaattttttcccccgaacatgtactaaatcatgctctctgaatttttttgaccgttaaaaattccccctgaactattaaaattgttaaatttaaggacttatatctaattt

SEQ ID NO: 164010 - DNA, 1503 bp, Cannabis sativa
aaaaaaaaaaaaaaaaaccgaaagtgtaatttataaaataaaaaataaaataccagagatgagctgattatcgtcgaactgagaaataggaacgaactgagtccggtccctcttgcccgtacaaccagtgcgttgcttgtgagctttgacgcagggaagactacaggagcgaatagaacaacctgggcatttgtattttgaatcattcaatttgcactcttcacataatttggagtcttttcttacttctctttcctccattttccgtctcagggtcatcaaagctacgagagggtttgggtttgaaggaaattggactagggtttatacttcatataatgcacaaaataaataacaaaaccgttctcaaaattaatctaaaatttcctgtttaagaaaattactgctgttggagatgggaaagttaaatataggatatttattccgaattatattattgttttatttatttttttcccatttagttaaggttttacttttaataaaaatgtaacataattataagttttgatttatttttatcgttttaataattattatataaaaaaaaatgaaaaatactttttaaaatatttagatattattcaaaaatgtgagtaaattaggaatcatatgaattattttaattttaaaaatagtttctcaaaagtctttgtagaagaagctacaaattctaacttcttctaaaaggacttctaaaaaaaattattcaagattacattgaaatagattttaatttagagcacaaaattcaacaaaaacttcttcagtcaagttagcatgagaagcaatgctagacttgttcctacactatcatgtcatatgactcggcttgctatagttgtaacacaaaaattgtgcagggtcattgcgtttaggtggaggtggttaccttcattgttacttcctattatggttctaactcttattattgtttcgaggagtgttgttgcggttagaattggaattcgagttgcggtttcaatttttgaaatttttgccattaggcttagtgttgccatttgaaaaaacaaacacttcctcttagtggtcttgtttccttgcttcttcctcaatacaaagatgcgtgattaaactctctaaggaaaattccttctcggttgaaggtttagggacaactggtttacaatagtgagaataaatgcgaccttcttcatggtcagatagaacaatatcttttgtttccaatacctaaaatgtaattcctcaaaataaaaaggcttgttaatatcgttagaagcaaaaccatagaaataatcgatagcagtcctagtagaacaaaacgtcttaaaactattaaaccaaaaaaataatttggaacgagtttacccattgataattctagctgagttgcgtactatgttgttttctttaagacgtttcgcaactctgtctgaagagtgtatgacaatctatcaaccacaatgttcctagcaggcccgaccctgggcataggcgggc

SEQ ID NO: 164011 - DNA, 1125 bp, Cannabis sativa
tccccttagccgagcttcccagatggcttagacaatatttttaggatttaattatttataataagggtaatttggctatattaaaaaatgtaaggatgacaaaatatatattcttaatgattaatattctattctttgtttttcaataattttgcagccaggaattttggtacctgaggcgttgggtttgggaaactgggtgaaggctcaagaatgggcagcagttccaggagggcaagctacatacttgggaaacccagttccatggggtactttgcctaccattttagtcattgagttcctctccattgcctttgtagagcaccagcgtagcatggaaaaggaccctgagaagaggaagtaccctggtggagcttttgaccccttgggctactccaaagacccagtcaaattcaaggaatacaaagtcaaggagatcaagaacggtacgtagaaatcactattggaccccattattgcctacacaaaacaaatctttcatacttaactcacataaatttttctaatcaattacatatatacagttaactcacatttttcaatttgcgtggtatgtatatataggacgacttgcattgttggctttcgtggggttctgtattcagcaaacagcttatcctggaaccggtccattagagaatttggctactcacttggctgacccatggcacaacaacattggagatatcattatcccaagatcgctttaaattaaaagttttaaattaatttacactgatcgatcacatgtaaaattccatgtatccattttgtaatattgaatccaaagtcttcactcttgatttgtttggtaattaatgtatgtgaagtgactaccggatattcattcggaagtaactagtaaggatctgtatgtgacctcatgcatatgtgtttaacagatctttattattactgtgtacgactaattttgttttctcgtttcatataatagatagttataaggctgcaggcacaacagagcaaacattggccgtcaactatgttaaatttagacctcactgtaatctttattattacagtgttacagatgaagtgaaaaggaaaaaaaaaaattacaacagaatacaacagaaatcagat

SEQ ID NO: 164012 - DNA, 844 bp, Cannabis sativa
agttgattgtgagacttagttggaacaaaatatttaatcacaaatataatataactaacatgggtacttctattgagtattcataaaatagttttaaaattggtaaatactaaataatgtaataatggtacctttatttgcatctaatctatattgtttgccatagactaatcatagtcaaatattcattgctttaaaaaaaattaaaaaaaaaaataattatagtcaaagtatgttattatttacttaatttttaggaatcatagctaaaatcaataatatttttattaatgtgttaattattttaatttataattatttataaattatagaaatactattaattaaagttataaaaaattaatatagtaaaactatataaatatttgaatcttaaattaatccactcaattaatcatagctaaaaatttgttgatcaatatttaatatatctaacattactcaaattatatatacatgtgtataattatttaaatattttttgttataattaaatgagtaatgattaattatgcatgcataaacatgatattcttatgggttattggcggtgaaatctttttttttttacatatttaaaaaatcagttaaatcacaccgttaaataccaattaaattgttactgtgtacacttttgtatacacgatatattctattagctttgatgtattgctgtcacatgtgcctcaaatgtgagacggtgacaattccagttaacatttgacagtgaaattttaccgacgcaacaaatttgtaaaaaaaaagtaaagttaagcggtatcagggacggacctagtagtatcaatatgggggctatagcccc

SEQ ID NO: 164013 - DNA, 1208 bp, Cannabis sativa
gagcgagcatcaagcaagggaggtctcattgggccgaggctttttcatggccttgtatctgcagcctcaacaacaggcgggagtagcaacaactattctacttcagcaatcagtgctgtctctgatagcatcaattcactggaaaggccaacaaaaaggcaacaactaatacccccacaggtattggttcctctttcgatgaagtcctcggtatcttattcaaactttttgactgctgagaaggctgacggaggaaggaaaaggtatgatttaggtgctggtagtagtagtggtagtgggaggaaaagtttggactttgacatcccagagggtagagtccatggggggcctctcatgtcattgtttggtggtaatctaaataatgcaattgatggggtttaaactgtaaaattgtagattctttttgggacttggagattattttggtgtcgaaaattgtaattgtgtataaattatggttgattgttcagtgactcgtatatattttctgttgatagcctctggttattctattaatgtaatgtttggagtcttgattcttgattctgtttttcttttcccttattttatagttacattgaaaaatgtttagacattgcttggtgctattagtttttttaatatttgtttcttgtgtgcatcaaatgactggacaagacaagtttttttaaacgtattggtaaaatttggtttacattattttagtaatttattttcaagaaagaatatctacaccattctaatattttcactcttacatatattagttctcattcagtgtaaatatttttacaaaatatctaaaataaaattaaaatgaaaaatgccagtataaaggtataacaacttctataaatatatattttcttaattcttatcatcagttgcttattcatctttttatagggttaagtaataaaaccttcttccttaagagcattttcaaggaaagcaattctaaaagtagccacaaatttaaaatataatattttattttttctatcatctacatcattttatagtcatttattactgaaaaatacttcaatattttacaactctaaaaattgctatcatgattccactcccaaacaatataatttaatatatcattcattttaataataaaatttatcacaataatatattaaaattcatatactaataaaaataaatattacatgaaa

SEQ ID NO: 164014 - DNA, 1614 bp, Cannabis sativa
ttgtatgttcttggttaaattgtgtttgatctataaagatgtctagtaagaaagaggagaaagctcaggttgcagctgatagaatcaaggctgctgcaatgacagctgcgaaaggtcttagtcgggctcaggccgaacgagcagctgcagcagcagctaggaatgtcaatgcttatggtcagaaagaagaagggccaagtagatggcaggaaaagagagaagccaagagacagatgtacttgatgagtaccgagaaggctgtaagattgggcgagcgaaaggatctcaagactaatgtggctactgttggtggtgcggcttcacaatgccaaaagtgttttcaacccgggcattggacgtacgagtgtaagaacgaacgagtttatatctcgaggccatctcgaactcagcagctgaagaatccaaaattgaagatgaaggtttcggttccagatgatttggataaccccgatattaaagaggaggaagaagaggagaaagtgaaagcaaaagtgaaaagcaaaataaaatctaaaaaaagcaaaaggaagcaccattctgattcgggtagtgatagtgaggcttctgttttcgagactgatagcgagtcaccatcagggacaggttctgattcttcttcagacgagagtagtactaccgattatagttcatcctctgattctgaagaggagaggagaaggagaaggaggaagaagaagaaacaaaagagggggagacgcagcaggtacaactcatcttccgagtcttctgattctgactcggcatcagattctgattctgatgatagacgcagcaagaggaagagcaagaggcacagcagaaagcgttaaccgagagccgagcaaggaaggaggaggacaagaacaaggtggagccatgtaattactttaggttcatgtttgcattacttattgacctaataatataaaatctatagatgctccaaatgtttgcagtagtattagtagttgacttcattaggcttttcattttgtttttgacttgtgtaattctatatgaggttgtaatgagttttctttggttgatatttttaatttttctgcttcattttctattgctatccattttttgaacactgattttcaggtggttttttacttagacttcttctacattatgtttaattcagatcctatatagtattgtgtgttataaataggattgttcttccatagttgctttaagtagaagtgtttttttttggctaatcatatttatttaagatgggattcactatttgaaaaatatgcaacaaaaaaattaagggtttttggtataaatactcttaggagaattttcatttttatgatttgtaaagtataagtttacaaaaatataattttttttcaaaaaaaaaaaaattttaagggaaaattttagaaaaaaataaaaaaaaaaaaatatggaaaatcctaattactataaaaatacctgattatttttacttgattttttcgtacttttaacattatcttcaattttttcataactttttttgaaaaaaagaagttatatttttacataaaaagtaaaaaaaaaaaattcataaaattgtaatttcctcttttaaaa

SEQ ID NO: 164015 - DNA, 5058 bp, Cannabis sativa
tttttcacctcaaatcgtatcaatgaggactgcagcatgcatttctgtcttcaaatctttagtgcccaaagggcaaagttcataccgaaaggaaaatatacttcggttctgtgtttctaatggaagacagtaaatgcttttatcattagtgtatttgtcaaggatggaattcggcatggatgggcttctttcaccagagtattctttttcagttgagtatttgctctccaacagcctgctttagaatccttagcgtttcaacattttctttttatattcttggcacacatagtattgtcgttcaaatatacattcaagcacatcaattaatacattgtatattggattgaacgacctattaattaattaattaatttattattattagtgaaattgaaaaatcattttcctcttaaatgacaattgaaacaagcaaattgtcatgtgtaagccatgtgtcgttttatgataacgaccttaatttcttacgttataatgatgtcgttttccctttagaactacatactttcttgacccaaagtaagtttccaaatggggataactgtggttgacccgagtttaagagacgttagttgcttatgctttgatcctaaaagtacaaaagaaaatatgatatcaccaaatggtaaagtgttatacacgaccattgacaatttcctagtgttagcggttacatattgaaagaatacgataaaaggcttactctaaaattgaagttgcacaagaaaaggggaaagatagagttgcacgaccactaacactctccatgtatcagtggtcgcatgacacatgactactaacactttccaggtatcaagttgcccaagtagaaggaacaataaatttaattgtaacaccctactagcttaagcacgctatactgtttttcttaattactgtgctaacttttgctaaccattgccaaccaaaggatttagtgtaaaactgtgtttagttaaatttttttaaaataatataaacttcactaaataagcataaacaacactgaagtttacaaattccgagattcgaatctaattttgaaatacaaacaaaatacaacatatccaaaagtgtccctacgactaacaaaatttgagtctatgtcgtgatgaagatctaaacactctaggtttaaccatctaaatatgtacaatcttcatccagctctaaccatctaaatatgtacaatcttcatccagctctagactcactgcttttaagcctttgccttgcctttacctacacataaaaagcatatctgtgagtcaacattcttgactatagcatgattgaccataatattagtctatatccaatactctagtcgtactgatttgataacatcagtccatactataagtacaactaacaataataccacatgcacttagtactctaggcgtactagtgttgctagcactattttgtactttctaaattgcctaaaatatatcccgtcgatatctaatcacaactatatgtacactaataccgcttatctaactagcaaacataaaatatgtacgctaaaaatatacatatgtgcaggtgttataccaatcttacctcaactccgcaatcaggtgtaccggtcaacttgagtggaagtttttgctcgacgattagtggccttaagtcacaatcacatagaatcggtaagtgtctcactaaaaaatttttggagacttaaactcaaaactaaaaatttccctatcaataaatagtgtggcaatatcctaaatatcgagaaaacgttaaaattggagtacctaaaaatcacccaaaccagttacctagatccccaaatggttcaccatatcttagggtcttgcccgggaaaacggttcaccgtttctacagaattggtggaccatttcatagtagaaaacataaacctcgagttttcttctttaattctaccccaaattttaacaaactttccagaacacctaattacagcataacaaacacaattcaaccaaaaacgacatcattaaagccctgaaatcaaaatcactattattgagctaagttcgagttcaaaaactcaaactatattatagctacaagacttccacaaaactagcacaaaacaatcttaattcaatcccaaaactcaaatcaatcatccccaaatattaacataagcagaataaaaaactcaagcattaaaaccatgcttttccttccaaaatgaaaaagaaagtgagcttaagggtttactttgttctttcctttgaatgctctacttaaaccttctaaaatcattgttggaaatggatgaattactcattaaaatttgggttttattttgggttgagatgaggccgagagagagagagaggtaggtaggtgaggagagagagtgatttagctttaggtttttgtttttatcttaatttgtattttctaactatactactctaattaataaatcaacttgtaacataaaataaatcagcttaataataattaaataaacacaaatagaaaaattccaaaaatgctcttacttggtttctaagtaacctttaaagttaggagtaaaatgataataactaattaccccacacaatttttatattctaattgtccataaatcttgccgtgctatttttatgatgctaaactatatctaagtgacactaaaggccaaatcatcgaattctactgttgtcgagcttaaaacaagaatacaacaaaattcataaataacatccatgacacatctagaattcaataaatttttataattgagaaattattattatcccaaattcaatctgggtgacgtggcacatttctctgggtgacacatatcatcgcatcaaagcttgggcagaggaaaaagcctgcaaaatgtccgcccaagatatacactcagtcgaatgtaataacagatgaaccaagtatagtttgtcgcacaatataaacatgagttgacctagtcggaaagaaatggtctgaacatcatacgatctgaccaaggaaaaaatgcgtgatagaagaaacttaatatagtttcctatttaatatgtaataaaatctcaatttaaaaggatttccatttatatatatttctcataatttaagaatgtcatttatttcctattttcatggatcgacagctttcgagaaactaatacctgttgtaaaaatctcctataaatagtggagcaattctattgtaaaaggatctcaaatcattttgtttgagagagctattacgctgctcattttctctgtaaagttttcgagagaaatcaaatctttttttcctctctactcacaagttaaatacaacaaaaaggagagtaaattattatcagaataataggactggacctctataacatattgtgttcttagttttgcttactattgattatattctttttaaatcttattgatttcttgtcgcttttacgattcagtgtcgttggccaaaagcgaggtcaacaattatttctctaatgtctatttctaacaataggtcttattttctactatgcacacataatcttaaaataataattaaattctaaataaattgctatttgtttactaattttgtgtataaatatgcgggcattacaattatcccctcgttaaatagattttgtcctcaaaatctaacctaaataagtttagatattgagccctcatgttggaatccaaatctcaagtgggttcctccaccttgatgttcctccagagtactttgactgatgctatggtcttgttccaaggaacatatcctttctatcaaggatttgaactggtttttcttcataggacaaaatctagctgtagctctaaagctttataactcaaaacatcagttggatctgacacatatttcctcaacattgatatatgagagacattatgcactgctgacaataatggaggtaaggctagacggtaagctactctgtccaaccttctcgagaatctcaaaaggtcttgtaaacctagagctcaaatttcttttctttccgaagcacttcacccctttcattggtgaaacctgtaggaagacatgatcttctacctaaaactctatgtctttggattttggatagggattcaagccttgatcttttctatagcatcactggtcctctaaattgattctggacccaaatactttccttccccaatttcaccccagtgaatcgggtaacgatattgcctccattacaacaactcatagggagcgatccctatagtactctgataactgttattgtaagagaattctatcaacgacaagtatttattctatgaacccttaaagtgttggttttactttttacatttcacattagagtcgtgaaagtaagaataattggattttataaaatattttagattgaatctgacatgaaccataatcccaaaatctcaacatgattacataaattaaatcttaactatgtgtaaaagaatattacctcttgatgcctatcaagctatcctcgattcttttgtatatattttcgatcacctaatccaaaagcaaatatgaacttgttaaagatttcacaccacaatctttcagatcagcctcaacactcaagataatagtggacttatagaatctatatatttatataatgcttttgttaggtagatgaagtggcatgttgtatgagtttttttctattttctttgaataattggactaatagaattaatatgataattgaattttctgttatagtgtgtactcaactcatgagacactataacatgagatgagggataacaccaatctctagagaaagagagagagagatgcgtggggtagagagagagagatggtcatgcaactcgtttagggtttaggaaaattgtatcattcatttttttttgtatatgttatattgtatataatgaccctaaaaaattatttattcatattatgtatatatcatatatctattctatataaagtgtgcctacataacagaattcttggtttatgagaaattcatgggtgacttttaatttattattaaaaataaaatg

SEQ ID NO: 164016 - DNA, 1600 bp, Cannabis sativa
ccgatctattgcagctaatgtttaatattgttgataattcaatcatactagttcagttttgagcataagcccatttaactatattatgggtcgcaaaattacaaagtctaaaaataaaagagaaattacatcccaaaaataaattaaggagtctattacattgatacatgtagttaccaatactctaattggaacaggttccctgaagcgttttgataactgtctcaaagtcgctcacaaccaacaaaaaatggtgcttcaaggaaactgtcgcctccaaggctaacaagcaaaccgttgcttcgccaataagggtatcagagaagctcactctattggtggccattcacaaaatcgttcctaggtggtctctagctaactccaccacacacattgctcattccccaccttcgcgtcacaattaattttaatccaatcttctgagggtggcgaccaaagaagtgaggcaggaactggagaattagggaacaaataggagtcataatctgcataacaataactgatataatcaatatattgtttgatgttactcatattgttattatgtgccttgtcattacgggcttaccaaatcgtatccaccacaattgaagcttagaggaaaagcccatcaacattgacatccttcaacttcaaggcccatagaaactttatccaatcccaaacacgagcacctgaatcaaaaaccggcataaccctttaggggaatatctccataagtagaaagttaagttataattgagaaaaaggtgttccgtagtctcctctaccttacctaaaagagggcaaaagacatcttcaatttgtattctctaagctagaagagcttgaattagaagggcatttgagagattgctccaccaaaaaaccttatggcatttcaacactttgttattccataattttttccaaagggatggagccacaagggaggagcactgtcaaaagcttgaaccaagtaagcaagtttactatagaatatacttttaggttccttggtctaaatccaccggtctttaccctggctactaggcttaccccttttcagaatattacaaactgaattagagacttacagtcaaggaaggaataaagcttaaggagatctcaatctccattgtcttacaacaggccaacaaccttttcaagacccctagtgagattggccacaggactaggacataactctttgccatgaagtatccatgagtcttcctaaatatttttgtctttcccatcagacaccatcttacaaacccctttcttcataatctctctggctttcacaatattcttccaaaattaggagtccgaatttttataagtgcacttcattaaatgctttccttttagatactcggcacttaagaccctgcaacatagtgattggtgctcattgagcatatgccaatcctatttagctaagaaattctagttcatctccataattttttggaagcctaagcccccacaagatttggggaggcacagactatcccacgctttcaaatagagaccatgatttctgtaacaccctaacaagcataggcgtattacgtgattttaaacatactgtgca

SEQ ID NO: 164017 - DNA, 1404 bp, Cannabis sativa
ttgaatttttttatttacaaaagtgaattgtataaattgttccatattcatttttggttgttgtatagtaaatttatagttatcataaagttgatataatttctcatttttttttgttattttataattaattaatttacaattattgttgtgaggttgattttttcgcattattttttcttaatgaaaaaaattctatttttataattttgatatttaaaatcatatttttcagaaaattaaatttataaaattgtaaataaaatatttaagtcataaaattataaataaaacataaaaaaaaatcgctaaaaaatataatatttcaagtacttactaattattattttttaaacaaataatttcaaattttttaataataatataatggtgaaggatattattgtaatttggtttaatgatgggaaggagttcttgatacatgttatcataggagattaatgaactgtcaatcatgaatttgaatacctcacaacacaactccaaaataaataacaataaatacaaataatactatttagacattcaatttttcctatctagaattcttgataaaataaaaaatcttgataaaataaaattcttgtcaataattacttttctaaactccaccgacatcatggatattctatcaatttttaagtaattaatgtatagaatttaaaatatcattttatattcctaattttaattaaatatatgtagctatatgttctctttcaaattcttgtttttcttttaatttgaataaataattaacataatataaataactatgttttggattttcattgaaatcttatcaagttatatttatagtttaagtagtcaaaatatattatgctatatgtaagcaccattttaataataaataaaaaaaaaatgcttttatatggtatttaagcatactataaattacattgtatagaaagaaaaaaaaaaggaaattaaaggaagaaatagaaataatcattgtttcttcccaaattaacttacttttatcatttattatagtttggcaagtaaaacttaattaattaaaatgtgaagattagaaaactcatacaaatataatgataagtacacaaataaatcatcttcttctaacattagagtcatcttaccaaaatctagcactcattctataaatatcattgataaagttcataagacgtgtgaagaggttcgtggtataattagtggagatagattgaataatagttttaactaaaactgccaaaatagcttagagttttacaggttgtttggcttcataactttaaaatattctgttttttaaaactaataggtgtcgttaatttggcgaaattgtttaaaaacattgagttttaaaaaattaaaaaacagaaacatcaaaatgtt

SEQ ID NO: 164018 - DNA, 1183 bp, Cannabis sativa
catgatcactagagccaaggccggtatctttaagcctaaaatctatattggcgaggccaatttcgacttctctaatcatgaaccaacacgaattgaagatgctcttcgacaccctggctggtcaagagctatgaatgttgaaatcttggccttagtgaaaaataaaacgtggattctggttcctttctcagccacatacaacattgtgggatgcaagtgggtctatagaatcaaatacaatgctgatgggagtcaccaaaggtacaaggctaggctcgtggcaaagggatttcatcaaagacctggtttggattttgaagaaacctttagtccggttgttaaagctccaacagttagagttgttctcactctagccgtgtcaaagaactgggtaattaagcagctggacattaacaatgcgttcttgaatggcaccctcaaagaagatgtctatatgatgcaacctccaggatatgaatcatcgactcatcccaatcatgtctgtaaattaaccaaggctatttacggcttgaagcaggcaccccgtgcctggtacgatcaattcaagaacactctcaaagtgtggggctttgaaaactccagagccgatacctcattttttatcctgaagaaaccaaaatatgtcatcatgctactgatctacgttgatgacataattctaacagggaatgactctgcagagttagaagaattcatcaatcgactaaacaagtgtttttcacttaaagatcttgggcctctaaattacttcctgggcattgaagttttcagagacactacaggaatctatttgtcccaagggaagtacattggtgagttacttcaaaaggtgggaatggctaatttgaaaccgagtcccacacctatggtggcaggaaaaccattgtcaatcactgatggggaatctctgaattctccaactgactacaggagtttaattggtgcattgcaatatttaagccacacaagaccagatatcacctatgccgtaaacaagctcagccaattccttaaggcgccaaccactgctcactggaatgctacaaaaagagttctcaggtatttaaaagggactatgtaccacggaattcatatctcacctagtgatcacttgtctttgactggtttttcagatgccgattgggcatgctgcccagatgac

SEQ ID NO: 164019 - DNA, 848 bp, Cannabis sativa
aattaaaaaatggtcaatttccaaaagatcccccactaaatccatatttgatttctttttctttctgtaaagtatattttaacaaaactatcaccaatctcgtttcttcatttctagtttcatctttgaaagtcaatgaaaaagtagcaagtaaaacaagcaaaacctcaccttcaaagaaaaacgaaatattctcggcgctttcaaagaaatagtcatctgtcaacttttgctgtaaaggaaaccaaaagaggattatagatgattatttccctcacctaataaatagttaatttggagtgagaacgttaagtaaacctggtttttagtagagaaaatagaggcggtggttgagtagtcaaactggtttagcaactctaccattctcttcctcaagctctccacttcgtcagtgctcgcaaacgattccattacaatataacctttcaattcaattatgaaataaaacaattaattccaagagagaaagagaagaagaagaagaagaagagttttagggtgaaaaatagaaaagaatggggagttgattgggaaataacggttaccatcggaatggaaggagtggagctgggccggagtgagattgccgacgatacccataacgttaatacttgcaattgcaaatgcaattgatcgaaaccttcaccctagaatttgactagcttcgtaaccagtaaccgtgtacgtacagaatagcagaatatgcttacctagtattacttgcaactaacaataaatagtaatggtagtgttaaccaaatattttacatttaaaatattaaataaaggaaaatttgaaattctatacataataaaccccaatactt

SEQ ID NO: 164020 - DNA, 1414 bp, Cannabis sativa
gctgagaagttcaaacagtttcctaaatttggcaaagaacaaccagccagtggtaagttacaaaagaaaaattaatatctacagaagtaaaataaaattcgtatgagcatggttatgaaattacttacttgtcatcgtggaccggtactccccattcctcatcatgaaaagcaatatagcattgatctatttgaacagaccaaaagaaattaaaaacttgacatttgagaaaagttataaatgctaacatttgaaagcattacaagggggaaaaaaaccccaagtaacctaaattataaaggaaagaacaagaactcaacagagcatcacctaagtatgaaaacagaatcttctccagtttttgaaaagatgcttactcctatactatacttcagtttcaattccatttcaattattaaaagccaggtcaatgcctcaagaaacatatcagactcttatgagttattaaacaattttatgcagtgtcatcctttacaaggcctcatgtcatctaagttcagccaacatggtacattgtttccttcattatcatcttagaattttgagaaggctgtatcaatacacacaggtttcaatacactcccattgccattaatatcataaacagtctttccatttacttaaaaatacaaaagccaaagacaattatttattttctatatgtagaacttcaaaagttaattattgaaatgcataaactaaatcattcaatccttaacccttttggagaaatcgttgtaagttgtaacttaacaacactcaaaggtcaggtccatttgtaaagtcagaataaagagaattgaatttggaaaaggaaaacccaacaaaagaatattcctaatttcgattgtagcacccctaatttctcatcaaacaaacattaaactataaaaagtgagattaaaagcacaatctttacctgtgttggaagtaatccaagcgcaccgtttcttgctatccaagcaatcattagaatccgaagataccgcattaccaccaaccttactgaccggagccttttcagtctcaattctctcagcagcagtcttcatccccaattgcttccgtctcagaggcgcaacaccgcgtctcgaagtcctcccactgttagatgaagaatcagaagacgaagcttccgacgaaaacgacgcattcatagacgaattgagcagtgaatggtggcgatggtggaggtcagccccttgttgccgcttcaaaatagtcggaaccttaacacattgcgacgcggaattgggcaaagctttcttcttctccatctcttgcgatggcttttccggcttcttcggtgcgggttttcgagcatcggcgggtctggcggcggcagtgttgttgttgttgttcccggccggtacgaggaccggtcgagactcgg

SEQ ID NO: 164021 - DNA, 2814 bp, Cannabis sativa
gcataaaacccaacaattacatcactaattggcagtacctgccttaaactaagacacatctaaaggaaaagaatgagaactaataaaaatcataactttgcttacaggcatacccatagcataagtcgttgctgatgagcaactgttattgataatatttacagaggtgttggccgttccaatattgggggtactagtataaggttcatgttagatttgtaacaacctagcttgtacgtgccagggggtacgatttctataatctcgtatggaccttcccagtttggccctaacactcctgtcgtagggtctttagtattggctaagaccctttgtagtactaatctcctaccttgaagcttctttccttaactttggaattaaagtatctggctaccttttgtttgtatgctgctaatcgcacatgggaagcctccctcttgctttctaacaagtccacccatcagttggtgattatcgacttggtcatatgtcgtccttcggtgggagggtgggtctatttcaactggtatcattgcatcgtacccataagtaagggcaaagggagtatcaccggttgctgctctttccgtcatcctatacgaccacaagactttgagtaattgttctggctagtttccctttgcatcttctagacttttcttcaaggtatccttcaaggtcttatttattgcctctacttgcccatttgagtaggggtgtaaaactgttgagaagctcttcactataccatgttttacgcagaaattggtgaacatggcattgtcaaatagggtaccaatatctgacaccaacttctggggcaacccgaacctacatatgatgttcttgaccacaaaatcaagaaccttcttggatgttattgttgctagtggttcggcttctatccacttgttcaaatagtcgtctactaccactgcatattgcacccctcctttccctttaggtaactgaccgatcaagtcaattccccatatggcgaaaggccatggactctgcatttgtgttagttcgttgggtggagcccttggtattttggcaaaattttgatatttttcacaccttcgaacatactccagcgagtcctctataatggttggccaaaagaatccttgtcgtagtatcttcttggacaggctttgcccctaacatgatttttacagaaaccttcgtggatttctttcatcagtctttgggcttggtcttgatgcacgcatcgtagtaggtgcattgagaaccttcaccgatacatgacattgtctatgattagctactgagtgacctttcttctcatcttatttgcttcgtttctatcggtgggcaatgtacctcaatctatgtaagcagctatgggggtcatccatgattgtgttgtatcaagtaagagtaccttttctttggtgttgatgcttggttcagacatgtattctatcagcacgaggttagccttgtctatctttgcactcgtcgccagtctttccaaggcatcagtggtagcattctcttctcttggtatttgttagatggtgtacccctctagttgggcgagtaggttttgtatattgataaggtaagccatcattttttctcctcttgctgtgtactcacccaaaacatgatttataaccatttgggaattgctgtaaatatctaagtatttggtcttaacctcctttgctagtctcagactggagattaatgcttcgtattctgcttctttgtttgaggaaggaaagttgaagcaaatggttgtatggattcgttgtcctttaaaggttattagggtaattcttgcccccgatgactgatctatgtagaagaaccgtcaacttgtagcttccaagtttctattgcctgaccttgctcttcctttttctctgcatctggactatgtgatttgagtgagccgcttgggtcaagcctttgggtgccaatgactgttaatggctggtcaccctcttgcactcttatctcagtttcaacatcttggaccccggtacattcaactacaaaatcagccaaggcctaccctttaatagccgaccttgattgataaattatttcatattgccccctctattgcccactgaaggatgcgccttgacgtatcaggcttctgtaacatttggcgtatggagtgcgcctgaaagtagggtcaaaactttcgaaacgctaatagtaagcagtagggtagcttttctataagggggtatctactctccacccctatcaacctttttcttacagagtagactgggtgttgtaccttatcttcctcccatactaagactgcgctgaccacatgttctgtcattgccaggtatatgcttaactcttcaccatctaggggtttagaaaggacgagaggctgggataattgttgctttaaagcttggaaggcattcctgcattcttcagtccattcaaattttttgttggcccttaagatgttgaagaaagggacacatttatcggtcgactttgagacaaatctactcatggctgggattcatcttgtcaagctttggacgtctttattcttagttggtgatttcatgtcaatcaatgcttttatcttttctaggttagcttcgatgcccctagagatcactatgaacccaaggagttttccagagcttaccttgaaggagcactttagaggattgagcttcattcgatactgtcttaagatctcaaaacattcctttaagtctttaatgtgcccttgggctttcttagagttgaccaacatgtcatcgacgtacacctccatgtttctgttgggttttatgc

SEQ ID NO: 164022 - DNA, 572 bp, Cannabis sativa
  modified_base (538)..(547): a, c, t, g, unknown or other
cacacatacctaattcctttctctaactcgcactattggtttcaaagccaaaccaagtgacatgagtaatatacatgcactcaattcttcaacttgctaatctcattagaccttaattattaaatcacaatcactttgctccaaaaatttttattattaattagtaacaatatgtttggcaggatggaatcgagagagtttacaggggaggtttttatttatttttattttcttaatagagtttagagggattgtttttttaagagaatactttgttattattagtttaagagataagtcattttacaataatagtatttcagtggaggtaaactcttcattcaagagagagttacatccaactctagagtatgttaagctaaattatgaacatccatattgatcaaacgttttacatgaacaatagtgactttagggagaaagaatagaatacgagagatatctacaattaaatcattaaaagaagaaattgtagaacaatgtgcatttaaaaacattctgtaaagtccttttttgnnnnnnnnnntgacaaaataatttttccttttatg

SEQ ID NO: 164023 - DNA, 1320 bp, Cannabis sativa
  modified_base (496)..(500): a, c, t, g, unknown or other
gttcttaggattgaatcccagtttggataggtgctgccacttcatctgtttctgcatgaggggcagataggagggtgaatgcagcttgtgaaagtgtcagagcaatgtaatactcttgtttctccccataaaccataatagaattttatgttagtgctcatacttgtgtgtgagggatcaattgagaagagtgaaaggagaacatctaaattttagtttaatctgccttcatgcaacatcagttcagaaatcagcatgtgaggtcttttaattttctcattatttttgcagagtaaagacaaaccctaaaaatgcaatcaatgaacactttttgccacgcttcctagacttcattgtttggggccatgaacatgaatgtcttgtcgaccctcaggtacagatcgcattggaatatttcttgtgtatacattagttttagcttgataatgccatgcatgtatttctatttgtcttctcaaataataataataataannnnnataataataataataaaataatgattgcttttcacaggaggttccagggatgggatttcacattacccaacctggttcgtcagttgccacatcactgattgatggagaatcaaagccaaaacatgtgcttctgctagagattaaggttgtcctctttgaaatttcaaatgcatatgttctagtaacattatgtataacaatgcatgtggtatgtaggggaatcaatatcgtccaaccaagatacccttgacatcagtgagaccgttcgagtatacagaggtaagtttcatattgtttttccatttatcttgtaaatcattcccttatgaattactcaattccaaattgcaggttgtattaaaggaagaatctgatattgatcccaatgatcaaaattctattcttgaacacttggattcagtggtctgttttccttttacatattcatgtgttatattaggctcagtcggtttcctttgttttggcaaattattgtcatatcaaaggtttattttatcttttattgggcttatgctgtatatcacaactaactgaataagtataaatgtctgtcaggttagaaatctcatagaaaaatccaggaaaaaggctgctaatggctcggagtttatacttccactaatcagaataaaggtaatttgtgacttcatcagaaatggtattgctatcaaatgtgatctatttttacccttgtgtctcctttagtcctgttttctgtcccatggttcaccctttatgttttgagaatcaaacaattatagcaatggagagggagggagggagggagggaggatgggag

SEQ ID NO: 164024 - DNA, 929 bp, Cannabis sativa
gggggggagggggggtgttatacatgctataacaagtttttcagaataagttctgtactatatttttgtagtaagatggacctagtttgcattgaattcattctgatactgtaatatttgagatgtgaaattatccaccttgtttgtcacagtatgtccttgatgcttatcgaaaaggcgataagttaaaatttgcaaaccattcatcaaatcccaactgctatgctaaggtatttatctccattcgagttccatctccactgattgaccaatgctctttcatttctagtttgagttttggtgagcaaaatatgttgctctatgtaggtaatgttggtagctggagatcatcgggttggcatttttgccaaagatcatatcgaagctagtgaggagatcttctacgattaccgttatggaccggctcaagctcctgtgtgggctcgaaaacctgagggatctaagagggaggaatcatcagcctctcaaggcagggcaaagaaacaccaatctcattgattggtaaacttaaattaggttataccatgaattattattgagtcaactctcacattattctatcataaggaaagcttgtgattttgtgaagttattctaaacctttatacatgagaaatgtcttatagatgaatatatgcttctagatatctattcttccaacaaattaatagtactattacatttggcaataagctagaaatttttactagcacttatcaaattgtagtttatcaatgtaaggtactacaaagatcatcgtttggtgctcttatacaataacggagacttgtattttaggttgcttatattatgaccagtcaaattatgctatcaaataactaccataagttatagaatggtgcttataaaatagggaaatttacaaaaatactggaatttgagtgaat

SEQ ID NO: 164025 - DNA, 1522 bp, Cannabis sativa
  modified_base (1236)..(1242): a, c, t, g, unknown or other
tatatatatatataaattaggaaacacaagcgaatgtgcagtttataattttttttttaaatcatatatgaaaatattatattttaaattttaataaaattaatattgtagaattctagtttctttaatattttgcttataatttatcgaatttctatatgaaaataatgcattaggagaaacaccgtaatttttttctagaccaccctatttatttatttttataaaaataatttcttttaacaaagtaatttaaaatactacctataataaattttaaaccttttaataaataattataaataataattaataagattgtgtatttagtttttaataaataaaactattaataatagtatgaataagataataaatttataattttactatacattagaattatatttttaagtaaatatttattatcatactaaaaaaaattaaattagccgcgcgaaaaacggctatattgcctagttatatataaattgtgaaatagtaaaaaacatctataaataatgtgggactaagcataattttattaactcttacaaatataacatcatattttgtttgaagtcaattaacaatagtataacataatattgctatcatcaatgttttagtttttgatgcgaaaaattttctattccatatatataattgtgtacctgttagtcttttgtgtgtgagcggggctaagattaagatcacaaatataagatagccagtctcgtcagccttgttgtgagaagtgggaataatgacaaagttgtttaatgtgtagtgctagaagaacattcaataccttctgcaacattattgtaagtataacaaacatcattataaaaaaaaaattgaaaaaaaattatttcagtatggatttcaggcatagagattgattaagatgttgtaataagaagttgaacatattactctaatttctaataaatattttggtttgtgtgaagagggttactgagagcaccttcaagaatattttttattttttagctaaaataattaaaaagttaaaatatagagccatttttattaaatcttgctccaattatattccttattttatttaaatttttacacttcaatatatatatttttgtatttttacagaattttacatagaaactcatattgcaactagcgttgcaacctaatttgcaacaaaaaatcgtacagaaacccctattgcaattagcgctgcaaccactttannnnnnnaaactgtaaatttgaaaaaaagaagttaaaaacatagtatatgggctaattcccctttatttaataggaaaatttaattttttattcttacatttggttaaaaaatttttcctaaacaaataataactaatatttgtaggatatgaaaatttttatgatatcccttaaatacccccatttacatcacacccatttacacaatcggaccccctatcggaccccacatcagacacccatcggaccacccatcggacccatcagaccatatctgctaccaatt

SEQ ID NO: 164026 - DNA, 3259 bp, Cannabis sativa
  modified_base (3222)..(3222): a, c, t, g, unknown or other
atatttgatatacttattagtgacaatttttacaaatttttaatagttatgtaacatgtttatatttatttgtaattatgttaatctgtcatcaattttttttaacaacaatactgtgaatgatgattgtgttggattgatgctctttaatatttatataaatataattattttcaccactaattatacaaataaattgattaattaaaattatcgtattattctatcaaattgataattaatgatatattatttatgtaatgtgtctatatttatttatatatattatttttcattcttgaaaatgtgaagagttattgtatattagatatagagtttaaataatagatgttaatatattatttttatttttaattaaaaagtaatatattaattatttttattatatattaaattatttattatttgaaatttatatggtgattaattatatgatattaaattacttagatatgaattgtatgttgttattacttaattcttaattcaaataataataataataataaatttaatttaattcgattatattatattatatttttaaaaaaatatataatataatttaatttaaaattaggcccatgtataaaaatatctacctaattttattaatattttaaaaaatatatgtaagtttattttactaattattaaaataaataattaaaattatatattttaagaaaaataattaataaatttattcaaaaaaataaacagttaatttatttaacatttaattaaaatttacatttagacttacattaaaaaaaatatatatctagttttattaacacttttaaataattatatgctaactcaaaatttcgctaacataaaaaggatttttaacaattgatgaatctgtaataagttctataaaaatattaattataaaataaagataaataatttatttacatgattttgtagttaaaatctacatattccacgaatcattcttattcctaggttttttgtgtacaggatgtattttgtagaattttttttaagtcaggaaatcggttgtcccttctacaactcgagttttgctgtttataagattatgatagcagttatctcattcttaattaaaataaatttatcaaacgtgaacatttctcatatttcatatatctatcaattggtgggaataattttaattattatttaaaatgaataattgttattttataatttagatatccatcatgttttcatcgatcgagtagcttcattacttctcgaaaaacacattgagtgattgatgtatgttgaatcatgatcctcctagcgaataacagggattgattagcccttcttgctggtcgcttaaaagaatgaagtttggttgaagaatttctgtcctcataaataagctttttcaagttgtaaaccttatgcgagctcacttaaatgtattttatctcacaacaagctttctagtctgtgtaggttgtgtcttatttctcgtgatatgcaagatgagcttttttttatggcacattcgcctcgttgatcaccttgacatactagatatttgctgagaagatagtctttatcctttccctttgcgaagagatcatttaatattttgtacacctgtcatgtgaatagacccattcatttactacttgaaatatgagtataacattatatttgtcatattttaatgaaaaataaaatgaattattaaatttagatattttaagaaaatatattataaatttgttaaaaaaaaagtaataattaattaatagattaacgtgttagttttaatcgttaattttaatagaaaaataacatcaaattgttaaatcaagattttcattaaataattacactttgtatataaagataagggtaactactattttggaccttgtattttgtaaaaattacaattttgttaaatgacaaaatagatcatatatttttcaaaatggtaaaaataggaccctgagtttaatttttgaatattttttaatataatcaacttgaagacaatttctaacatgaacagatacaaaaaatataaacagttttgtcataacatatttagatcatatttttattaaattttattttcacaaaaaatcagtttatggtcttatttgtaccattttgaaaaatacagggtcaattttgtcgtttaacaaaacagagagtctaattggtagcttttgtaaaacacatggtctaaaatgatatttaccctaaagataaagatatcaatgaatattccaagaaaaatcatgataaaattattaataaattaaagaaaaaaaaatcgtcaaattgatatttgtataaacacttcaaaaaaaagggcctacttttagtgataacttttgagtcacaacataatttttttgtaactacatgtaacttgtaatcacaataaaaatttacgtgtgactaaaacataatattcagatacaagttgtcactaaattagttttagtcacaacaaatattgtggctaaaaatacatttagtcacaataaattttgatttttatgactaatacctttagttacaggttttttagtgacaacatagaaattgtgatttataattaatcacaacttttattgtgactaaaagtaagattttttatagtgaaaaactgatttataattatatatggaaccaacgacttataagcaaattattcttctgtttgccaaatcgcaatgtgtggccatccttatacaatgcaaatcatttaatgcactaagatattatataaacaaggggtccaagtttgagtttgggtcaaggttagagtctgggtcttaattagggttcggggtgagggctaacgtcgggggttggtttgggtctgagtaggaagctagcgtctaaggtctgggccaggagctagaatccaattgctgggttgggtcgggtctaaaatattgttaaaagagtacacaaatagatcatgattaaacaaaaatatttaaataaattttgaaagggacatttttttaattcttacttttttgtaaaaaaaaatgaaaataggtttacataatataaatttttgaaaatatttttatttttctaataaaaataaaaaaaactaattataaaatattattaaagaacgcaagttctagtggagaataggcttttttctctctagaatgttcaaggttcttgtgtacgtttcctactctggtacccgaaatnggtttttggtccacccaccggagtggtgtggtggttt

SEQ ID NO: 164027 - DNA, 811 bp, Cannabis sativa
catacaaacagtttgttctgttatctccgttattaaagactgatatcctctcttctcataagttcgtttctagagttgtaatcgtttatgataattgtttatttatttgtgtgatgagactatatactacattaaggattgtctgatatttgaagtgtgccatattataaattgtttgtgtgaatcacattattattattgagttcaaacagctatatatattatatttatttgtgtatctctcgattctttagtacttagtatagacatatgtactatttttcattcttatttggttggaggtaaacaccaaaaattaatacaaatactctgaactgtgaaaatggaattgccattaaacaaaattaaaaaataatgtatgctaataagaaacttttacataatacatgaaaaacattaattacagaaataagttaacacgcatttcatttttaaggtttaaacttttttatttacaaaaataagttcttcagtcaaacaataaattattttatattttttttaaattgttttatagttaatttataaatgccataagattgattttctaattgttttatagttgatttataattattatgaggttgattaatttatccttttttaattgtagttttcttatactttttattttttatgagaaaaatatattttgtaatattataaaactttaaattacaaaatttaaaatcgtatttctagaaaattaaatttatattattataaataaaaagtatgaatcataaaaatataaataaaatataaaaaaagacaataagtaaaaattgat

SEQ ID NO: 164028 - DNA, 1158 bp, Cannabis sativa
cattgttatttagctgtgtatatgcacaatttcattgtgtttattctgtatcaggtggctcaaagcctaatatggcagaccttgcggtatttggggtgttgagaccgatccgttatttgaggtccgggaaagatatggtagagcacacacgtattggagaatggtatacaagaatggaggcatctgtgggagagtcttcaaggataaaagaatgaactgtattcatgtaaagttcatgaaagccgggtctcgactctcaggttcgcttttgagtttgcagggtttgtgtcacttaactatatttatagaagaaagaacacaattttggagcaacattctcttttgatgattaatcatattgaaaattagcaaaattttgctataaaagtttttctttcttagaaagtgataccattattatcacagcagttaaattaaatttgtatgcaacataggaataaagaaaattaagatgtgggttttgtgatttagaataccccattgattcaaactaaatactatttgataattattccttgttatgagttacatgcaattatttgatgaaaattcattaagaagtggaatattttgaggtgttatgtttcaatgttcttatttggaaaatatatacaaagtgtttatatcattttggatttgtaatactttacaaatgagattgttcgttttgttttgtaaaaaaaaaagtaaatattacaagatcttgttttaaaatttttggtcattaaggtttatgaatatgacacaagtagttatggttgaattcttggaagttggtgttgcaaaagtggtggcattagtgtctcgagggtaggcagctcggggggtctgcagcgtggtgacttgtggtgccgagggttggggattgtcggaagaggatgagtgagggttgtggatgatggctcattcaagagccgagcattggtgtttggtcttctttgccaagttccatggcaaagaagaaaatttaacttattagggttttagttgcttctttatagtgttttaacacggttggttataataataataataataataataagtataaatagtggcataagtacgtaaagttttaagtttgtaagcggcataaacctaatgtttattttcagcggcataagtacccaatgtttg

SEQ ID NO: 164029 - DNA, 1432 bp, Cannabis sativa
ctcaacctcagctttaactaaggaaatgtaaagtgaaaataatagaacatgtaaaaatgtaaaggtatatttactaattataaaagttaatgtttggataaatatgtaattacaaaattattggagaaatatattttatatttattatttattttgaaaaaatatatgtaattgtaaaatatatattactcatttcctagtagttttcgtaattattagttcaaatataaaataattaattttgaattagtaatgtccttattttaaattaatattaatatttaaattttgataattttaaatttgctaaaaaacattttaaaacttatatttgtaattttacaagctatttcaaaataaaaataaataaataaatcttagaagttaaaaaagaaatatatctatacatacaaatatttatatatgttgaagtaggaccggtcctatgaatatatggatctaagatgaattaaatatggagccctaaaaaatattgaaaaaaaatattataggattcaaacccttaacattctataatatgtcatacacctcaaccaactaaattatgaatatttattatttatagtacacttaattttactttaataaaagcctaatgaaatttattatttttattttgggcccccgaatccgcctatgcctacggctggccttgtgtagaagtatatattagaattaatccgtggtaggattttcctctctttataacctagccgtcagagaaccttgattgcatctggtcaatctggccgactcttctatggacttgggtagggctttggtcgggagtaattgttatggcatggggatctcagtcagactcggtatcctatgtgagtttctattgaagtacctttccttttccttttttgtttgatctcttttgggacggtcatgagtgttgtttaatgaatcccacttgactggtttggtggttagtggcagaggcgcgacatgtcattgcttattctgagatggtgtgtggtgattttcgtttcaaatgtcaatggggtggcctccggtcactacaactcgaagaaatggtggtgggttgcaggtaggagtttgggttagaggttattggagaatattgtcttacatggattaaatgtaaaaatattgagtcatatataagaacatgggctactctaggggtgagcaaaaaattcaagaaaccgaccaaactgagtacaccgaccgcccgaacaccaaaaaaaccgacaccgaaaaaaccgccttcggttaaaaccgccttaacatggtcagttttagtgtcaatggcaaaccgatcgactaaaccaagaaccgaccgaacatatatattatatataatatatattatttttgtacatatttaatatgcaattttattaaactagttttactcatattttttttatttaaagtctca

SEQ ID NO: 164030 - DNA, 1306 bp, Cannabis sativa
atgatggagtacaccattacaaataatataaataaaattaaaaagtaaatgtgttgaaataaaagcttaggaggtttagatttactaaaattgccaaaacttggttattttcaatgcgctggtatagaactccaacgatattgtgaggaacatagttgcagacaacgggaagggtttcctagctgcactctttgttgttgattattattgccttcgcctcctagtcactaattattatcgccattgcttctacctgtttgttgctaattttaaatttgatgaacagttgaagtattttgaaaaagtgaatacttttgtagcaaaagggaaaaaatcgatagcgcttgaaaaatgtagtatttcattagtgatttatttatccttatggtttgtgacatgagtttgaattttatatttcttacatgaaaagaactataaatttttcaatatactcgtcccatgcaatataagctactaatgcatatttttttctaaagatagttcgccaccaaattttaggctttggaggcattagcctaggaccgagctagagtctcacactcattcctagtatatctagtggactgtgtgagtttaagaattgtaaataaagttggataccacatgtaaacacaacacgtaacatgtaatgaatcaaaaaggaaaaaaaataggtacatttttttgacatgataaatagagttacacatgactaacaatgtagcaaaccacaatcggcggtagaacctcctcgaactaggatagcttatcgtctaaccgaagggcatgttttgccaaatcatgagctgcaaaaatcttatcgcgattcacatgagacaaaactatctctaaaaatgtagacaataaagctatagcatcttcaaatagcacccccatcacattgaaaaaaactttcctataattttcataataaaaatgaatatacaaacttaaaatttaacacacaacccataacaccaactcaaaaaactaactaacaaattttcaaagtatactagcaccctattaaaaactgctgaaaataaataacaaatagattaaatttaaacttaaacttatcggtaaaattttctgtaattgtaggccctccacaaaataacttataaaatagtaaaaaataaaactccattaccacacaatataataaaaaaaattaatgtgaaaaaatgatgataaacaatccatattaaagataaggacttaataagacttgaaatacttatctattaaaagtgaaaaaatcgttgaagtagaaatcatgagcacaaaatagattaattctctt

SEQ ID NO: 164031 - DNA, 4213 bp, Cannabis sativa
ttagatcctgtataggaactctattaatgacttagatcatgtatacccttgcccgatactcagccccttttaaaagctttgtctggtacgtttgggttgaatcatccttgactagtcaatggcctttgattcataggctatctagttcatgattcttgactttcatactttgttgattataaaagtataagagcaagaatcatgaacgttcattcactggtggaggcatcaactggttttgggtgttatctagttgggtgtccctttgctcttgatctgtcttgacatatttttgcaaatgcgggtcatttttccttatgaggtattctatttcctacttcaagttattgcattcattagtgtccagaatgtagtctgtatttaaatgatagaacttggtggtatccctttttctcatgtctttcttcatgggaggattttttggtgtggcaccataaactgggtagttgcaaagattgtctctatatcctctgctaggatggtaaatgttgtgaacttcaaggcattcttctgaggatgctgttcggagttgccacttaccttgcttttctttccattaccctgtcagtttccattgtttgatcttttaccaccttgattcaagctgctatgattttgttaattatgatctagttcgacggatgtattggctgcattggtgtgttgatttttcttcaacctaattgtgtccacacgccgaactacttctccgagctttataaatttgtctgctcagtctgagaattctaccatcgaccctataagaggtctttttatgtctttccatagttctcgtagaggttcaatacctcccaggatcgcgaccaacctcctctctttgatcaactctttcgcttttgtagcttcagtcataaatcggctgatgcaagctctgcagggttcccctggtatttgttttactttgacaagatcttctaagtgagatggaagctgctcagaagaggagtattgtgcatgatactctgacatgaaagaattccataaattgaacttccctggagctaatttgaagtaccactgctaggcagcctctgccaaagtagctgggaagattctacaccgtagaatgacctctcatagtttgttagtccatttgcatttcaaaatatttaatgtgagacaaaggatcttctttgcctgtatacattttccatactggcatttttaacttgggaggtaaattgagagcattgatttttggtgggaatggtgatctctagtctagtcaagttctagatgtatgagttttgggtcggttagacgttgaacgacctcttaacctaatctatttgtgcttgcactaatggatcaacgtaacctgcctgttgaccgacctgtgtcacatgaggatctcctagaactggattgggtacatagttatttgtattatttggttgtatggtaggaggaatgtcctgtccatccaatccccttctatgattcaggtcattctttaggtcgtgcacggttcccaattgatcgaaagctgatgcgttggggggtctttgtgcttcactattgtgaacattgggttagcttgatacctctatctgaggacgattgttaagctaatcactatccaagtaacgagttggtgaaacttattcatctaccatttggcccacagtttgactttgtggcctaggattggacggttcgttaattggggtttgccgagtgtgattaattgatcatttttttggcccttgctgtggcctaagaggaatgtaagcatctactattggttgctggttggtgacctggtagactctcttgataagtcaacaacctacttggaacgggcatcaatcattacttgctcagctcacatgatctcatctctcgatctctccattcttcaaactagcatcttcattcaaaaaatgcaaagtttatagttgctctgttttcttgctgatcatgatgaagagtgttattgtggccttgaattttccttagagtagctagcaagttctaaagctcgatgttatcattgatcgacctttgagaaattgtaccagatgggatctcagtactaggggtggtttgctcgattgtagcattggtagtttcttgcacgcctagagtgaacccaactagaggggttgttactccttgacccacaatctgtggacctgttggtggctgatgattgatcagggcggggtccatcttggctagatcacttggaattgcaggcgtctacacgtttcgatctgtagccattggattgggggaatcagtcttatttctcctctgtgtttgtacaaacatcctgtgtcttaaaaacaatttaagatagagattaatgtttctttgttctcaatgaaagcaccaaaattttgacctcgcttctagctaatgacagtgagtcaaattaaagtgattgagaataattaaacaacaaaatataaataatgaaaaccaaacaaaacaccagattttatagaggttcgaccccttattgatgggaatagcctactcccctttttcttgtattgacttgtgagaagagtgaacaagaatgctttgatctctctccaaatctcttatgatgatctctgagtaatttactcttagatctagtttctctcttgagtgttttttctctaaataaaattcgtgtccctaaatagtgagatgagtcatctatttatatggattaattacatgaaattggtttccctgaattaataagaaatataatgagaaactggcttaattttcataactacaataaagaaagtgcaaaacttaggctgattgcctttattctctaaagacaaaaatctatcctataaatgtaggaattattctgtgaattgcaagcttgcagatatatttgatatatctatgaaattgctaactcacaccaccccctggttggtgcatgcgagcagccacctatggaatctggtcagacatatgtgcatactgtgcttggatgtcacaacttctatttgtaaccttaagaattagtccttcctatatggcttgctaagagtagaatcatccgtctaggtaatgaaatatttttccacgtgtcacctagatggatgccacatcataaggtgcaaaaatttgggataacaaattccttatgcattggctaatgaactctatcaccgaaccaattcttggacacatcatcaactatcactcatgtactgaggtatggagtactttcaagcatctatttgcaccagatctagggccagacttcgacgaattcggaacctccttcaaataacaaagaaaggatcattgtccattgaagattacatactaaagatgaagcaatatgctgatgctcttggaaaaacttcccaatccctaataaaagatgatatgatcccgtaaactcttggaggattaggaagtgaatacaaagttgtggtggtgaatctaacctctcgattagatcctatttcactctaagaagtccagttcatgctccataatcaagaaatgagaaccagttcaggcaaatcttgcaaacttatttatgaacaatggatctcaaaggccaatccactactctagaagaggctatttttgtccttatagaggaggacaaagaaattaaaaatagtaatagaggaggtcgaggcaacaaacctacatgttagctatatggatgagttggacacatttttgtgaaatgctatcacaaatttgatatcaccttcaatggagatcaacaagcaagttcttccacctcccaccactcttcaacaccaaattcatctcatcgagaaaatatctaaggtgaactccacaccagacatctcaggcgaatggtatcttgatagtggatcaacacatcacatcaccaatgaatctcaacacttaatttagtccacagactacaaaggaaaatataagtcattgttggtaatggatcctttcttcctattcatcatattggttctagtttagtttttcaaaattctttaaatatatctttactgctgcaagacattcttcatgtgcctaacgttacaaaaaatattcttagtatatcttagttaactaaagacaataatgtcactcttaagtttgatgatgggtgttgtcttatcaaggacaagacaaccaagcaagtgttgagattttatgccctaaataaaaccaaattctatataatcagatttactaattaataaaatat

SEQ ID NO: 164032 - DNA, 2139 bp, Cannabis sativa
tttttttttttttttgttttatgaacaataaacttaaattttattgaaaataattagagttgagtacaacataaataaatgatagaaaaacattgattcaaactaattcactatctacttatagtacgcgcacaactaattcatgagcgaccataaaaattatacgacaaatataaatcagagacgtctcaagtgggggtattcatcggatccaatttgcactatttttctcataatgcatcagatctgtactatttttgatccaatctaatttgcatagtaataaaaatttaatccaatccgcaaaagtgcagattgaatcgattattttaaaatagttactttttactattaattatttaataattttttaaaaaataattctttttcgcatagctaacaacaaaataaaataaatcattgttgttttatatctccaacaacaaataaaacaaaaaataacaaattcaaagcaagaataaaaaaattgtatgtataaagatgtttaattttgttttagattatatcctttttatgaataagaatggaatatagatttaatctactatattttgaaatatatttatatcatgtgcatttgatttttaaattattattttttacaataatatattaattgtatatataatttttcaaaatatatataaattagtaaatgattcgcgcttcacagtggatatttaaatttttttaaattatatatataaaataaattttatattttatgaaataaataattaaataataaatactgtatcaattttaaaactttactaattttttacataatttttctgtaatattatgagaagttaggtgaaggtagatttgacttgtatttacaattttttattttataatagaagtccaacacgtcgtatataacaatatgtcaagcttatgccacataagtacgaattgtttgtacctagcccatgtctttagtggcttcacccatttatgttaagtgggtaggttatttttgttattatatgagccataatatgaatttatgaaaaaattgatacttttctctattttcaaagcacattttaatttttgaagcataaataataatattattgtaattttatttaaataatttattttttaaaagaaaatttatataattttgaaaataatatatataaatagctaattcaaaaaaatttaaactctaaaaaatattaaaatttttgtatcgattttatgaagaaaaaaaaccgcaaataaaaaaaaataaataataaaaaaataatatactacaaagatcaagtgtcattaaaaattaataataacatattaaagaaaactaatttaattattttttaattgtactttttgctaaaaatatatattttttaaaaatttgtaaaaatagataaataataaaaatagataaatagcgttagagaaccgaatcatcatacgtgcaggaaaagtctaataactaaactaaaattatgctaacataattcttttttgctagaaagtataaaaaattaataaaacaaatattttaaattaaagctagagttttaagcattacaataatttaaattgatatacaatttaattatactcaatcaacttaatagtttttgtgggttatttaatctatatatataaaggaatgcacaagacaatgtgaggtggcattctaagaattcatttctcaatgtttttttttttttttttttttttttgtattttttaagtaactttgttaattttaactcaataatagaaagttctttaggagaagcaaaaatcccacatcgtttagaaatcattaagaatgttgtattctaggctatatgaatgtgtttagtaatttttgtgaatattgtataatgggtgattaatagtattaatctagcccacatagttatttttttttttaaataaatatacattattttattaattatttaaaaatctaacaaatgaaaaaatttattaatttatttttgaaattaaagttttttttaatttttttttttttaatgttgacaaatctatatacctatatatatattagattattattacgttcattgcacgtatacttaattatagttttagtttttatttttgttatgtgtatttttaaaattt

SEQ ID NO: 164033 - DNA, 806 bp, Cannabis sativa
  modified_base (749)..(760): a, c, t, g, unknown or other
ggcataaaacccaacatttttctatttttgtatccccactaaactagtgtgcctttgagagtatcaaaccaagctcttagggcttattttgaatcatagatttctttgtgtaatttgtaaatatgatttggatattcagtgctaacatattcttgtggttgggccatgtacacatcctcttgaagtttcccatttagaaaggcattattgatgtcgatttggtgaatttcccaaccatgggtgacaaccatagtgaacatgattcttattgtacaaggcttgacaataggactgtaagtttcaaagaaatcaatgcctagtgtttgttgaaacccttgggcaactaaccttgccttaaacctctctacaaagccatctacattgtattttattttgtacacccacttgttctgcaccacaaccatgtcacttgttctaggaaccaacttgtttccctcatcgtcaaaaggtataatacttttttttttctctaacgttatgtttttagaattagttggattttggtgagggagagaaatagggaagaaaaatgtagtaaataaaattttttttctcagatttgatatggaaagaattgtatgaaaaaaaaatagataattacacaaggtactgttttttgcaaaaaaaaataattttacgtttaaagattttttatatatttttacggttttccttaaaaataacatgagtaacatgaaaataatatctaaataacaacaaaaaataannnnnnnnnnnnaaaaaatcaacaacaaattaacgagagcaccacataaaaaatcgta

SEQ ID NO: 164034 - DNA, 1809 bp, Cannabis sativa
gcatgtaatggatcttcttgtggctcggcaagcagcccaatccgagttagtataggcctcgagtttcactttagattggacaaaaaaataaatccccggacctagtgtgcctttgacatattgaagaactctttgagcagccacacaatgtgttgctctaggcgtttgtaagtattgacttagcttgttcatcgagaaggatatttcaggtctagtaatcgtcaagtacttaagctttccaataaattttctttaaaaagtttcattagcaagtttatcatctttttcatcttgactaagcttcaagttggcttccataggggtactcataggcttactaccctaataacctaagtcttctagtatttagagagcatagggtctttgggttatgaagatgccctgttcaaatctttccacttctaagccattaaagtatattaactttcccaaatcctttgatttgaacttgctatccaacctgacttcatatgattctaatgcattccgcatgttgctaactaatatcacatcatcaacatagcctagcaatgctatgaaatctttcttagaatatttgatgaaaaaagagtgatctgctgcagaatacatgaactcttcttcctcaaaagcaactaaaaacttttcaaactattgccttaaggcttgctttaaactatacaaggactttttaagcttgcatacaacattgcaaggtagctcccccttaggactatacccttgaggtatagtcataaatacctcttcatgtaattccccatgaaggaaggcattattcccatcaagttgaggtaaatgccatttaaaaacagttgtaagagctaaaaccaattttactgttaataacttggtgacaggagcaaaattttatgagtagtcaatgcctttttgttgactgaaacctttagcaaccaatgatctagtcttatacctctcaatggaaccattgtatttgattttgtatacccatttgcaacctataacatggtgatgggttgcagaataactattatccaagtttagtttttctcaagagcttaaatctcattatcaatggcattatcccattttgaaataccagttgcttggcagtaaaattcaagctcataatgacctgatatggagcaaatgacaactcaaaaagtgggggacaacctggagtagtcaagaacctgagacaaatattgaattgtacaatcattagcagggtaagaattagacaaaaaataatgataatcttgaagatagaaaggtttctgagtttttttaatgggtctagataaagatggaatagaatcagaaacagatggtggggagccatcattggattcacaaatagaagcctcactgagaacattaataggtgtctcaataaaaaaaatgtgatatgaatctggtagaccttcagaagtgacaaaagaaaaaatatattcatcaaattgaacatctcttgaacaaaaatttttgttagtttccaagtctaatagtttgtaggctttcattctcataggatatcccaagaaaatacaagaaacaactcggctgagaactttgatctattttgattcaatataaagacatatgctaagtatccaaaatgtttaaaatggtcataggcaagaagtttcttcttcaaaatctcaaaaagggatttgttaccttgatttgggattggtactctattaagggaaatttgataatccatgctaaaaaattagacatggtgtttaattatacctaattataacacatagaaaaaatataccaatctttcaattttcttccaaa

SEQ ID NO: 164035 - DNA, 684 bp, Cannabis sativa
tcgtcgtcacggccagcgccggagttaaccacatcgacgttcccgagtgccgacgccggggaattgccgtgaccaatgctggtgattcgttgactgaggatgtggcggatatggcggttgggttgttgattgatgttcttaggaagatgtcggctgctgatcggtatgtgaggggagggaattgggttgctcatgggaattttccactggctcacaaggtaatcaactcattttcatctaacaataatacatggttaaataaaaatatatatataataagtacttacgtttcataaatgttttatgttatgttgacttccttttacttattattatatccattaaaatgggcacataattaaatgtagagtttccaaggtcaaataagattttagtttagtttttttttaagaaaagaatagatttttcttcttaatatgtatatatggtctgttttaattagtttgattgcattctaatatccaattttgctatgataaataagtacaagttaagatacttaattttagaataagtaaataagtcacagtaaataagtaatatttatttttctagtccattattaatttgggcttttttcataaatttacaacaaaaacacataattacaaaaaatgtgcaaaaaaaaatttattttaaaaacttatacattttgaaaattta

SEQ ID NO: 164036 - DNA, 850 bp, Cannabis sativa
tatattaatcatcttcaatattattcttattctttcttctcatgacaacgcaataagcagtgttcacattccccaaaatcaaataaataccaagaaaatgaaaaatgaggcctactaagttaaaatctatctggaggaatcctcataaaaagttaaattgtcgtgatatattcaccatataatttattgttagtttttaaagattcttcgtcacagatatagaatttttattttgtggggttttaattatttatcataaaaaaatatgtttacttatattataatcactattactatatttatttaattttgtgaaaatttttctattatttcaatcataattattaaattaaaaaaaattacgtttaaatttttaaaagataataatttttattggtggaaactataacaccacatattaatgagtggatagtgacatgtcataatgaaaaagacaagaaatatacaatggtgttataacctatttactagtgtcttgtgtttacattagatcgaaaaataactaatttttatggaaagataacctggctagatagtagaatttctgaagtatagcattgtaaattggcataaactcaaaagaatataaatagggtaaatacttgacttttatccatatttagtgccttctcttttttgataatggtcaattggcatcctctttttataaagataaatgctaaagagtactagtaatacttagcatcttctcatgtgtcaatattgctattgatctaactaaatattgagtcttatatagtttaatgtaataattttaaaagagtatcgctagccaatcacaaagcaacacgtttagaaagtgttaagc

SEQ ID NO: 164037 - DNA, 768 bp, Cannabis sativa
ctcataactaactctctgtcttaatgaaggagaccatacatggttccaagatctcgaccttctatacataagatcagccgcacttctcaaagaaggagctttatatcgaatggattccatagtctctctgaactccccataatattcaaccaaggattttaaggttgccaccataaatcagtatcttgtccattagatagtcaccattcttcctaatagatagagtcttcattctccacccctctagacgatggtagagtttagatttcaaaaaatcaaagtcttttttttttccttttcctagtaaaaagaaaagggattaccaagataattctcatcccccgaaatagagccaatacccaacttcttctcattatcaatttttaggattgagaacaataacttgagaagaagatacttgacttttttttactacattttaatctagaccaacattcaaaggttctaatacatcttccaatgttcgcagcctccgtagtaccattagctctaaggatgaggataatatcatcagcgaacatcaagtgggatatagatggtgctcctctagcagaataccatgaagacaactctggtcttgctccctagtaagtgggatatatctttagtgacaatattttagtcacagtatacattttttgtgactaatgtgacttttagtaacaataagaagttacttacactactacaatgttagcctttagaggcagttttttcaaccccatttataaaaagggaagctaaagg

SEQ ID NO: 164038 - DNA, 1034 bp, Cannabis sativa
ttttggaaaagtatttatgattatcttttagaaaaataaaaaattatatgtattttaaaattagtaatatgatgtttttattaattatatctgcagcaatatttatggcaatgtgtctatttcaatattaaatagtataaattagattactatcattttcattattcattgttttcctcaaaatttgaaaaggatcaaacttgggctaacacaggttaggccccctaaggccttattagcccaatagcccaatatgtttatttattgttttgttacggacccaatttataaaatttaaatctaaaactatggacaaaaatatcaaggttaatttaataggtttcttctatttagttgtctttttctcattagaaaaaaagtctatttagttgtcctttacatatattcagagtcatataacatattgtttctatgataatatttcaaaaaaataataataataaataaagctatggagatgcttttacaattattttttagattttgttgattttattatattattgtacataggcagggctctacttattttatttaacatgttaggatggattatatgaatgtgataatgataatgaaagtgtcccacaatattgaaatcaaaatgtagatgtgagaataataattcactttatttattgccaattaattttgtttaaaaatatatataaattatagatcttaaagttattagtaacacagaaaagaaaaatgcatgtctctcttaaaagagtatcggtatgtatgtaacagtgcttatgtatgtaacagtgcttatgtaagtgtcatttttcgtcccaggtttttggtttgtttgtgagtggtgagtcttgattctgtctgacccaaaggtggttgtgccgtttggtggtgttcgttatggcatctagtagctatgtaatgggtgatctgactgaacaatatgagaattttcagattgatgatgaagaagagggtgttcttattgaaggggaggctgatggtgatgaacagacctttgatgatagatggtg

SEQ ID NO: 164039 - DNA, 2174 bp, Cannabis sativa
tttttttttttttatcaatttattgttcggatttatgcttagtatttgcttttgtgtatttttcaggtgaaaagttgggagatcttcgtttttttatttattttggtgttcttcaagcctttttgagatgaaaatagttaattttgaggaaaaaagaaactttaataatgcttagttggttcttattgcctaaaattggtcaaagcttacatttttagcttcaaaagtcgtagtctagagtcaagagtgattactttctaaaataaattgaaaaattctaaattttggatgttgaacacgctgcgtttgtgttcgaaaacaaaatttaatgcttcaacctaatttgactatgatctattgacttcgagaaaaaactttctgaaagaaagttctagatttcttttttagctttccaaaatatcttgaatcgtctaatttgaagttatattgagaggattgttaccaaaatagtatcagtcatcacagtagaaaatcagaaaaatgagagagtgtgactctctatccaatgttgcggctattgcgaaaaaaatgagaaacttcctaagttttgtctatgaaatgagttggagctatgtttcctttatcattcaaatgtagagaccaatttagagcattagatgaaggctaggagcataaggcaccattgaaggactccaaacaatgttctttctcatctatctttatcttttatgtttttaattgaatctttgttgttttagaatgacttttaattgctaattttctttaaaggactattatgtgaactactttaatttattttatggatgaatatagttattcaatttcatcttcttctcttaattcaattttatatactttgttttaactttataattatttgttggccatctataatagttatctatgaattcaaattaaaattttagaggtgagatttgaatatgctttgattgttatggatgtaaattaatttaggacgaaagtacctaggttgttttatgattttgttattttatatgcttaattctatctttgtaattaaacttaacatatgaatataaaaagtttttatgaagattagatttataagtcttactcagattataaacttcttaactcaacttatcaatttaataggaagaagagaatttggataatttcattaggaagtaaaataaaagatagttggagattataataatccttgtatttattattattttttttgccttgatttatatacttttctccaacaatttttattcatcaaatagaactaaaaaattaataaattggtaattgataatcaattctcgtgggaacgatactctatttatcattatattacttgtttcgattgtgtatacttgcatactaactttaccgaacaagtctttggctccgttgccagggattgaaaattatcaatatcagtttaattaattttatttttaatttgattatccttttattttgttaatatttttattgtatgagtttgtcttgcaaggtacatcaaaaaaatgttacatcaagattacgttgtgaattttttccaatacaatgagccattctacgctgtttgagggacgtaattaataaattagtagagagatgtcatcataatttttcaaggatctatctcactttattcattcacaattgattgaatgataaaatgaaaagttaggtaaattatggagcaaaggtgactggaaagccattgttaagaagaagtcatgatgacataatgcatttgttaaatgatatagatgattttgactaccactggcattaagaagaagaagaagaagaagaagaggaagaagttcttggttttatgtatagttgagcttaaatgatattttcatctacctttacctaagcctaacgtcataacttgttaaagtgctttcgattttaaagcatttattattgacattagaggagaaggttaaatgatgaaagcacattgaaaaaatggtttgcgaaattgttatgtatgagttgcgcatatctggtggagtctaaatattaggattatttgtgattcatattatttaattccctaattgagctttaaggttgaactttgaggcagttgagctaaaaatttgattaaaaattattattatctcaatttttgcactctgacgtggcatcacatgaat

SEQ ID NO: 164040 - DNA, 846 bp, Cannabis sativa
ataaaagctgatatgaatcataggatatggttagatatgaatatgataccatataatttgttaagaatatatattagtttaagttcaacatgggaaagtttattggtgtttaattatatttattttattctcatatcactatcactcaagcttgagttaaatacttttaaagaagaaaaactatttcacatattttattttaataattgaggatttataatggttggacactttacttaaaatatgtgtacttcttaaaaaaaaactaaaataacgtagctaataaaatatatgtattttgagttctatgttcaatgttgatataaaaatttatattagttgctggtctaagtcaaagaaagaactatatatggtcaatgaacatataattggatattagaaaatttttaatggtagaaacttgtttaagtcgttacttaaactaacatattattacatattatttagaaggtcttgaagatcaatttcaagaatttttatttttttttatttttgaagttggtgacacagtataagaaagtaccaaaattaaaaatcttgttgaaaagaataaaaaagagctgaaatataatacaaggaagaaagaaaaggaaaaagagaagagtattaaatgagctttcttatacaagttatctccaaagtgaatctatttcataactaaagttaagctaaaataatttagtgaattttgtgtgactaagttcaatcatattctttatattttgaatttaagatataaatacttatatttaggaaaacttacaaaaatactggaatttgggctaatttttacaaaaatactgtcacacggaaatcttttcaaaa

SEQ ID NO: 164041 - DNA, 1914 bp, Cannabis sativa
ccccccccccccccaattatgctatgattaatgtccaaaattttgttaataagttctccttatcccctgttcactttgttggaaataagttcacttggaaacatggttccacttatgaatgcttggattggggaattgctaatgacaaatggcttcatcattatccccaagccacccttcaccatcttaacttttatggctcggaccatagggttttaaaattagttttatttgatgatagtatgcgtaaagtgaaaaataaaagatttatttttaaaaatcattggcttactgacccttccttttttgacaatgttagtagctcttggaagtactctaatattaattctaataatcatcctttgttaattttcctcaataagcagaatacttgtgttaacgctattaaaaactggaacaaatcttttaataacttaactacaaggatcaataatattgacaaaaatcttggtgacattttgtcttctctttctgcttctaaggagacttttcttgaagtttctaatctctaatctcagttagatagtcttctttataaacaagaaattttttggaaacaaagatctaaagtttattggcttagagcaggtgacaaaaacactaaattcttccataataaagtctcctctaggaagaaaactaacttcattagggctctcaaccttgatgatggtaacaccatttccaatttggttgatattgagaatgaggtctatcattttttctccactctttttaattctcagggcagtgacagggaggctactgatttgctcctctccgttattaacactcagttaattgctcaataattcaacttgttggatgctccttttattgctgaagaaattaaatcggctttgtttcagctttcaggagacaaggcccctggttctaatgggcttaatgcctacttttatcagaaaaactagaataccttggggatgatctgtgtaaggcgattcttgatattctcaacaacaataccagtttggagtctgttaacagcactcttattgtccctatcccgaaaagaactaatgcctcctctcttaatgactttaggcctattagcttttgcacaactttgtacaagattgttgctaagactatcgctaataggattaagtctgttatggaggacattatttctcctactcagaatgcctttctgtctgatcgcctcattttttataatattttcatagctcaggaaatgatccatgccattagtcataggaagtttggtaaagttgggtgggtgggtctcaagctagatatggagaaagcctttgaccgagttgaatggaaatttctcttggctatactcaaaaaattcaactttcctgagaaaatcattaaccttattcacaattgtttatcttcagtatgtatttggtttaatatccattgtcatatttctaaggaaatcttcccttctagaggactaaaatagggggatcccttatccccatatttatttcttctttgctccgaaaggctttctactacagtttgcattcaggagagacttggtatatcaccggtttgattacacccataccatatctacctcaaaaatactcattcattatgttatataaccggttctatttataaccagtttgaattattttgtgttatttatttttattcattatgctatagaactgattctatttttatttatatttgagacatctacttctggtaacttttccagtgactttttttggtgacggtgacttttccggcgacacttagagcatctccaatggaggtgtaaatgagtggtgaaaagctaaaatatggctcatttaacaaaaagtgtgctctaattgtgtgccaaaaagtgatgtaaatttgacacatagcaaattttgtgtcaaattt

SEQ ID NO: 164042 - DNA, 3877 bp, Cannabis sativa
caatccattcttttgtgcgattcacatgcaaagatccaattcccttcccagaatcagtttttcgctcattcatttcagattcaggagtaatcattttcttgacttcagcattcgattcttccacaaatgtgctttgagcatgagccttaactggcaagtttcggagctcctccatgaaagattgagcggatatagacttggttgaagcacgatgagtagtaacatccatggaagcattaaggctacccatattagcatcatcttgcagaacaatcatgagaaactctgccagacctctaagtacttggtcaacagcttccgcacttccagcagctccactggccattgattttgaggcatgcaaaacttttgcaaattgactaacaactccaggtaagaagaaagccaaagcatcagccgtaccaacctgtaacagtacactaaatgaaattaactcgaatttccacaaaatatttaagagcttcaaacgatgggtaagcttatataattaagaattacatattttaattcactagatccaaagaaatataaaatatttgaaaggtaaaaaggaacactctcataacaaaattctagtgtacaataagcttacactccctatttctggatcagatcaaaaagttggatgtgactcactttccaattagacattttaacttttccttgtataactatttgagttagagagtagaatactaaattttttatgaatttgccacaaagataaagaattcttagaatcgtcaaggaagcaccttgttttaaaggaaagatgaataatcatactaagaaatagaatcaaaaaatgaaaccacaaatgggtgagaacaagcacaagaatgaaatattgtcaaagctccaaaagaattatcacttatcaacattaccttagcaacaagtactcgtagagtcataaaggcttcaatacgaaactttgcacttcctctatgtcctcgggccgcctcagtttctgcagcctttcacataaaatgaaaaggacattacaacttagtaactaatcaactttccaagttaattaattgttgagtagagaaatttcacatacttggagaagaagagatagccaatgtccaacagcagctgaggaagcttgagactgaagaaatgcaagtaaacaatcaccttgttctgagtcataatttgcagatctaacaggcataaatttcaaatctttactttccaaaagcataggcaaactaaaggcctgtttacaggtgcaaaactcatcagagcatgggaccaaactcaaaagtagtgccctgaaacacttcacaattccttcacggaactcttccgaagcatcagatggagaaagtagagccccattagtcaattttttcaagactacaaccatctgttgaaggagattagcacattagacttcaaatgaattaacacagttattaattacaacagtcccaaaggcaatgtataaacaatcatctgttaatacagccaatagaaagcatattacaaataaggtaaaatgatatttttcaacatatacctgctccacagaaccaagatgacacttaatcagaagttcctccagacactgaatcacaccttctgccacagaatcactcactttatgaggcactttagggtcataaaatgtctcaagtcttccagaatcaaccttctccagggatctgcaggcaactgcagcatccagaagaagcagcaagggaaacaagatataactgaaaatggtcaagaatacagttagccataagaatacagccaaaataaacatgaaagatgtttatactgaaaggggaaaagatcataacaaccccacagaccaagtttccattcactttttgaagtctttttcactagataagctcaattaatagataaaatttctcaatatgtgcaacttgggaaatgaaaatttatgatagtttaagattaaggttgctctcaacaacaattctagaagtacctgagctgagctacaggggcatacatattgctcatcaaaaaatcatgccgaacattgccattttccactaaaatcaaaataattaaagcctaaaaaagtcttatcctggtcaaatagcccgatcaataaatcctgaagtgggtttagagtgaagaaccagaacaaaatcatcaaaagtttactatatttctactggaccttccaagaaaaactaaacaaacttcaaatacccaaaatcgcttccaacacacgaaaaaacttcaaaatatttcattttatccatcaaaatgggcagtgagaatattatagtctgtacaaagcaatgaaatgaatctgaacaacattttacagaagtaggttgatattcaagaagttcaacgcatcaaaccatgagagactaacaaaatgcatatgtatcaatagggataaaggttgagcatgagtgtttagttactactaagtaataaactcactcgaagaatggctggagagcatcggatagagattgacgaaggaattgaagcaaggaaggtatagctggggaatgcttctttcggcgttggagaagctcaagaagctctaagcagtagggttttagcttctcaaataaaccgctttccattcttttctcctcatcgtcttctatatctaccgctggttcttggtaatcgtcgatttccaccattgttgagagagagaagtgccgcgaaccgaaacgagggaactctttcgtctggtttcttccagaatattgtcgtttattcgataatattgtcgtttatatattgctcttttgagacactctaatgtcgtttcttggtataccattatgttgtcgttgttttcatactttgtcgtttataaatggttttttttttaacgtcgtttataaatggttgtttaaatgtttatgtccttctttgacatttgaggcattttattgtcgtttttattatcattatgtcgttttaaatggttttgttttacgagatcatctaatgtcaaatttgagaggagcgcacgtttgttgtcgttttaattgttgtctaatgtttatgtcgtttttactaggtgtcttcataaaatagacaattcaatacaatttctaccatctaattcaatctaatttgtaaagtgtacatatttacacttatgtggaatggatgagattaaaaaatgcaaaatttggatttgtgtagattgaatattgattgacatgtaaatggtaaccgattcactctaatctacataaatttatataaaaaaaaattaaatatatatacaattaatattttaatgtgaaaaaatggtaattaaaaatctaatacatataatataattatatttaaaaacttaatagatcaaatgtattttgaattcttacatataattttattttctacatataatttaaaacaaaattaaatatttctttatacatacaatttattgttggagacataaaataacacttatttattttattttgttaaaaatttaaaagtattttttttataaatattaaataatttaatattaaaaaataggggtttttttatttttacacttcaaaatatttttctttgcatttttacaaaattaatagaaactcctattgcaactagccctgcaacctaaattgcaaaaaaaatcgtacagaaatccttattgcaactagtgttgtaaccactttagaaacctaaactgtaaatttgaaaagaaaaaaaaaagttaaaaaaaatagtatatgggggtaattcccctaaaaaataaccaatccaaaataatcgatccaatccatatttttgcagattggatttgagctattgtgcggattgaattggatccaaaatatgaaattcacacttagtgcggatcagatgcact

SEQ ID NO: 164043 - DNA, 1775 bp, Cannabis sativa
tttttttttttgcatttttaaggacatctacatagaaatccctatagtaactaacaaaataacctaatattgcaattaaaatctacatagtaacccacatagaaactaccggagcaactcaaagtctaaatttgaaaaaaaaaaaagttaaaaaatagtatatcagataatttttttatattttttaaacactcgtcacgaagcgcgagttgtttactagtgttatataattatgaataatcatgtcgtctctcctctttattcttggtatggaatacatgtctcggattgtggacaaagttgagactaagggagatttcaagtatcatgatatatgtcaggtctaaagcttaatcatctttgttttatcggtgatgtccttttttacggagactttatatcatcctaccggttgttacaaggactagaattattttcacagacatcaaaactatagtcgagtgaagaaaaatcaacaatttattattccaggatgaggcaaagtgaagtacagagattgttggatgattcggggttcactagaagccaattgccttttcattatcttggagtgtcgatatgctccagaggaggggcttttaatgtctgaatgttcaaacttgatagataagatgattacatgtatcagaacatggagtttcaaaaatatctcctttgcgggggaagtgacactcatcaattcagttttgatatccattcattcttattgggagaaaatcatgatgattccaaataggctgttgaaagaaattgtggcgatatgtcaagcttttctatggaaggagaagattgattaccaatgataggggtatgtagcttggcattagttatgtaagacacgaaaagatggtgatcttgatttttgaaacataatgatttggaacaaggtgcactacagaaaaaggcttatctcggcagccttatcttggcgggctcacgtgtcagcgtgtgcgtgtcgatataggtctaatttttttttttttttttttaaaaaaaaaattctaggctcgccgttattgctattttttaaaactttgaatttgagcaatctcagtgggctcatgtgtgcgtgtcgagataggcccgatttttttaaaaaaaaattgtaaaacttaaaatttgaccaatctcgacgggccaatataagccctccgttattggtccagccgtggttatcaataatggcaggcctatattggcccgccgagattggtcaaaaaaagcccagcccgcccatatgcccttcaacctttcttttcatcttctttccattacatcttcaaaaaaaaccctattttcttcccccattgagaaagtggcagacattctcccctaatccaaaatttcaagcaaacattgatgttctcttcttctatttcatcacaaccatttaaaaaaaaaggtgaacttaaatatatattaatttatttttattttttatattcttatcctaatagttgttaatttattttagtttaaaaatttagtaaaatattgaaatgttagcttgcatttgaatgttgtagattgaaatatgtttgggtaagcttcaataaaggaaccttgagaattgattggagcttcattttggtgagttttgattttttttttctttattttttttttggctgaaaatggtattgtttatgtaatttgtgccccctaaacttttaaagtcgttaaagatgctccctgaactattgagattattagatttaaggacttttgtgtaattttatttaattttactattt

SEQ ID NO: 164044 - DNA, 2209 bp, Cannabis sativa
aaaactacacacaaattatcaaagcaaaatcataaagccaatcatgcaattgttaattagacaagccaccaacaaactatacaagtaggtatcaaatttagctaacttaatgagattatgagcaaataataagctcaacaaaaacatcaattactgataaagaaatcaaaggttataatagtagcagtaaatagtagaagtataactttcttttctcataaataaagcagacattagtaaacatggatatatgagggagaagcaaagaaatatgaaaatgaattcacaggctttctaatcttataaagattttttgtttttctgttttttggtttttcacacacaaattcagtaaggctgagtaatattctgtccattctcaactcctaatccatacaaaacaccagcatatttcgtcatagaaccactaaagaagttctctttaagtttcctgaatgtacaagaagtaagcaaactatccgaacctgcctgatgacatatgccaactctttccacttccaacaactcagctagcttgttcaatccaccatgaaggctgttacagaacttcatcaagtgtttgatatcataaactgttgggaagtacatgttgattaagttgaagaaccctaattgggtttctggtaaatcctggcaagttaagagcttaagcaagtacccaaaatcatacccactatgaaaagttacccaatgaacattgtcattcaatacaatcccagatgacattagaagctccccaaatcgcttaacatcaatgccattttcgttgttcttcatgaaatcaataccgctttggcgcaaaagctcgatcgaatcgttggcgaaaacatcttcattgacattgaattcgcggaaattgaattgccaaatgcaatacttatctgttccgcaagtgggtaagttaccatcttcgtcggaaaatgttaaacccaattgaattaacttcaacatatcaacgttatccttcaaagtctggtaatggaagtcgtaactgttcttgaaatttcccactggacggagaacgattccgggaaactccgtatccatagcaacgtaaggatactcatccacgatttctcgaattaaagcgaactcgtcctctagatttccatcccaaacctcgcgaatatgaatcgaatcggatttcggcaagagcgacattccttgatagaacccacggaaatgaaaacccagaatccacgaaacgaacccaatcgattcgaggagatctgaaaagcaacaaatttcaacaatttcagctacaaatcgaatcaatatgatactaacacagataaaaacaaaaaaggagaaatttttaacagtaaaacctaaaaaaaaatcagggatttaaggataagttgaaaagtgacctcagatgagggaaaatctgagcattgagaaccgagaggatcgtaattagggcaacataggtgtagacagggaggaagaagaagaagatgtatttgtagggttttcaggcgaaggtggaaaatggaatcagattttttttttttttttagaaataaaaaaaataaataattggaggtggtgatttctaatttccttttcgtgattttacgttatgtttaatttttaatttgaccttggactctatttgttttgattaaatttatttactatttaccaatttttttattacaactttttaattaatactcgtacttaaaaaaaaatatatttcgatgtttaaaaaaatatatatatttcaaaatattattttatggtggtattttttttttaaattaaaaatatatgtaattttaaaaaaattaattaaaaaattataattaacagtcttatttatttttaaacaattatttatttattttgaaatggtttaaatttatttatttatttatatattttgtttggttggaaaaaaagataaaaaagtaaaaaggaagaagataattggagtggaatggtgtgggaggattgggccacctcattcatcactacaccagaacagttagatatttttattacattttgatattataatttcattattattattattattgttaaggccaaaaccgttagaattaataaattaaatataaaagcaatttaaggataagttaaattatttggaaaaacgtaaacttttttttttaaaaaaaaaaaattaagacaaaattttaaagatggagcaaccaagatcgga

SEQ ID NO: 164045 - DNA, 1277 bp, Cannabis sativa
  modified_base (1125)..(1130): a, c, t, g, unknown or other
attactagtcatcatatgaaaatgtttaagaaataacttttcttgtaagaaaaatcttatttaaaaaacaaaataatgatctagccaaaatacattttgaagatgagaattgcaagaaaacaaaatgatagcctgtaacactttcaagtctctattgggtatttttcaacgaatttataactcttatacacgggtatattacttttactgttttttggactgataactggaactacagatcaacacgagtattcactcatcttgaaattactcctagtcgagcacacttaactgtggagttcttttgtgatgttctactagaaaacaagatgtagattattaatataggtataggtagtatcaatcaatacatttaagccctcttcaattatgtagtcacacttgatcttttctaagcaaaataggatggcacaatttacccagtatttctctttatagatcacgggattactgactgtcacatagtcaacgtcaattgtgatacttttcttttggtaagaagcttaaatcattcttggttgggatctttttctgattgtgcatatactcttaataaaatagagttgccatgcatgtagtttgtgttttgatgattaaaaaagttcccctttcaaaaaaaaaaaaaaattgaaaatttaaactttgcaagaaaaacatcataagatgagccacacaacaaataaaatataaagtgggtataattgataatgtgtgtaagtgcgtatgcatgtataaaatcataaatattttctcacatgcaagttgacactaaaaaaagttgtgatttggtaataaagtttttaaccataccaaatttcacaatttaatgatgaaaaaaatattcaattctaactatacttttttagtcttaatcttatatacaatgagattatgagaatgatttttcttcttagaaatttatggtacaattttttttttttagttttccaatgataatgacattcttaaagtctcatatgatattgaccaagtgaaaaacaacattaaatataggctaattataatttttaccccccgaactttgacgtataccaaattatgtctcttgaacttttctagtcgttaaaaattctccctgaactnnnnnnattgttggatttaagaacttttgtccaatttagtagggaaaatctaacatggataaaagttcaggggacatgatttgacagatgtcaaagtacgaaggacatgatttggtagatattaaagtatgaggagtatgatttagtacataa

SEQ ID NO: 164046 - DNA, 2543 bp, Cannabis sativa
aaaaaaaaaaaaaaaaacatcgatcaattgtaattatttcgtaacttattttctctcctacttttctaatttaatttctctaagattgtataaagatttatgttatttacaagaataatatacacaattcattcaccatttcttacattactaaaattgatgtttattcaaaataaataaataagaggactgatattaatgcatcatgtatagcaagttacacaagaattaaaagtatctcaaatttcatcgaactgtataagttacatcaattcttgtgaggtaacataaagttttttgttttggaatcttgttagggaaaaaataatagggaaaaatgaactcctatcctatactaaatattatttatacatttttcttctttattgtaaccaaatatacaccttacaatttctccctttgctcccttacaaaatgaaaaaactctaattgaatctttctctctacagaatcatcatccctctaagatagatacactaaattaaattcagataaaagggtgacatcttagttttcttaagttgtatggtgcaccccaagtcattgtttttctttctatttccaagtaagaaattctggattcaaagctcttcgaactggaattcaactactaccagtttaccaacttcggtgaaaggctaggagagaagagtaactttacatgaaaaatttaaatctgctttgactttggctcgtagaaaagattaagaaacattctaaatcccaaccaatcaatcaagcagggcccttatgtacactatcaccagaaagcaatcaatctctggaagaaaagaaaaacaaagacagaagagaaagcaaaaaatttcagcaaaaactcaaaaatgaaaaattactatacgcactaaagctttgttagtgaacttactcatgggaagaaaccggggtttatgaagtgttcctgaatttcttaaagtgctggcttgttcttaagccttcagcatctcacaggtacaattagtttatccctgtatattcccatttgaagaagtaaactggaaaaattgtgagacttcacgataaagctgctcggcttcgaatggtttggaaacatagccatccattccccactttgaacattcctcatgcgtagcctggatgacgtctgctgtcatggctaaaattggcacatgccaccttctattttcataaccttccacaatttctccatgatgaacatgactgttaaaatcatcttccattgcacggattctcctcgtagcttcaaacctatggtgagcaaaattagtacaagacattattttatttggatgaagaaaaagagtgaaaaggtgcagggagttcttatgatactagaagactataacttaagagtatttgcccttaaatcatttctcaaatcaaaagcttaaaaaaaaatgccacgacagatcacatacccgtccatttcaggcatttgaatatccatgaaacatgcatcaaaattgtggggtggcttaagtaatttgagtgccttcaccccgctgtcctcacaaaccacatcggcaccatatctttttaaagcaccagcagccactttgaggttcacacaattgtcgtctatgacaagaatttttctccccttaagaagactgcggagagacaaactgggaagttctccattacggggattagctttattactaacgcccattgcacgttctagtgaagcagcaagcatactcgacctcaggggtttcgtgatgacaattggagcataaacaccgaaacttgaagtaattgctctaggagagccagtagaattcgctagaaggaatatttttggacgaacactgatatcatcttttgaaatttttactgcaaaagcctgagaccctgaatccctatcccaaacctcatgttcaacaaggaccatattaataattgttttcccactgccaatcatggacaaaccttgagttaaatctgaaactacttcaacatgaattccaagtcgctcaatatggtatcttgacacttttgccctgataggcctgaaatccacaactaaagctctcatcccctcaaattctgagaatgcagtattaggttggttgttgatttgctgactcttataatcggttgcattgcaacaaccattggtgaaaacagctgtaaatgtaaaggtagagccaatcttcggaatgcttgcaaaaccaatttccccattcataaggccaaccaaacacttgcttatgctcagcccaatacctgttcccccgtgtgtccgagagatagatggcccaacttgcataaatggagtaaaaacacgagattgggcttctaaaggaatccctacccctgtgtcttcaactgagacaatgagggttatttgatcagaggggaattgaaaactagatccttcttgactaaaatctctaaatcctctcaaactatggcgtctatctgcaacaggatatccactaaaagtgttctttgatgaggtttcagtctcaacatctatcgagtcaattacctcctcaacaagatgaactgtgacaaaa

SEQ ID NO: 164047 - DNA, 1139 bp, Cannabis sativa
taataataataataattccattagcaagtgtgagtacttatgcatgggtgtagaagtgaattggtgaccagctgtatgctttttcgtgtctatctatatatataattgtatatttccaatcatgtgtcaaaacaaaaaaaaaaatatgaaaaaaaaagagcgaaaaaagaaaaagcaaaataacaacaaaataaggagcatattataatggccaataatgcattaatgaaagcaatactgactttagaaatgtttctcgtgacatgtatcccatatatatactacatttgaaaaatgggaaattttttaaaataatctctgatatataatatggcaaaaacaacgtatatcagatgagatttactaataaaatggataaaatggttcctgctgtagttgatttaaaatcaattttgagagaggaatgatatgtatattgcttacaatggaagagctttaattatgtttgtttttatggcactgtgttttccttttctgttgtaattttcttataaatataagcaatcttgaatatatcatatataatatataaaggattcttgtgacttgctagcataaaactcacgtgagttgcacttcgggaaagtacattcacatgcaattgtgacaacagaaacaaaataaattcatttaaagtataaagttgagtgataggtgcctctggaattcatatagacaaaagagagagttcaagttggcaattcaagaatcttcatgagatatataatatataaacaacaatattaaatgcccagctagctagaactagaagtatatacattgttggtgtatatacatatatataatataaatttgtgtattatttcttttacacatctgaaagatagttcattaattgagagaatacatgatgaggacgtataacatagaataatatagtcatcactaccattgcaaaaatatatatattgagacacgattttattccggccgtgattgtacttacacggaatgtattccgtgatgtacggtagccgttaactgggggagttatttgatgtgagggctgggagtaatctagagataattagggttaaaaaatagtaatgtaccttgagacgcattattattacgtaccctgagatccatctaatgta

SEQ ID NO: 164048 - DNA, 2190 bp, Cannabis sativa
aagatgtggtcatgaataatgcctggtgttgtttattgtggtggttggtataagatgtggatgtgttcatgtttgtttctctatttatcctaattaataataataataataattaaaaaaaaaacataattaattaaccaattaaaacaaatgtacctgaggtagtttagtagctaagatctccttaaattgttcaatgagagctggtggtgtaaaattatcaatctcagcccccaatatctcaatgggaatattaacctctgtaagtaagtaaataaacaaataaattaacaaaaccatttaataaccttgttgactcttatatatttatatgtgtttatgtacttctatccaataaagctaagccatagaaatatatgtggtcaataatcatattcataaatagtgtcattatcagattatctccacttataactaatctaaaattgtttatttggttaaaagtaaagaagggtactgttttaaagctaaagctaatcatcgagaattgctaaagaggaacaatagtgtgattgcctatctatgaatatgattattgacctattatcatgattccaaacagaatttaggataatagtcataccctttatatcatccaaagtgacaagagaaggatgtaacagaacagcaacttcaatagattttgactttgcaagttcagtcacaaccttgcctgaaaataaaaacaatcatttttgctcattcttatatgattcaatattaatcaatggttagtaaacaactcactcacttaccaccccagcagaaaccaacacccccaattgcagaaaagcctttggatttgagagcttcaactactggttttgcatcttcaactcccttgtcctgtttcattaaatatgtttaaatggaaaagatagagacagagagagaccaaatagattgaattgaaaaggaatgtaatgtatacatactgttccatgatcttttagccattctagtaaaggcctattatctccattaatattgtaagggtcaccatagaagaagtcaggaaccacagcatagaatccagcagctgcaaccttgtccgcaatcaaccttttttttaaaagaaaaaaaaaattaaaaaattagctttaaaatgaacaataatattaatagagtagcaaaaattaatcatagcatatataccttatgtttggggcttcatatcctgtaatatcatcatcaaagattcaacatattaaacgttttgacaatagcatcaagtacaactgtaatataaatattttcgttgattaccaaaaatgtcagagatgaggagaacagcaattttggagtgatcagaggaagaggtggagatgtaggttttgaggccacccaattcctcaacgaagcctaatccgctgtttgggtccagagttggtggattagagcagcattgagaaccagccattgatttttctttttcttaaatttctctttcgttttcgtttcacaaaaaaaccaaagatatataaagcattgacttcaatgctctctttctttgtattaattttatatttaaataataataacaagggactgacccatatagaatggggcaggctgaaaaaaaaatagaaaaaaagaaaaaactctatacgtaagggaactacaagtctacaagtggtaacataaaataacataaaattattgttgatacattttaatttcataaataatagagatattggttgctaaactatttaaattttaaattttttaacacttaaccacaaaaattaatttttttgaagcaaaactacctaaattcccattttgtttttctatgtactcctctgtctaaaaattacagttaagtgtcacggtagactgtccacgtgtacacacttgtacacgtgacaagtggtccacataatattaattttaaaaagtaatttaaaaattataaaaaataaataaaaaattataaaaataaataaattataaaaaaattactatttttttccctttcctttttcttttcttcttcttcttctctaaaagcccctaacaaaccctaactgccggtgaccaccccccgaagcacccaggctagagccggtgccggagccatttaccctttctttctctctcccgatcttctccttcccaaacactctctttctctttctcgtctcttctcttctctcttctctctct

SEQ ID NO: 164049 - DNA, 3102 bp, Cannabis sativa
  modified_base (2030)..(2031): a, c, t, g, unknown or other
tttttaaaatgatgaaatatagataatagagagaaatgggtatttagggttattacttactctgtcatatttttgttgagtaccaaggttggcaattccaccacataaaagagaggtaccaagaacaaggagtaggtttgagagtatggagcctaagagagagtatttgaccacctcaattttgccttgggctaatgcaaatattgctattatcatctcagttgcattgccacatgttgcatttagaagccctcccactgcaaaattattacattcacaattataattattaatatattcaataaaacagtagcacatatataccttattgattcaaacaaaaccatcaatgtatgtgtttttgtcttaaaattattaattaattatggtcccccatggccaaggatatatatacatatatagatataagagatttgttttgttttgttttgtttattaaaaacaaagaaaataataatgaatattaatatggtcaaaattgttatgtcagtgtttataaccacataggtaaatactttatattttttcatttttccatttttaacatcattgttgtgctaaattcaagaaattattgcttttccaacctagctagctaagcacatatatatacgttactgatgaaaaaacgtcttaataattacatgaaactcttaagaatacacttgacatgtggttgtgggtcttagtataattatttcggttttagaatttgaaatagaataaaatttaatcccaaattgtgagccatgtgttctttaatttgtgtaattacttaatatttccatatataatttacacatatacataaatatgaatttttttttgaattcaaaattgctgatttagaggaaataaataatatgagcctctcattaactgatgtagtgtgtatcaatatatatataataacacaaaaatcattactcttaaattacaatcttgataagagaattacaaagtagaatatattttttgttttgaaatcaagtagtttgaacattaattccacctgatatatataatatttattgtatcataattatattttttagtatggaattaagtcgatcaatattatgtttattagttattgtagagactgaataatatctcctcggatcctattttgttcgactcaaaaacaaaagcaaaatcatgagcttaaatcatacctgttggaccagtgtaataagctatttgtctgaaaaaaaaataagaaaaaaacaatagatgagtttttgatttattattatttcagatcatataataatttaagcaaaattaaaaaaaaatatatcaatacaaaaaattcatgaatatatatttatatatatagcttactctgtgaggaagctgacacgttcagccaatggagttagtccaagcaagctcaaagcaaagacccatggctgtaatttaaattcaaacaaaccccaaaaagcgttacaattaatttatttatgagcttataagaaaaagtaacgtatttatatttatattatatatatatatatatatatatacacgtactcttccaaatccaaaagagtgagcagcaatggctaaaggaatggcaggaaagagaatagaaagctttgttcccaaaatgacctcttgaagattagccaagaaggttctaagaagggcacaagggactttagacacaagtttaatgtcagatttctttctaagagaagaagatgacatgttgtgtgctgttctcccatgtcttccttctctgcttagtccctttggttgaccattttccatttgccatggctcttgttggttaattgatgtattattattattattaattaaatcaaaattaataataataatgatgatgataatataattgagagtagtagtagtgtctatgtgtgtgtgtgagaagttagagagtgaatacactgttatatagatgcaaagtgagtgatcttccacgaagtttctctatttattttaattataatatattgaaaaaaaagatttatatatatatnnatatatatatatatataactgttgtttgtaaacttaaaaaggagaaaataattaagagagataataaggtaaaaaaaaaataacatgataagtttggtaagttattaacttattatttttattaatggtttggatagtaacgtataccaggtagtgtatcttattagtgattagggatatatagcagtgaaaatgttgttggaattcactaattaatagcggtttgttatgactttgtagaagtgttgaacaatttaacatgccctttagtattaatcattgagtaatatatgaatagagattttatttagtatggagttgtattgtattgtgtgttagattgtattgttttgtgttgtctaaaattaaactatctttaccataaagccgaccccaccctgcatcccccgaccctacaccctggacaccgactttagactcgaaaccctgagccccaaccttggatctcaacctcaatttgaaactcgatctggacccgagatactgatcttggaccctttaccccgaccttggacgcaggccctaatccaagatgtgaaccctaatcctctctcggacccaattcggaccttaaccttaaccctgaacttgcatatcagaactggaactcgatccgtacctgtacccagacccaaacctggactgggcatcgacccccactccgacacgatgccctacctcaaaccagttttaaatagggaaactatcatgtatactgcatttttcatttttacatttttttagattttttttttttcatttttataaaagttgttattttgaggttgtgctgattccattttaaggttatgctgtttctattctataaaagttatttctattttaaggttatgcttattacattttgaggttatattatttccatttttataaatgaataaaaaatcattataaaaatataaatgaaaaaactacttctaaggcctcgtttgaggtagcttttaaaaaagttaaaagtgctttttgaaaaagttattgcttaaaaagtgtttggcaaaataaaaaaaaatagcatttttaaaaatttaa

SEQ ID NO: 164050 - DNA, 1713 bp, Cannabis sativa
actgtattaatgagagtgttttaggaatttctccaccaattcccttttctgtttatcattggagtattgataggcccatgatggaggtaaaaagccaatattgttgtgtttgtttacaccatgcttggcacaatttcccaatcgtgatttagggcataattgcctattttatgatggattttaggatgtttattggtgcttggtgggatgttatttattctttatttatgacttgacgcctcatttatgcaccagtcgattgatgtatggaggctcgtaaaatcatggaataatgggcttaaatccttaaacatgattctcagagtaaggcgtctgatgtttttccctatgatgcattaaatgcatatacagtgtcttgatccttgagtgacatatcatcttttattagtcttcctgtaccagcctccggatatacttcactcgcagagaggagcaaaggggagatgctcgcggttcagctggatcctctctgagatgaccaacccgttattactcctttgagataatggacttcaagagtaattaaggcgacgtgccatgtaacgtgggtctcattgtcacctggcttcctcctgagctggctcgtactttgggagaaatcctagggaacatttaccccaagtcctttttttgtaattttgcaagatgggacttgcgatgtgcctcttaaagtgctgacatcatgcggcacgttatcatttcaaatactgctcattacttttcctcatttttgataaaacgattcgattctttaatgaatgttgatgcccttaattgcaggacgtcagaatgacactctgattagtgcaaccatcctctcgggctagtccatatgcctgctaccacccgaaccattggatcacgggagttttaattgtgaggttaggatcgtttgaatgaatggcgatttatgtcgtcctggctggtgcataaaaaccccctatttttcttctttgatgttagacttttcatattcctaacaaccttcaatctaaccaaagttccaggaagtctagatttccttttgcttttcctctgtcgttgtcaagctcgatcctatcagcgttccgcaccagcgaccgttctcgctcaacttgctgccatcagtaagttaataaccttactaacttctttttagtttatttcctgcaattttaacttctcaattgcttgtaccaatgtgttatttggtaccgtgtttgtaattttgagccattttctagtttagcctttacttttccctttgaggcaagagattcttgtgtttggactattggatttgccttttttttttttctctcttttctactctacaccatttttcttgatggtgtagtttgcacccgatgcatagcacatgaaatttttgcttttgggttcgcttgcatctagagggggcctcttctcagcagttaggggacccatctcccccttttttatttagggtttttaatgtatgagctaaatgttgggtaaattcttaccttttcagatgagtggcatcttgaaggatctccacaagcacggtctcaacacttttgacaaataaattcttgaacttcacttccaaactagaatgtcaaaccctgaagcccctgcccagacttctgctcaggacgcagtctcacagcaccaggtggtgccactagatgtggtgatgcagggtccggtctgttggaaattattttacca

SEQ ID NO: 164051 - DNA, 3044 bp, Cannabis sativa
atgctttgttgatgtgtcttctcttaattcctttcattaactgcctttcagttatcacattttgcacaaatgtggaatgcactatttacatggacgacatcatccactttggcttatatatatggaagggacgaaagtgttcatgcggagtatttatcagttaacggaaaggagtatcctcaaaagattgccttaggagatggtcgttcttctgaaatcaagcaaactcttgctggttctcttgctcgagccttacctggacttgttgctgacctcaggctgccagtaccagtgtctagtttggagcaaggaatggtattgatgcgtgaaactgtttttttttcccctctttttcaaaataatttgattggatagatttaagatgattgagaggttcactgatttgctttggcaaacaggggcgtttattggaaacaatgtcttttgttgatgcactgccaccattcagaataaagcaatggcaagtaattgtccttctcctcattgaggctctctctgtctttagacttcctgcacttacaccacacatgacaaatcaaagggtgttgttccataaggtgagccccccaataaggttttctcccttttacttattattgtcttctatttttacgtatggggagttcagtatattctacctaatgctttgtcagagttgtgatgttgaattttcttgccagctggctttctatatgctttgtttgaataccgtaggtcattttgttgctcttaagtctctttctaactgtttggtggaaaaaatccctatgttgtttgttttgttgcacttaaattcttatttaattagtttaggagcaaaaatttgtatgtagtttatctttggtgccaaaaacccgaccgttacacatttgaggtaaaattagtctctgatggtaaacaacaaaaggactaacattgtaacaaaatgattacatagagatttttgctgctaaaacgttgacatagggattaagtgcaacaaatataaggatttttgccaccattaattttacgtagagatttaagtgcaacaaggtgttatgctgtaaatatcctttaatttttttaggtggtgaataatattttcttgtggtagttctgtattcacagaatttacatgtttattaatcatttatgattgtatttttaaccatcataacctaagaaactggatcaaccaataaaacaatgagtttagactttagaggttagaagtacattgagatgtttgactacaaaaaacatgaaaacacttttgttctccaataaaagttgcctcaactttagttaatatggggttgttaataatgactttgcatcttcgacttgacattctagtcatccattaccccccttgaatttaaatctccaattatattggatatgatgtgttatcaatgaaaattaatgttaagccaatgattgtggttggtgttgaaaacataggtactggatggtgcccaaattagtgctgcagagtacgagattatgaaggatttgatgctaccgcttggcggaactccccatttctcagatcagaacggggggcttaacgaaagaacttagcccatcttcatgaactccacaactcccaaaatcatttctggtaacttctggttttgggtttttataagataatcttggaagtaaatatggaagattttactgctgaaaaaattgggcagatttttttatacttgtaaactgaagatagtttacaactacagaactaccctagtgaggtctcatagagatttcatgcaagtgccatgtgacatctttgtatgaaattttggctgtgaatatttgactttgttatgatgatgttgctcaaaccttcatgaatcatgactaggagctttgttgggtatcatctttaaaaaagaaaaaaaaggaacccttcaaatgtgtgtgggaccctaagtcaagtaagctctagtctagcatttgctaatattaatatatgtaattttttttttaatattaattatatataatttttgtactaaataagtaatagttatcgtgctaatcatgtaggtgcctcatggtccaatcatggcagttgtttgatgagaccttcataccttctctgctaaaaaggattattcaaagttcaaacctttatttaattgaagtggggttggatttcattgccctcaattgatagaccacctgctttcttatttttgtttttataatatttaattttattattattattatttttcttctttgtctgtttggttaaagacattaggattggtttaatatggtctgtacttgtcctgtgtctggtttggtttggtctcacttcttaatgagtcagccgaagcctataaccacaccattgactatgtgaggctatgactttagtagggattgggattttggaccatcaatcacatgtattattcattcaggggtagaatcgtaattccactgctcctcttaattggccattaagctgccaccaaatgtcactcataaaaatattacaactcattcatttgtcaatttctttaacccatttttctttgtggaggaaattatttaagctggatgttaatcatcttatagtctccctttcaaaataaataaataaaagaaatcatgttatatatattccaaaatttatttatttatttttccctaaagttgggattggactaattgttaatgttacatttcatgtttatcatcaccaaagaaaaaagaataatactaaatatatatgtatatttttttggttgtggtagaggtatgttttgggtaattttatagtgcactctttaaaagggtgaggtatagggctgtacattggtcggtttgggcagtttatcagtacaatccgtccaatttaaaaaagaaattgtaaaccgactaacagtttgggtggtttagtcgggttaactcgcccaaaccagctaaacttttttttttttggttttaaagtcaataaaaattaaaaaaataaattaaaaatatcaaatttcactagcacaacacaatatatatgactt

SEQ ID NO: 164052 - DNA, 3540 bp, Cannabis sativa
ctgccgctgctgcagcctcagaccgttactcagaaaaccacttcagaagaattgggtcaaacgtgtcctcttatgtgggaatggtgtctgagacactaaggaggacaattcccaaggctgtggtgtattgtcaagttagggaagccaaacagtcgttgctaaatttcttctacacacaaatagggaagaaagaggtacttgctcccccttctgtctctctcaagattttctatctatactaactttgcccaaattgtgtatcaggctaagcagctttcacaactgttggatgaagatccatcattgatggagaggaggctgcagtgtgtaaaaaggcttgagttgtacaaggcagctagagatgagatcgactctgtagcgtgggctcgctagtgtcgcttttgtctactactgaggagatccttggtttcattggggttgatggatgatattctttagaatattagtaaatttttttccttctatatataaatataatatttgttatttcagtgttgagcattgtctcgtgctttgggatgggatgctgtatttttcttcttgtgtttgatggaatttttcattgtacatctttacactttcttgaccttgtggtgtgtggtggtctccttgtatcatattaatggatattagtatattttcccttttcttcttagctattgtagacaaatttagtaaagagattgaggaaaactgtaaaaacatatcatcatgccaggggagttgaatggtggaagagcggaatatgtgaatatagatatgataattgggattaatagtaaaagaataaaaagagcattgctataatttttgtttgtatcaacacggttatgatacgattaatgattatttaacatgtcaaaaactttaatgtgatacgatacgattaattaaaaagttacactacttgaaagcgagacaataacacgattatcaagataaatttgaatttttgaaaaattatgaaacttttggttttatgacacgacgatatgatacgattcaatacaacacgatataataatataattatgatatgaatatgatacaattattaaatgtgacaaaaacttaaacatgaacacgatacaattattaatgtgtcacaaaactaatttattttgtgttatttccaaatcgtgttatcgcgtgttgacgcatattgattagtacaattgagtagtaggagattttgaagtaaaattacaatgataataatgtgatgttaggatggtttctacttaaagttcataaacatcaactttgttaggcatcactgttgcctccagttcttaagaaaagattgtgggcttatatctttcagattaatgagaaattttcatattaagatgggttctacttaaatttcataaacatcaagtgaaaactatgaaaagtaagaatgtgcaattcatactgaacctataccaaatgacatctagttccaattttaagcactcttataatagatttatgaaataataataagtaaaacgaagatgataatctacaaataatgaattatatattttttaaagtaacagttgaacaattgcaaaatcttaataatgacatcttagagtcataaatcatgtaatatatccacttttggattgattattttcattggagtattcaaataatatctgcaacaaaagaatcatggaaagatttttccttgtacaaatcaatccaccggatatgcttccattgtgactagtgaaagtgttcaagtttcaaatgttgtctctcagaagtcctccagagcagtccatagttttgggtcatcaaaatctttgataacaaaggaagctccagcatctaatagtaagttttcagggtttctggtgcctaaaccaattactggcatcccagctgctaccccagctttcactcctgaaaccgagtcctataataaacagaatgaatactacaagtaagattatcagtggttttttctttttatagtcaaaacttggtttgaggcaaagcaaaaatatttagtgattgaacctcaaacaccatagtatgcttatgtgacactccaagttcttggagacccttcaaatatggatcaggaaatggttttgctcgatcgcattcgtttccaaggacaatgatttcgaagaaacttgcaaggtccaacattgagattatgagatcaacgtttggtctaggagcattcgttacagcagctcgtcttaagccgcgatcatctatccatttgcacaagttttgtaagcccttgactggttttaattgctcagcagccaatctgtatgggcacacccagtctaggttaaaaatggtctaatgcaaaatgaaattgatggatttatactattttccaccctcacatttaaaatgctcgacacttgaactgagaacgaagattgaaaggagttaaatatataaaaaccaagaaagctagagacctacaaaaacttatctcaagatataacaagacactcaaacaatcttagtcaagaaagaagctagatggtgtagtaaggtattcataagccactaaagaaagttgtgcaggaactcatacaagaatgatattgatagtgtcagcaaacatgggatagagcaatatacaatgcaattttccctaatacggaaagagagaaaaaaagacctcttttaatggtattcagatggtttttcttactacaggaactaaagattttagggaaaaaatagacacaataaaggagctttagtatgctgcaagtgttttttcctggcacaaatctttgctgtcctgttgagctaaaacaattcaattaaacaaatgaaaatctatgcatcaaagttgttctgatgtgcatagacaagaaatgcaattttagtctaaattctaattcatagtttggatccaacccctccgaaaccaattttggaagggcgaaattctaataagccagatcaacctaattatcttgctcatggaaaatcatcaacaattgattgctaatagagaaataattactttctctattccatacacccaagaaccccttctctcatcaagttacattgttgccctatctcgtagtttgaaaataaattactcccaatagactagcccccaatagcaataggagtctgtatagttagatattgtattaagttcttggtattaacaaactaccctaatctcacaaaaactctacctaatcctaattaactagctaaccaactcaattaattaattaattaatagacaagcaaacaaaaacaatgttcgaatagcagtaatttcatagtattaccttcgaaacaagccttctttttcctccataaatgtgcttgctttttgaaaatcccaatcaggaaggaggacttcacagagctcgtcattatgcttcccactaatatttttaataaagaattcttcagtaatgggaactccaccattgaaccctatctgggtttttttaccaccacttccacccgttagtataattgatatatttatatacatatatatagttatagagagagagagagaga

SEQ ID NO: 164053 - DNA, 1072 bp, Cannabis sativa
ttcttattactgttaaggcccttaatgttccagctcaaaatgtttcaactatccattagcagtataagcaacaaaattgtcaattatctcactgccctcttgagcttgcagaatattaaatgagttagtccccttatcttctgcagcaacaaccttttgaaaaaattcgtcgacttgggtttacctgtagccttctaaccacagggtcgtagtggaaatgtggggatttctctcatatgacgatagtcttccttggactgattgttgtgagaataattgtccgaagcactacaccgattatttccttcaaaatagtcttttgttgtgtcacaactgcagagggaatcaaacttattgctcatatttaattattccccatgtatctgagagaagtactcgtaatgctgaccatcaagactatgagcaaactactgcacaaaatacaccattcatcacataaatacttatgagtttggagtggttcgttggtccttacccttcaatctcatacccccaattttatgatagtctccgggtctctcccctaagggttattgtaggtttattcccctttgtagagtcacaatgcctagagttattgggcctatgaagagaatccctaagaaatattttttatcataaaatattaataatgttcctaaaaatgtcaatattttttttagcaagaattaattattaaaatgtttttacaaataaatttataatacttcatataattgaattaacttttaacaagttttaatgtaatatttatggggtgtcataggtgtcaaagtaaaaagaagaaaaaaatgttaaaagagaattatttttaatttattttgccaaaaataattgttgaaacaatgataattattggtatactattaattcaaaatttaatataaacattgttaaaaaaaataaaacttcaatacaaagatatgataaaattgggtgagatacataaatttaatttttagataatatatgatatagactatacatatatataaagaacacttcttaatggttattactcaagaatggttactaaacaaatttaactata

SEQ ID NO: 164054 - DNA, 1499 bp, Cannabis sativa
tgagaacctgaaaattgtctgtttaataaacaaattagacgtgtttttacttccatccaaatcaactcaaactcgtttattttgtactgattttaactggtattatcctatctaacctattttataattgataaaatagatgtagcacgtgacttgtattaaacataaattcaagtttaaacccttttaatacttgaaaaaaatttaataaaacctttcttcaggccattcattctaaaaaataaaaagacaaaaaaaaaaaaaaaccaatcaaattagcaacactaacaaatctacataacattacatttatggtaaaagaaaaaaaaaatgttaacagtactcatacaaagccaagtttttttttttttaattttatcttgggcttctccaggagctaaatttattgcaaactggcattgatttctttgctttttccttttaaagactaaaaattaccctaaaattacagacatttatggtgaattatctatacctcatcatcattgatcagctcaacagtttccgggtcgtggatgacccgctcttctttccgatccgagtttcacgggcacccgaatccgactcatcgtggtaccaaccaaccgttctctgagcttccataacgatctgcgaaatacctaaatccccaaaataaagaacaatgaagaagttatttcaagaataatagagattaaaaaccctaattcatccaataatagagaagaaaaggagaggagaattgaaccttgtttgacggtctgtttgttctggcggatatcgtggatggtggcggagattttccaatagagggggcgaccgacgtagaaaaggaccaaaatgattaggaacagcattagcattcggaaggtgaccttggctgtggaggacgccattgatggagcttggagctctatgtcggtgtgattcttctacttctgatccgaaacgtaatcgagagtccagagagagaaagagagaagtataaacttgcaaattttgacgaatttgtagttaggccctcgatacccaaaacatcttcctcttgacagtgacatggtaggtccttattatttttaaatttaaactatttagtccttaaatgtattatcttgtcatgtaagcctccattaaatcaaattgttaagattgatgagactttaaatcagatgctaaattcaaggaacgaggtaaaatcacatgtttttcttggaaagaaaagcaaaagtaaagatgattttttctgtgcccataaatgtcgttttacgactgttgtttgtcgtttaacaattcaattgtcgtttccggtagaacctacaaattttctttaaaatatgcccgtcggtaggggtgttcattggatcacatccaatgtttttaggcttgtccagatccgatccaattatatattggaggttagattttcccatccaatctgattcaattaattttagtcatccaatcgatccaatatccattggatagattggatcggttct

SEQ ID NO: 164055 - DNA, 1335 bp, Cannabis sativa
agcttgtggaagaaaatttgggactcgaagctgcattttcgtcactcggtgatgttatggagagtggtctcgggttgtctccccaccagagataggttggggtttgtgagggataagacctgcccattttgtggggaggaagaggaaaccgatgtccatgttttttgggattgccattatgcaaggaccatctggtttagcagcccttttgctgtttgtgatgaagtgggaggtggtaataccatcaaaggtagagttacttggctattggacagaattccaagagaccaaacagctatgttcctatcattcatgggctgcgtgtttgaaggtgtgtggaaatctagaaatggaagtctgttcaaagggtgtgtgcctaatattttacaagtgcgggagtgcattatgcgaaggtatgctgaagcggtggacatgttgaaaagggacgaggatgaggtgagatctctcccatctggtgtgaaagggagatcagttgacaaatccttcgagttgtttgctatttctgatgcagcgtggaaggaaggtaaggctagtatagcagtggggctgttagatacgcgcattaacaactctgtgtggcgtgctaaacaggttacagcctcgtcagctgctgaggcagaattgctagccatccaatgggctgtgcagatcgctgtcaacaaaggtgtcaaaaactatgcaggtgcatcggatgcaaaggttttgatggatgctttgaagagaaaggtttgtcccacgatttggaatttgaaacctctggctttggaggtgctggatatgtgtaattcttttgatgtttgtaacttttattttatccctcgtcaagacaatatgcagtgtgatgagttagctaagtgggctagagtgaatggccattgtattgatcttattcaaagggagggtccccctattgtgttacccaattttcttctttaatgaacttcacttagttctttcaagaaaaaaaaaaaaaagataaaattttgattgtaaaataattaaatatataaaatgatgataaatatatattaaagggttttctttttcataaacatgtatttaatataacatgtgttttctattaatgtaatacctaatatttaaggtatgttattatattttttttcaattattgtgatgacttttgcaaattaaaggattttattaaaaaaaaaatacatttaataaaaaatttcgttataattaaaatttaactaaacatttataattcgggattcttaaatctagttacaaaacattaggggtgtgcataaattgatccaatccaatgagaaccgaccgatccaattacaa

SEQ ID NO: 164056 - DNA, 1879 bp, Cannabis sativa
tgataagctagggtttaggagactgataatccttgatcgcattataattctttagttttggaagtggaagaaactaaaagggcatcattcgtttggaaaagtatcctatggggtcgtgatctatggaaagaaggatgtcgttggttaatggaaaatggtgagactattaacattcgaaatgatccttagattcctaaagatcatgtgggttgttcttactccttccgaggtaatactaggcttcaaaaggagagtgatcttaaagtggatggtggctggaacatgcctctcatcctgtcggtatttgatgaagtggaggctaaagaaattttgtctatttcttcctcctcttttgttagacaagattgtttagtttggcattttattgataacgggatatatacagtgaagagtggctactggagtacaatttcgaggctcgatttgggtcaagtgtctacttccttagggtgccttcggtggtggttagttttttggaatttgagcattcctcccaagattaaaaactttgtgtggaaagcttgtctaaatttcatccctacctatgcaaaccgtactcgtcatggtatcaatgcttctacagtttgtcctatttgttggcaagataatgaaacaaccatccatatggtcttgccactcacttaattgtgtttgcaaacagtggctggtgagaggcaagttcactgtaatatcaagcttttttaagttttttgctggcttatttagatgtattatttactcaagaattagaagagttattggtcctttcttggcgcatttggcataggcaaaataccttcgtgcatgagcataaacttttgaataatgaattagtaaattcttgggctttcaggtacctttgacagtattaagatgcccaaattcacaattcaaatggtggcctgcggaaacttgctgctaacactcttggggtggttgtggaatcacctagactgattcttggggatattaatcttttcgttgatgttggtattagcattgaaaactggaaggttagtttgggtgctgttatttctaactgtcaaggtcagatttttccttccgcgaggacccctatcgtcgggacattctcacccctggttgtagaagcggctactcttctgcaagggcttcgactgtgtttgcagctgggctatactaacatttcttccttttctaattgtctttcactttgtgcaaattatcggtcgtcatgcacccggactttcggagcttggtattattgtttttgacatccaacaatttagaaatccttttctactatttctctccatcattgttataggacttataatattaatactcatgctctttctaagacattatctttatctaattctcgcacttggtgggccgaacttcatacgggttgtattgtccattcgactttttggctttgtgccttatgggaatttttcctcaattttaaaaaacaaattactggtagatttataatttttgttagaaagaattatttgatttcatgcgttattggatatttttttattatgaatgtatttttcaagacaatatgatatatggattttcttgaaatttatgtccttattcccaaaattcactagcatagaaagatatcataaaaattttgcagccaaaaaataaaataaaataatagaaaattaccctaataataattttaataaaatattaacaattttatgatgattatgtatagtagttaacatagacaaataaccgtcgatttagtcaatcacagcatactggttcttgctagaatgtattagaatgaattatacatttagggctcgtttggtttgccgtattgtattgcattgggttgtattgtattggattg

SEQ ID NO: 164057 - DNA, 906 bp, Cannabis sativa
tttttttttttttttaacaaggctagtgagtgaatattatataaataatatattgaaaactgagttccatatcccatctaacccaatattagagaaacggaaaattataacaattaatttacaggtgtttctacgggaaatttgaattccaaatcttgtgggagcaaaccacagcacagtctgacagtttgagctacatttctaaggttaaactataagcattatatggagaagacgctatagtgtatataacttacatcttgtggcataggacgtaaaccgcccctaacttggattcctaagccacgaagcaaggaagccatatcaacgcaggttatttccaatttgttgatctctgtccttatttggcaccgaagttgctccttcaaatcaatattttcttgatcctaaatatataattcatttgccaaatctagattaatatttgcgtaggaaaaagaaaggagtacatttaaagaatgtaaacagttaaaaaaaaaaaagataatgtgagagtacatatgttatcaatgtaaaaaaaaaaaaatacaaaccttcttttgtgtctctctaacttcttcaatgcgttgcttttgccttctttcaatatcgaatttaagcatgctttcagctttttttctcttgcgcaatctattggcctcctctgcctggaatcaaaaaaaaaaaaaaagaatagtacttttcagcataaagctactaaagttatgcatatttaccgaagagaaaaatagccagacagccttaaaatgaatatatatacagcatatgcaaaatggaagcatacgtttataatgcttaaatttcatcgtaaaaatataatgtaagggttcgtttagtacgccgtattacactgtattgtattatatagtattatattgaattgta

SEQ ID NO: 164058 - DNA, 1807 bp, Cannabis sativa
  modified_base (1740)..(1747): a, c, t, g, unknown or other
gggtttgagtttcctttattggagaatgggaaactgtcggggtcgcgaccagccatgagttcccaggagttgattacttccgggtcggtccgcattgggctcgggtcggcccagagtgatttgggctctggcggaagtgggctggggtgggttgtggaacccattttgaaacggagtggtggggtggtcggagtagaggaatgatgacgtggcggtggttgttgtggtgggtccagagtgagaagaccgtaagttgaggaagtgagtgagacgatgtggtgactgagtgcagagcttccgagttgagtgaactcgtcttcatggtttaacagattcgaagaaacacaacccattttttcgatttttgaaactctgaaaaaaaaaaataacacagaaaatgaatcagtttttgagtttgagtttgaaaaagagagagagaaagaagagagagagagtgagattcaaataaagtaaggacaaaaaggggtttattaattacaatgagaagacttttttttaaaaaaaaaaaattgaaacacattatttcaatattactttaattcttggatttattaaaattaattattttatttatttggaagtgtaagaaagaagaattggataagatattattaagtcataattaatttattaaaatttaaaattttggaaatttctacgtacacctattaaaatgagtgttttgatattttagtctatttttttttttttttttatgatagtataagttgtagttattaatgacactgataaaatttttaaaaattttaaataattaacagtgacaaaaataatgtttaaatagctattaaccatgtgtatagaacaaaataattatgtgtaaaatattttttttttttgagaaatttaactgttgttaaaactggtaatcgtttacaataaaagagaaaatagaatttaggattttacccatacaacagacatcttcatccaactcaagagcaaccatgtgcagcttaataacatttctcttaacattaaaaataattactcttgagaagaaggataaaagacagctaatatcaataatcaaatcattaaaactagagaagtttccaaatgtagaattgagggccgaagaaacacgcaatgcatcggtttttatatgtgtaatcgaaaattgcaattgtagcacccaattaagactataaaaaaatgagtgtaaataaaatatttaaactatattttttttatttcaagtaatataatatacattattataggagatcatgaaaaaaatacattaaatttttttttttttttgaataaatacattaaaaaaaatttaaaatagataaaaaatttaccgatataattttttaagaagcatacttagcctaaaattctattttttaaaagttaaatatttttacatatggggtccattgggtcaaaaggaaaacgggttttgagcgctaaaatttaagttttaattcaaatttatagtggtagtacacgtggcattaaatgaattgagagagcctcagtgaacatttaatttgtgggacccaattttgaatttcccatatacattctcttctcttaaattaattaagactctcactcacatcttcttctttttactttaggttaattaatgcaataatgactttagctataaagttccaatttgctttcaaaaatttataagaagaatttgagataagttataagaagagaaatgctaaagggcaccannnnnnnntagcaccttcctatgtgttaatatcgttattggtatagctaagtatcgggtcccatataa

SEQ ID NO: 164059 - DNA, 1478 bp, Cannabis sativa
  modified_base (1433)..(1452): a, c, t, g, unknown or other
atagttgaagttttgggggttaacgaagcagttagttggatcaaagcgactcgttggtctaacgttgtcatcgaatcggattgtcttctcgttgttcaagcaattcgaagccaagtgacaatgggctcatatttttgtcaaattgttgctcaatgtcaggatcttttactagaattgggatgtgtttccttagcttttatcaaacgttctgttaatagggtagctcacttcttgctagagcttcttattttcctgctaatgctgaacgtgtttttactgagctttctatttgttctgacttcacgaatgttttgctgaatgatattatctaataaaggttctatcttttatccaataaaaaaattatgtgaatgtagttgaattagtagcagttgcaatttattgtttcagttttaattttctaaatagaattagtagcagttataaagttgtctaatttacttttagtttctcttgtgctgtttgttttcctctgatctgatctgacctgtgctgattatttcttttcatatttggagtaagtcatgtgttttatgtttgtattagaggttgtctaaagaatgtcaattgatcaagcctttagttgtgatttgtgctgattatttcaaatgcacttagggcccatcttccaactatgttgagagttgtttatgaaacataaattttaatatgcatatgcatgtcttactcttttgttatttatccgttgtttgcaaagcttatgtttatctccatgatgtgcttgtaggttatggcgacaatttgtgagaagctaccttcagatagtgttatgctggtgtacctttcaacctcaggttaggttgcttttattttgctaaaaactaaattgccttgtgtagttatccaagataagtaaccttggagttcacttttgcagggaaggttggtcgtaatgttgctccaacagaatacatgggagggtctaaaaaattatcaagaaataaagtccacgagcttagagtactctgtctcattcttgtgtaattgataagggagagtcttcaagtggatattatgataaatatttatggttcgggcctagaggacatagtgttaggtcccttcaaatcatatcatataagcaagaattattcttatatgagcatttttcagttttagtctgctatttcagtctgtcttattggtctactaatgtgaggtcttttgttgaatttaatgttcaaataatttatatcctgaagatattattttatttacacacatggactttttttcttgattatcgatagcaacaatagccatgcattcaatgcagtttgtcaaaacttgggcattgctttttcctggctgtgttttctccacagcaaaaagaactttgtaaatcggattttgttcaattttcactatactttttgttgggttttatgccnnnnnnnnnnnnnnnnnnnntataatcaaatttacttattaatata

SEQ ID NO: 164060 - DNA, 1173 bp, Cannabis sativa
aaaaaaaaaaaaaaaaacctgactcaaattatataacacaatccaatgattcaaaatagtgtgaacaaaaatactaattaactcaaaatattacaattcaatacacatctaacttgaattataactcctaataatttataggagtccaacataaaataatacattctagttaactaaaattatatacatctttgagagagttatttttgtctaaatttctgagataatttggtcttatataagttgctttgtagtgactcatattctgactttgtatatctttggctagacaattagcttgttgactgaaagtttctctgcgtcagcgattatcatagtgtgattttaatcactctttcaaaaaaaaaaaaattatatacatctttgagagggttatttttgttgtgtgttttgcttttgagaatgttggcttactatttcaatttttacaccagaaagatattatatgagagactactatatatgtaaatccaagatttttattatatatacatgtaaataaatatcacataagaaaataaagaaagagtaaaaactttatagccattacaattaaagtttagaacatatctttgatgggcagttttgttaaaattactacaaaataagcatacaattatcagcaataatcaatacaaaattatgctcatattatccaacatcaaacattttatttagaacattgatttggaaataaacatatcttttaaactaggcagtgtttttccaatgaccatctcaatattctagcaattgcgcgcaaatctctacaataaccacaaaaataaatagaaaatatgcaaaaagttttatgaagagcaacccttaacacattactattctcttccatttttcacccaccatccaatatatataaatatagggaaatttacatacattattaacatttcccaatttattacctttttactgtaacacgcttattgtaacatttatactgttttttttttactgtgtcaattatttttcccaaaacattttatcttaataataataaataaataaaataatgagtagttagtgtcttcccacattaaaatttaattttttttgttttattagagagattaattggacgtgagatgtgacaaaagtgacatctttttttttttttaatttaattctttatta

SEQ ID NO: 164061 - DNA, 1151 bp, Cannabis sativa
aaaaaaaaaaaaaaaaaataagagcaacatttcttatccatgtagcttgatttcaatttaaaataaatgctagaaaaccttactacattatttattttatttatatatgttgtcttttgttaaaataagtaaataaataatacaaaagtaatattttaattatagtcatatagtaagactaaaataatgataataaacaaattgctatagtttatttcgtaaatattggtagctataaaaaaaagagagaattcatgttgtttttttttgtgctctggtgtgtaatgaaatccaaaaagtttatctaacattaaaatttctaatataaattcttaacaagtatcaattgatatatatttccaacttcaagagtgaaaattcttcctttcttttttaatattttcatcactcgagaagatttggagttgaggccttttacatcaaaagattttatgatattatttgttttatcaaataaacaaagaatatagtttagaaagcgcacacacaaaatttagaattatatctaatatagattttaatagtattttctagagttcttataaatattttatttttttagttagttttgccgaatttgatttaatctttcacctttgtaatatttttctatctgcttgaattgctaggaaataagctagttgagagatgtgttaagtagtcaaaaatacatatttgttagtgtaaaaatagaaaattaaattaattttatataatatttttatgaaattaatgtaatgtatttttatttgaaaatattgtagtgttgagttaattttgtaataaaaataacattttatgacacaaataagagcaagaaagaaataaaagatgcgaaaatatatttttttattaaaagaatagtaaattaattagattttaaataaatattttcatttaaaattaatgtgacatattttatgctgaaaatattttattggatttaattttgttgttgtttgaattaaaaaaagggttattttaaaaaatatgagaaaaattattaaggttatgataaatatgacataaaaagtgaataccactaaatatgacattatctaaccaatcaaactagaaatatttagaaaaaaaaccatataaaacattaaaaagaaatctgaatttaaaat

SEQ ID NO: 164062 - DNA, 720 bp, Cannabis sativa
aggccactcgtaatgccacaccaggcgagtaaaaatttggataatatttttcgcccaagtccccttgtaaaccttgttcggatggggacttaggtactagcccggatgttgacaagtgtgcaagtcccgtgcgattgttttaggtgaatggtctgtgcatggtcgataggtcacccatcagtcacttctccacatcagctatcattatgacagtttaagtcataaattgtgcgggatcatgctgacgactgcactcccccatgattacacctttttaaccctctctactttgccatgcaaattttatgggaattgattttctcatttaatattttagagggaaaaacctttatagagacccttataaaaggccccctcccctccgtcctcttaattctttttccaatttcatcttcttcaaaaaatttatgagagagaaaacttcaaaaaggaaacaccaacaaatttcaagaacccaaagctttttttttttttatgttgttattatagaccgaaggttttcccttcaacgtctagtgggtaagtctcccgaaacttcttttttttttttttgtttttaaattttctgcaactttatagtgttctaccattgataaaactagatacttctgctggaaatattttaccaggatctagatttactaacaactgtgttgattaacatcctaaatatgaatatttctaaaacaatgaaattaa

SEQ ID NO: 164063 - DNA, 954 bp, Cannabis sativa
taaaataatttccaacagcttgttgtaaagattgagaattgagctgatcattgttcaacaaatgatcaagatcagctcgcgttctcgcaatttggagcttaagaggctgttgagaagttatccaatccttaatgtttgagagacaaacgaattgcttagtaaggaaattctgcaaaggagagggggaggaaggggaaggaaggcaccaagaagcaaggactgtgtcagagaaagaaggatcgttgagccaaaaattttccagatgaaactgagagtgtttttgattctttgaaaaagtatcctctaattggactttcagaactttgtgatcagaaaaataaaagcccagatgggagagagaagcatggggaaaatggttttgccaagtagcattaaccgtacaccagtcaaggcgctccaaagtgagcccatgacgccacgtatacttattcccagaatgatggagaggtatgagatgtctttcatgtaaaaaatcatggaaatggtgcatagcatgtgaaggaggaggggtaatggagtttctatcattgatagacaaatagtcattaaaatcacctataactaaccaaggtaagagaggagcagtatcatataatctattaagaagagtccaagtgaaaggtttagcatcaggataaggggaaccataatacccagtaaaatgccagtttatatcatataaattatttataaaacagtccacatgattaagagagtaagagacaacagtaacatcaatacagttgttccaaaaaagcaaaagacctccccctaaacttgcttaggaacttctaatacattatcaaaatgaagtttattgttcaaagaaaggccacaaacggcaggcaatttggtctccattacaaataacaaagttgcctgatgctgcttgaccagaagggagaggtgacggaatgctcgaggactccccaa

SEQ ID NO: 164064 - DNA, 1299 bp, Cannabis sativa
tctaatttgtaccatcaaattcaaattctgttgcagtagattaggaaactttccaaaaaagacaaagatcatgatttgctctttaatacctaccaaaaataaaaatgatttaatttgctatatacataataaaatcaaaatttacatttaaagaaacaaaaacaaatcaagtttttcaaaaatagttaaatttctatttcttctcggtaagataagtttcttaaacaaaaagaacaaatcaaagtcacaaaattaacaaaaataaataatatttaattcataatattattttgataactaaattgcctaacaatattaatatcaatctaagaaacactgtatatatttatagataataagaaaaagcctcaaatgatcataaatacttagaaagtagcactcacatgcatcaagtatatataacaaacaccatacaaattacaaattatatatgtgtgtgggggagctcaaaatgaattaagacgtagttatggaggagagtgcttgaacaaaaaggctaaagagctgatcaggcttggaaaaaaaaggggagtgatcgctttcaatattgaagacatgggtgggtggccacatcaatatcataaggtcttgcatcaatgggctgcacatttcatccttgagtgtctttatgtacactctcgctacgctctccgctccttcaccacctttcccaaagttaagatctaggagactccaaacagggctaggtctcaacagcatcgacgccattgtcgagtcctcatcatcatcatcatcatccatatcatcatcatattaattaattaacttaattaatgatcgatggattagtaattaataatattaattattacctcaatagggctcaaattgtacaaaacttggttttgaagttcaggcttaaccatgatgccggttggaacgggaagacctttcgttcccattataaactcgtacgaggaatttactcccggaagggcacgcaccaacttacaaaattaaatattaataaaaatgtacttttaattacaattaacaaatacaatcatgatcattatatatatacattgttgttattatgtcgaagccagttctcaaaaaattgctaccattttaacaatatatacattttacgtggtattaagttcatttcataaaaatactttttgactgtattttgttaataaattttcaaaaaaaaaaaaaaacttatcttaccaaaatggcttcttttttttttttttttgttaaagccaaaatgtcatttttttttagaacaatttatataaataaatagtg

SEQ ID NO: 164065 - DNA, 1313 bp, Cannabis sativa
tctttgtttgtttatgttagggtggttgtcgaacaggaatggcaaaggttactaatgcttatgaccttcctgcaaggtgggtatgttggtgcattcttttatatttgatgatctgagacataacaaacatgattttttttttttatgtactttcaaaagctatattattcatcctccgtgaaaaaatttaataaagttatttagatcttgtagcttctatcatttttcaattatgttagttatcaaacatgtccctgcatataaatttcagtattccttccacaagtaactgttttatgtttatgttgccgtagtgccatgtgatgcaagcattcctgctttattggaatttccgtactacttgaaattttaaacattatttctatattttccaggagggttatccatactgttgggccaaagtatgcagtcaagtaccatactgccgcagagaatgctctgagtcattgctatcgttcctgccttgaacttcttatcgaacatggcttacaaaggtttcttggcagctgatgctacattattttgtttcttctagtttgcttagttagttttttgcttctctctgttaccttgtctaaaccttggagcttatttttgctctctatgtatgaatatagcattgcaacaggctgcatatatacagaggctaagaactatcctcgtgaaccagctgcccatgttgctataagtgagtcactttccaactttctagagtttttgactcttcttcttcttcatccaacttacagttgtctcatcttgaagccagttcacacttttcttattgttatcggtagcctcatctaattacaagtttgtaactttggatgtgcaataagctataatttggacaaaagaaaaattactacctgtattttttctgaaattgctttttataatgcatatgcagtaggaatgaaatttgaaatacttaattttttttgtaagtcaaatgattatgactgtttttgttttttgtggatgattgtgttcataggttttatttgttttttttttcctctactgacttgttcatcacttctttgctagggactgttcgtcggtttcttgaaaagcagaaagataaaatcaaggctgttgttttttgtactactacctcaactgatacagagatttataaaaggtttctcaataccattttagtttttaatttttattgcaaatgtgaagcatccattatttaaagtgttgcaattagtatggtttctgtctaaacattaggaggatggaactctctttatttttcttcaatattttcttgatgtagattg

SEQ ID NO: 164066 - DNA, 1498 bp, Cannabis sativa
atatataattatttcacttatttctcaaataataaatacaaatcccaaagtaacaaaaaaatctttcattgacaatatcgcctatatatattttaagattatagaacaataaatattataatcatatatatatatgaaccccttgaatccatcaaaccctaacaattaatattaaaaataacgcccaaaaaatgtattttatttgacctaataagtaacaaaactattatttattatatataatccccaatattatcacttcattaatttttccccaatcctcttcatatgatcaaaaaagtcatgttcaagaagtccttcttccaccaccacgacgaattagagaattcctctcaatctgacacaaccgccgccatccagccacaatcagctagtggcggatgttttctaggatttaacaagtgcttcgaaatgggttcaatcgtttccaccgaccaacgtggggaggaaccttcaatctccaaactcaatcataaggtaaatttttttaaaaaaaatttggaccacattttcttttatagactttagtaggaatatttaaattcaattattaaatattgatgattttttttctctgtctataaccaaacttttggaccactacaagagaggagtactatctatagtaattatgtgcatgcatgcaaaattagggttcatgagagtgtgtgtatttattaattaggtgaatatgaaaaccaaaattttttgcaattttcaaaatttcggaaaaagtatgcatagctagtgtacaaatttttgtaccacatttaattcaagcatgccaaaaaaaatattaatatattttgaaaaataaagtgttttttattttttaataaataaataaataaattttaaattttgagagtgaaataaaagtagattcgatggaccaactttttgaattttgtctataggcttttttttctttcttgggtgaagatcaagactagggaaggactattttgttgttctatagtgagttgttcttcacttttttgagtgtttggaaagaaaaagaaagataaaaaaaaatgtataaaagcaaagtgtatagatgggctttcatatatacactactagactagtcataagagttgtggtggtgggcttaatttgtaaattaagtagccttattataaggtctatactagtcctagtgtgatatgtaggttgtatttagtttataatttttttaaaaaatattttaaaagtctctatttgaaaagatgtgtcaccatctaattggtcggaaacttataagaattgtcgaatagttactttttgtaagttatcgattaattggaagatgatacgtcaattcgagagcacttattttaagtgagttgtcgaatattataagggtaaatttaccaattagactatttgtttaaatgacagttcagaatctatgttttttaatatagtataaaaaatagagcaatttgcggcgaaacccccttatgttttgattttt

SEQ ID NO: 164067 - DNA, 775 bp, Cannabis sativa
atatttatcctttattttttctaaagtctaattcaactcaaggtcggcatacaccatgaataataatgatagtaatttataaagtgtgttattcacaaagttatgtatgtacacatgcatgattgactcaaaagggcattagagtattaaaataatggtatagtgttatattaatgcatgctaattaaaataatagaatgtgtattaattcatgctttggagtgggaaaaaagatcatgggtaaaattttgtgccatttggattgaagatgcagttaaggtcatatttgtaaaaacaaaatggatagttggtgagaaaaaaattatttgtgtccttatttagttaaaatatttttgttgtatttaatcaagtgattatttatagatgaaaagaaattaccaagagctgcagaaatactagtggagctatgtccaactccaaatgcatcatgctcactctcatccctttttgggaaccctgcaagtccaaaactttgtcgaattgttttcattcttgatcgtcttcctgttaatattttgtgaccgtatgcctgtgaaataatttataaaataaattaaaaatttgaaaaaaattacaaaaatacttcattatgaaaaaattttcatttttagtttttaatttttttatttacaaaaatacagtaaaaataataaactcttgttttagttattttatagtttatttatagttgttatgtggttatttttctggttgttttacagtttatttgtagttgatttatagttatcatgaa

SEQ ID NO: 164068 - DNA, 1232 bp, Cannabis sativa
tatataaagagatagtacaagcatatattcaaattcaggcccaccttccacttattgatttatcactaaaaatggttcaaagagacaaaagcgtttgataatgagatcaatgggaggaaaaaaaaaagttgattatggcatggaggttagataaaaaagcccatgtcttatataccttagctagatactcaccaaattaatagtaacatccactcatatatatgatacattagtgtaacaaaatttgttgatcttgacagagatatttagagtaataaagatattataggctaggcaggtgactcttctattttattatacttttataaaatacttgaattattacactaattattaattagttaaaccatatcatgcttattgatctagctaactttctcaagattcattctactcattattttatgctagcttaagccttaattaaatttttgatgcttagagagagagagagagtatagatggaaaagtggaacgatggtcaaaaattataatctcgaataatcttgatattctaaatatctaattatcttgttccactaattctaagatcctcaattgtatttaagtgactctaatgtctaaaacgttgcatttcactgttactgaacataaaatataaaattcgtaaacttcacatataacatatataatagaaatcaaatatatttccataattgagaaattattttcctaaatcctatttctcactataagccctagttctacaaagaagcggagaatcataaattactaattaaatctcttaaatatttgttaattctcatgatttaactatgtggtcaatacagttaataacacttaacaaatttattttagaaagggtagaagtctattttctatcaaaaaaaaatgaggtttaatttattgcaaatatcataattaaatggtttgaatattaaaaaattgtaatggagatttaagtaaaaaaaaattatttataaatattaattactcaaaaagttctattaaatatactaattaattattattttttaagcatatagttaatcataattaatttaattttataaaaaaaaaatatttacctattagtaacttgttattaaatgtaaaaaaaaaaatgtaaccatcatagttacattaaaaatataactattgaatattcactcatataaatatatatctattctatataaagtgtgccagaattcttggtttatgagaaa

SEQ ID NO: 164069 - DNA, 791 bp, Cannabis sativa
ttctccataacctgcagctaaattttcaccgtaaattccttgagagtgctcgagttcgcaattcttacctttcattttgtttgcataattgctcgcataagcaactaaagtgttattccaggtcattggcccaacacccacctctgctcgaatggcattgtgggtatcgaggaagtcattggaagatgcactagcaatcatcaatgtcatcattaccataaatatttctcccatcaacaaaacttttatacaggacttatggtttaaagacattttcaaagaccacattatttttagaaagttggtaaagatggtgatgataaataatttagaagctttttttcttttcttatttgtacaataagagatacaaataattcttatttataaggaaagaaaatgtaattattagtaaataacaaccaagttatatttataaatttgggttggtaatatatagaaaagtttgaattagtaaaatagtagactacaccaaaataaggatagcaatataactaccacaaatttaaatgaggaatttttttttttttttgacacttgtaaatcatataagctaatattatcttctatttttgattcgaatataaaataagtttattttttgtattacaaactattatttatatagtaattcattagttttttggtattatatatattgtattaatttaaataaaataatatgtgttaaaaaggaaagtttcttgattgttgcaatttgtgttgtgatttgttttgggaaatttgattttctatacttagaaaatcaa

SEQ ID NO: 164070 - DNA, 1075 bp, Cannabis sativa
  modified_base (1040)..(1040): a, c, t, g, unknown or other
gatcacaggtctactaactgtcacaacaatgaatggcattgctcacgcccttttttggaaaaataagaagtaactcgaacaaggtcacttggtttgaccttgctcgagtgcatacccctaacaaacaccaaggtgcacgagcacacgagtactatccccaagataacatttctcgtgtaggatgggattaaatgccaaatttatgcgagcaaaggcaccaaatgtcccatagttcatttgagtttggatcaaggactaagttacacgagcaatgaccaaaggaataccctttacccatgtctcatgaatacaaaaggaaggaaacaaaatcccaagttatgagcaccaaatcctatgcccttgctcatgtacattaactagggtaacgatttttggataatttggaagcctaaagtctctcaaacttagaccaagttccaagattccatcaaagcatcataagacccttggtgaagaatgatatatgcaaacactgacaatccttaatgttccaatgttcgagtatgtgaagaccacctagagtttgggatttcatcagatagttacaatgcattttctaagaaatagaagcttacaaaaacatttcaaaagataactaagtctacatactactacaaaattattgtctttttacatcggtccacacattggtcaatgcccaaaattgacgcaaaaagatcacatcaaaaaatttcatcagtttaggattgataccactttgcgttggtttaaactaacatatttttctttttcatctttcgcgccagttctaagctgatgtaacagataaaagaaacaaaacaaggcccattcacactcaaaaaccctactatacataaaaaagtataacctaaacctaaaactcttacaaccaaccagtcacccattcaaatttctctctcttcctcttatctcttatctatcttctctcttctctcttttgataagacgccctagctttgctctccgaccgtcaacccccaaccatccatgagactctctctctctctctttctctntctctctctctctctctcattcttctaatctctaa

SEQ ID NO: 164071 - DNA, 1026 bp, Cannabis sativa
catattacatgaatctatggagttggaccagtcagagatagagatggtcgatgttgtaactgggaatcaaatgtaggtatagtgttagtgatgagtccacttgttatcagccagcccaataaatacttatataagagctgacttgtagttttgttttggttgaataagtttactaatagttcgaagggcctacttggaattaaaagaaagtttttgctgaaaaatgttagctgatattatgggattttattggatattgttgaccatagaactgcataggtgtagtactcacacgctagcttcaatgtagaagctttctagtgaagcttcaaatttccatttctctaatcctgtttactcacacacaattacgtattaccaataaatttaaggggtttttttttatttttttatttttacacttcaaaataattttttttttcaattttatggaattatacataaaaattcatattgcaactagcgttgtaaattaaatcgcaacatcgtatagcaacctacgtacaaactagaccagagaagctactttacaaacccaaactgtaaatttaaaaaataatatatggagtaattctcctaaatttaataaaatttagggatgaataaaaaatgaaaactataatggaaactaatagagaaactcttcaaaatagactctaaaacaacacaccgatggtgaatttggtgtcttccaagtgtgtttttgtaaaacaattactgaatatttaatatctttcatacgtgttgtttatcacaataaatttactaattaaattttttacaattttttcagtataaaagcatgtacgggtcgatcccataagtactatgattaattttattattcaatataaaacaaaaagtgtaatggggattttgagtttgcaattaaatagaaaataaataataaatgacaattattgtggacaatgtcccacatggaataaatggtagagaattgagtcatatataagaacatgcgctactccactcattgccaattgg

SEQ ID NO: 164072 - DNA, 3009 bp, Cannabis sativa
  modified_base (852)..(852): a, c, t, g, unknown or other
agatggaaggaacctcaaaatattgtaaggaagcaaatgtttactggaaaagaaaaggctgaagctcttacgagagataaaggttttaagtctgatgatccatttttcattgttctcatgcaaccatcgtttgttggagcttcgtatagtatggtaattacttattaagcttcttcttacgaattcatcttttgagaatgtttgtcatattgacattgttcttttgtcaaggttgtaccatttagctttgcaaaaaatcacctcctaagtgtgagtaagcatgcagatgtgatccttaaggttcagggtgaacggatttggcctgttaggtactattatagaaagtatacagggcgttcacaattcagattcgcctggggttggaaagcctttgcaatagacaatgatttgaaagtaggtgatgtttgtgtctttgttaaaaggcagaacattaaaggttgaagctttgaagatagcaaaagattttaaatctaaagacccctttttcatagatcccatgcaaccatcatctgttggatctaaatccaagtataatatggtaattaataagcttcttaattacaacttttatctttcaaatatgtttctcatattgattttactcttgtattcatctcatgtcaaggttataccatctttgtttgcgaaaaagtatctctcagcatcagtagtggtcctcaagatgtgattcttacgtttcaggatggaaggacttggtctgtcaagtacactgtctatgtcagaccgcaggaatatcttcgatattcaggatcgagggtggttggaaggcattcgttcaagacaatgacttgaaagtaggtgatgtttgtnctttgttttgagaaagagcattggaataatattattcgaagtggttatttttcatgaaaatggagtagcaaattcccctattgtaccaattccaggtaaacaagaaccctattttgtagtaatatactgtcttgatcataataacaatctaggtgagaattataataatactcctagccactattattgaatgcaaatataattcaacctttttctactagcaataattgtaaagaaagaagtttacaaaaccagtatctgaagaaaatactggaaatcaaggcacttatactaagaggccttcatttcaggacttagcatagcctctgaggctgccagcaaattcttctcgaacaatccttacttccaattgaatgtgagatcagctcatgtgcgcggacatgcacaactggtacttagaaaatgttgctcattcatatcattctgaataaagtgacatatacattattattatgacatctttgtatcaaaattgtaaatttttttagataatttcataccatgaataaagtactaatgatgaatgtttgaatattggccactgcagtatattccattggctattgcaaactcttggtttgagaaaaagtcacaaactgtcattctttgggttggtaaggaatattggcatgtgaatttaactattaataagggatcatcatcttctggattagagcatagattttctgctggatggcgtgcatttacaagagacaactctcttaacccaactgatatatgcatctttgagctgatcaagaagaatcaagccgaggttaaagttatgggatttctcaagaataggctgttgtaattatgtatggaagttaattataggaaccaaatcttctacttatttaattagtttagctacaatttactccagctgaaggggttttgtttttatataactgaccctgacccttaatcagtatcagtatcagaactaaaatggttgctaataaatgtacatgttattagtgttttgttaacttgtgattctcttaagccaaaatgaagacgtatcttttatagggatgttctttatgaatcataaatgaatatgaaaacatattgagcagaattaaactaatagaatgtcttcaagagtgataacaattgagcagatgagggaaggagtggatgaaacaatttcaactccttgaaatatggttgaatttggactttttcttttctctttagataagccaattaaggcagccttatctaaaccgctctataattactcaattaacaattttatctatttatcaaaatgaatgaaattttagattctcacccatggacttagagactataaaatactaaaatttaaaattatatgtttttgattagggattttttatgagggatggtttttttgtgttacaagtatgcttttagtttccagcagaagttttagcttttttgtggaattaaaatggactcatgatgttaaattacctgccaatgggatcttttcaagtttgttttctttggtcttaaccttggagagtcctctaatttaggaggcaattcgtgttgtcgtgtgatattcgtgtttgtgttatgcatattgatattgatattgatatgtataattagtcaatcttaactcgactcatatatatttcgtgtcaataaatctcaatccgaataagaaataataatgtatgtgtcactttattcagaatgatatgtataattagtcaatcctagtccgattcatatatatttcgtgttaatctaaaataagaaataaatcataaaattaaagaacaataaaaaaagaaaaaaataatttcccaaaaaatttctctttttctcgttctctctcactgccctaaatctaagtagtcgtccaccaccattctcctccgtcccatacatcgccaccatcttacggcccagacctcaccacctgagcatccttccttctcgtccagacccttcatcgtgaagtttaacccaagtcgttgcgagcccaaaatgatccatcccaatcgcgagcccaagtcgatctatccccgtcgaagcccaagaagaagaagaagaagaagaagaagaagaagaagaagaccttacaaacatcaattgaacgacaatggtggcttgagaagaggctttgcgtgatga

SEQ ID NO: 164073 - DNA, 1363 bp, Cannabis sativa
tgatattgtattgtgctagcatatttttgtgtgtcaatgtatctctctctctttttttttttttattattttattttaaaatacttacagaatctatgtaaattttattgttttctttacttataaaaaaataaccacattattctacatatttcaaaataacaaattgtatttctaaattcaaaattatattttttttttcataattaatcaaacatcataatgctatatatataaatatatatatatatattaccacttaattaataaaaaatatcaatataaaaagataataaattaacaggtaacactgcacttcgcgcaatttaattccctaattatataataaataaagtattagaagaagacaaaactaataaaaattaaaagattcatcaaccaatataactctcattcatgcttctatatattactagttaaagacctccaattttgatcatataatatttataatagttcatataattttgtaagtatttatttgttacactattaaattgttattgaaaaaatagctacttttagtgacaattttttagttacaatataattttttttgtgactaaatataacttttagttacaacaaaatgttacttataactaaaacatatcatttaattacaagttgtcactaatttagttttagttacaacaagtattgtgactaaaaacacatttagtcacaataagaatgatatttaataattagttacaatttttcacttttagtcacaacaaaactagtgactaaaagtgaaatttttttgactaattataaattatcattcctatcatatttttctcttcctgcaaataaaatctgttaggaaaaatgattctcgatccccaactcaacaaaatcatacaaattatttaggtggaaaaaataaatgatttctgtattgttataattgcacttctcttttattttgtttttagcttatttggaaaccttttttttttctttatcctaatcgattttgatatttctttgctttgatttgtttgttgagaatttcgatcgtgtataatagcgtttgtttcatataattagtttaatttcaacattttgaatattctctgggagttttgactagaagaacatcatcaaagcttcattagtatcacgttaaagttttacctagaggtatgtttctctagttttattcttttactcttccaaaaataatgactaagggtttgtttggtacgtcgatcgtattataccgtattgtattgtaaagtattatattaaattatattttatgtaatatttttatgtaaaattatatgtgttattaatttttatgtccacctaaatatataatattttagtataa

SEQ ID NO: 164074 - DNA, 918 bp, Cannabis sativa
tctccatcaataccggcggttttcgctttcggggactcgacggtagacccgggcaacaacaatggcctaaccacaatcttccgaggcaatcacgctccatacggccgagatttcccgggtcgcattccctcgggaagattttccaatggcaaactcagtacggactacttggtctcaatccttggcatcaaggattacttgccagcctacctagacgccagtgtgagtgacgcaggcttagccaccggggtcagcttcggctcggggggttcggggcttgatgaagcgacggctacagttaatggtgttttgagcatggagtcgcagttgaattatttcgatgaagctataaggagaatagagatgagttttgggaagaataggagtgaggagttggttaagaatgctttgtttgttattagtgttggtactaatgatgttgttttcaatctctatggtttcactccttttgcctttcagcgttccgcttctgcttaccatgatatgcttattcaaagacttgcttctttcattcaggtatttataaatatatacactcttatttttatttaattactaattatatataatttagcttcccttttagtgttttgttacactaaatactatccacatcgaaccctataccttattttcggcacattatattgacatgaagcgtttgtggtacttatggtaatagggttccaaaaaatatctgaaattagttatcagatttgaaagaaggaaaaaaaaaagtcaatactcattataaatgttttttattttacctcataaactttcaatttattccctgaatttttttgacagttaaaaattccccgaactatggatattgttagatttaaagacttttgtctaatttcatttaattttattatttcagtgattgtttat

SEQ ID NO: 164075 - DNA, 1221 bp, Cannabis sativa
gaataaatacataaataaatatttttcattcttcttcttcaatactatcacaccatccaccactactatcaccacaaccacaatcaataaccttaaacataatcgaaaaagtacaaataaagacactccaaatcaaaatctctgttccaaactcaataaaaacatttgaaacaaaacaaattacccagacctgaaaaccacaaggcccaattcgaaaagtaggaggagggaattttgagcagtacgttcaggggtgtgatcaatgacaaaaagcaagaggagggtatttgggaggtgaaagagaataggaaattgatagagtttaatttgaggtggtttttgaagggagtgaggagaagaggttgtgagtgaccaccgccttgtttgggctgctgtcggcatttccagagaagacacggacctcggttttgtgaacggagaagagtttgggcaggtggggctggactgtcagggatggacggcttgggctggacggtcggggatggacatcttgggctggacggttggggttgagctgaccgtcgggaaagaaggtcggggaagaaccctcgagaaggacatggaagaaagaagaagagaaaaagaaaaaaataaaataaaaaatatttattattatttttataatttttaaattatttttttttcataatatttttataattagcattacatggacattaaaaaaaaattattgtgtcatttaaatgagttttttttggacgaaaatgtaataaaccaaacagaacttgagttcagtaaatttatttatcaaaattttaatattttgtaattaaatgttaaaaaaaaaaattcaagtaatattcttaaagagttttgagaaacgacaaaataattatttataataagttaaatacaaattatttttttacgtctattttggttccataattaagtataggggtatttattgaatcacaactaatggatttgaagccaatcgatccaatataattatttattagatattgaactttgtcatctaattcaatccaataaatttcagtcatccgatccgatccgatctaataaatatattagattggatcggttctaaacattgggtgcattgagtagttttatattggattggatccatcaaatctattttaactaccatttaagttaatttcattaaaaatatatatatatatatataacataatttaaaactttataatc

SEQ ID NO: 164076 - DNA, 1055 bp, Cannabis sativa
ctggtaaaataattccaacatcacgaagtcgggctctaggtttttttaaccaatcttcagtggatcctcccaaggttagtggaaaacataagcatttagcatcgttgttaactcttaataatgtcatgaccctgttgaattatttcagatcgatggtcattgggatcaatatctctagtgtactagatacatctttggcatcttaaaatcctcagggaattcaacttctaatatgttatttgcgcatggctctcagtcctcatagttagactcagaatcgtcacccttttgtcttctagataccttttctatgtctttctataggatagcaagttcagctaatataccttcgctcaaaatatccttatggggcacaggatcatcctttcaggatttaatgcgagtccttaggttccattgatttgcattaattttttcccttaagcccactagagggtcccttctggttagaccacgctgttcctcccatccttagtgtactaatacactttgacatttcccataaaagcttcctacaactctcaattaaagcactaaaatattgactaagatttttggcaactcctaaatctttggctaagaaattaattatgagtagagaataatatttttacgtggttcatgtgttaattaaccgtagtccacgagtcacttttattaataaataatattattattacttgagagtatattctctcttacaatttcaaagttctttttctcctctattccttttttttcgaattcccctttcctttgtatttatagaatgagaaaataagatattctttaaaggatgggcacatctttcctttacctctaagccctacatgacttttttgataggtgtaggaaatagtatttactatatgtacatatggaacgctctgaagtaggagtttagtgagacagaatttgtcacgtatgcgtgtaatatcccaataagcttaataattaataattagggtttatatttatattatgagttaaccaggtaatgagtgggatgataatccaactaatttagttcaaca

SEQ ID NO: 164077 - DNA, 2464 bp, Cannabis sativa
ctccaaaaggtgggttaggtctataccgattagcatcgaggatagagagttgagcgatgatctagtggaattaggtttaggaaattttgatattatacttggaatggatttcttgtcctagtatgttgcgagtgttgactataagcgacagatggtgatcttccaacctaaggctgaagaaccatttgtgtttgtggaatcaattcagggatcttgaattccaataagctagattgatattgcaagcgaaagaccaccactgcaactccataataactcacaatcttaacaagaaacccctaataaaatttacagaattaaaaataatgcattgtaccatagtattaaattattaaagattaaattcttactttaataaacgtttagattcaatgtttttatgtctaaaatctggtcatcgaagctacaagcaacacaacagcaccaacacactcactttgtgcttacaagattattctaatagcgataatatctttttgggtgttaaaaatgataaagtttgcaaaaaaattaaaagaaaatggtggagaaattaatgggaattcgaggctgaatcaatagtggttggtgaatcaatagtggttggtgagggcttcggctgggtattttgggaggagatggatgttggaggagacgaagtaattcattagggtttgttgagtgaattttaagaccatatagagtcgattattatgtaataaccgactccataggggcacacatacatgtgtctcctatggagtcggttattacataataactgacttggtaagcctttcaaaattacatgtgtcctctatggagtcaattatttcataataaccgactccataggttttttcatgagactaaaataattgcttctaaaggtcgattttgtagtggtgtttttactatctctgcttagtctatttcatagtctaatcttttagtatttgctactgtaggtgaatatttgcatatctgtaagtatgtgttgtttttctattcgaatactttctatttttggtattttctaattttctctgacaacatgggaatttacttgccaaatatattggacattttatcagcgcaaatttgcaccaacaaaattatatgaactttagaaatttatttgcaccaaatgacagtttcttttatcacttttgccggcgcaattaatgaaccgcaccggtaaaaggggaccttcggtggcacatattttttccgacaaaattttagctgaattatttagagcttcttatctcatcttttgcaggcaacttttgccggcatatatggcgaaatgcggaggcaaaagttacaattcttgtgatgatataattcaataattgtagtagtagtttctggtttatgttcaccagactctaattgcttgacttgttttgtagatatgggataaattttagcttcacaaaaaaatattttttgaggctttgacaaggaagatctcgaattgcacagagaagaatgctgagaaaaaaaatatatgggtatatagtcttgctcaggacaatcatttgggcgatcccgaggttgatgagtccattgaaggagatgacctggccctagggttgaattatcttttaaggggatcatgttaaagataaaatttgggctagactttaagtatcatgagaggtgtgttaggcttaggataaatcacttatcccatttaataattattgtatttaaaatattacaaaattttattataaggtttcagtattacattagttgatgatttgtgcacccgcccacatgcactagattgctccatatcacatttttgtggtaagtctacgctgtttcaaaatctgtgtggtcccgtcagttttttgttatgagatttcacttatttttgtggcgcactaaaacatatttctattagtatttagcttcttgttttcactatgtaaagtacgtaagaactcagaaagcctagaaaagtttatgcttcctacctttttcttactcactttattctttcctttttcttccttaaaggtttcaccttaaaggtgagaagtagagactaaaggtttttctcttttttttttttttgattagaagggactaaggtttttggagaaagctttttaatcataagggagaaaggtttcacattttttttttttctgtttttattttttcatgggagttatgaagttttcctcattgggagaagaaaggagaagaagaactggggaagaatgaataagtttcactattcctcactgtgagaagaaagattaacaagaaatggggggaagaatgtgaatcttttttgcttattagagggattttatagacagtaggctctattatcacaaagctatattaaaacataaggctatattaatgtaatatccagtttatatacatatattggtatttggtatattaagtgtgatacaattaaattattattattattttt

SEQ ID NO: 164078 - DNA, 1204 bp, Cannabis sativa
agacaaggacaaagagaaagagaaagttaaagtaactgctaagagaactgtccgaagaagaaaagctagttcagaatgagattgcttgcttttcaaggcatctgaccattttttttccatccaaataagagttgtaatgtataaattagtgagactttatgacattagtgaaataaatactattgtatgataattcttttcataacttctttctcatttccattgatattttttcagttttagcctataatttccaggatttttccacactcctaaaaaagctacggttcataattttatttgaaaaaaaagatcgaccacagtgggagtcgaacccacgaccttttgatccgaagtcaaacgcgctaatccactgcgctatgcggtcatttatgatgtttactgttttatatacattataatataatgtaaatcaataaattcccctaagattaaagagactaattatttgcaattagtaatcgttttgtcaaacctcatcatcctaatttattatgattagtacaatatttaagttcaacttatgtacctgtaaaaggaaaactgcacaattttatttgtatgtaatttaaacttcaaacaacgaaacaaggagcttagagcaactccaaggagactgcatatatattaaatgtcgtgcatgcgccgtccaaagaagctgcatttcttgcagcattttgtggttttatctacagtgcacgtcatatataccgtgcactgtagtcactgcataattttttatttttataatttaattaatatttatatatttatattattgtatttgtaaaatcaagaattattttttgagaaattttacaatgcacatttttaaaagtgatgtacgaatctactcctatttgttttgcaccgacaaacttttttagtctatttttttatatagtaaactatattatagttatttaagacatcctgtaatattttaaaaaatttaataagtcgaaaataatgcacttctttaaaagtggcacactgatatactcctacctgtttctgcattcagaaaacttgtttagtctttttttttttaatgattgtgtacattattgttaatacatcctaggggtgtacatcaaaccgctcaaaccgctcaaaccgcccgcaccgcaccacaccgcaaaaaaaatacagtttgaaattcttcgcggtgcggttgcggttt

SEQ ID NO: 164079 - DNA, 2227 bp, Cannabis sativa
aaccaaactatgcgtggtcattacttcaccacaactcattggccaagttgttcgcgaacaagacatagtgtttgccaaccgcaatcttagtatttgttcctcaatcaccacatatgctggccatgacattgcttttgcatcatatggcccagaatggaagaatctccgaaaaatcttcattcgtgagatgtcaagcaataccaaaattgatattatgtacggtgtgagaagaggagaggtgagaaaatccatcaggtacctcttcgaaaacataaacaccccagttgatattgggaggttggcgtttcaaactacaatggatactgtcataaacatgacgattggtgcttccttagagggagatgacgttgctattgatatcggtcagtttaagaaggcggttgaggatctcgttttgataaatgggaaatttaatatctctgatgttttcccagtgcttaagtggttcgatatacaaggaatggcaagggagtcaacaaagatttttcaaatgtttgaagccgtgtttgataaagccataactaaacgaaagaatactttgaatgatccagtgcccaaggcgttcacaaggaaggactttttgcagtatcttatggagcttcatgaggatcaaactagcgaaactcctattaccataactgaaatcaaagccttgcttacggtacatatatatatgtatacttaaacgtgattatagtatttctaaataggactaataataatagtatcattggctcatataatgttgtgttaaatatataggacactttcttggcagcaacagacactacaacaaccacagttgaatgggcaatggcggagatattaaataaaccagtggtattgaataaaattcaagaggaactcaaacaagttgttgggctgaacaacaatgtagaagactctcatttatcaaaactaacctacttgaatgctgtccttaaggagactttacgtttacatccaccagtaccctttttagtacctcgtaagtcaagccaatctgctattgttggtggctatactatacccaaaggagctactatttttctaaacgtttggtccatgcaaagggatcctaatgtttggaacaattcattggagtttttacctgagaggttctgtggagataaaatccaaggagacattgattataacttttcaggtcatcaaaatttcaactatcttccatttggatcagggagaagaatatgcgctggaatttctttaggagagaagatggtgatgcatttattggcttctttcatgcattgctttgactggaaattgcctgttggtactaaggttgaattcttagacaagtttgggttagttcttaagaaacaaactcctttagccgccattcccacccctaggttttctgatatagacatatacctacactagtattatttaaaaacatttaattgaatgaatagtatatactgtactactttatcaatattgtaatgtactactttttctaagcctggatgtataataaggtataattttcatagtaatattattgtacggattgtgatagtctgtttacttattattatgaaattagagacaagaatggggaatgggatgttggtgttaaattatatattcagagtttgcagccgactagtggttttggttttccaaaaaataataacaataacatctaatcactactacaaaaatttgtattggcactacaacaaaaaggacttttcatcacactttttacacatgaaaaaaaaaataaaaagtgcgataaaaacttttgatcccactttcacatttggagcattaaaaaaaattggaacaagggccttgtatggcaaacagataaaaaacagtgttaaaaggactatttttatgcatttgccaaacgcaactctagtttttaagtgggactttttatcccaatttttatataaaaaccggaataaaaagtcccataatctcaaggccttttaatgttgttaagcctttacacatataaaaggatcattaggttttaaggtttcatttacacatatcagtccctcccatccgactctctctcctatccctctctaagcgactgtgcaacatttctttctgtcattttttttttcttcttcatgctcaagcagctcaaccttcaaaacagtctgctattttttttatcaacctctaaagcccgagccacgacagaaccaaaaaaacgacg

SEQ ID NO: 164080 - DNA, 1171 bp, Cannabis sativa
gtccacataaatttgagctagtttggtaagcttatcatcctttctaattagaataaaataagaagactttgtcagatgatcaacaatcacccatatactgtcatacttcaagggtgtcaatggtaatctcccacttccattcttgtattattgaaatgttgataagattcttattgttatcaagtgttatgggtcaagttagaatgttaaatctaaagctaaaaaagagagagaaactaagtaaataaactttacataaatcttaaattggcttaagtggtaacaaagaggaggcttttatatttgagaatgagattaaattttatgaacatgaaaatgatatgtgaatgaagaagaaaagaattaagttgcatataaccatatgaatgataataaagatcttaacaaatttaataaagataaagataatgaaaatttctcgtgaagatgctaaaaatgcacatatatatataattgaaaaatatagtttttcttttgacatagatgatccaggtacttggcataaaaccaaccaaaatattaaatatttcttagtttaaggaggtcaaaaaagagacattagtatcatctcccctaaagatgacagtagatctacctaatggggagaagcaagatagatagtgatcagtatatctattactttaaatattttttttacaacttgtgggtcaattagttgatgatggtcttaatgattgatgtagttatctaatatagactcaaaattcatgaatgaagtaagcaacacattgagtctaccactagttggatggaattagagaaaagactaaagttgaagttagcaattgatacacgtttacaaaaacaaatcaagcaagtgaaagaacattggaaacgagtattagagagaatcattgctattgtgaatagacttgggaaaaataatttggcattttctaagaagtagtgataaactatatgaggaaaataatagaattttcttacaagtgttagaattgcttgctgaattagattcaacaatccaagaaaatatttatcgtattatgaaacatgacactgattatcattcactactacaaattaagcttttagtgacactatatagtgacacacataaaagtgtgggtcactaaaaaattaaaagtagtttttagtgacacacaacatt

SEQ ID NO: 164081 - DNA, 1523 bp, Cannabis sativa
aactaccgtcttatagttatgtatgtccatgattagtataatgactcaaaagaactaatttaaaaaaaaaaataatgactcaaaacaattgttcaaaaaaaaaaattaaaaaagatgacttgatcattatgatcatactttcatattaaaaaaaaaaaacatattttcatgatacttttaaagtcataaggtaattctaacctaacactttttcattaataaataaagttatgatatataatacttcatgtcttttccacgtcccctaaattttatatatattcttaaatgattaatcttaaccaccatatataattaagaaatatgattcttgggttcatttttttttctttggcatagcagaatcatgtggtgattagatattaatagattcctcttctcaaagctgtattaattgcatcaaagcgtagatactgatcctatacaacagttagctagcctcgtacatatattttagactttaattttaaattacttcttttcttaatgtttattggttctttctattttcacttcttaattttcttgaaactgatacttatgttattaccataattatcaaatcatcaatttttttattatttaattataaaatagataaatggttactaatatataaagttttacatatttaaattattaattttaaacatatgaaatctatactaaatcgcaccatatggataatttttttataatgagcaagtaagaattttattttactaacaatcaaccaaaataatgatgtacaaatacaaaaccaaagccaagaaaaggcaaaagctcacttgttgcaattaattgcaaagccaatccttatcaatttgactaactttttctctatttatttttgagagattttgcttctaactatttgtttggtattattatatttataactttacaaattgtataaacttgttggttccaatgagcattatttctaactgcttgcattgagtactgctatgaaaatttgttttctggctctagtttgtttgctccaattatactatttgagaaggccatcaagcctatagtgattagtaccaaaacctgcccaagacagcatttatgaagcaattaccttactataacagcattgaaagaaaagatgagaataagtttcaatctcaatagcacaaatcagatacgtatcctcattcctaatactaagtttggccaaatgatccctagtttaaagacaggaattaaaagctaaccaagttataaattgatgctttaggagattgaacctgttggcagggacggccctgggcctaggcagactaggcccgtgcctagggcccactccaacccagggcccaaaaccagccagccatttaacccttaaaaaaaattagaccccacaacacccatatcttccagcggcccagcccagcccaattacccacttcctcagcccgtccaaattccaaccacatatctattgacgtgaagaaaaaaaaaactgaaaggtcactctctctctctctctctct

SEQ ID NO: 164082 - DNA, 2491 bp, Cannabis sativa
gagctttgacaggattattcaatagctgcaaaattccttctattttaaaaaagtgtggtagttcatggcattagtaccaactaactaaagaacgtcactaaaagcttgcaaactggaaaggccttccacagtacctaccaccatttattgaatcagggtctgcattggaatagcagcatatagcttccaaaatgacaacactcgtttgatatagtcagcagtccaaatatccaggaaaacacagcctagttatatcctacaaaacctatccctcataatcaaacctaaaacgtcttaacaaaaatatccctcataatcaaacataaaacaatttggccaaaggtgcaaaattaacaactactatgagtgatcactaacaaagcatataaaatacttccaagtcacataatatcaaaaaacggatagaacaagcaccaccacactaaacgatatcaataatcataaccatcacaacacaatacacgtgtatgtaaccatggcactcgcaataagaatcatttacaaacatttacctgctaatggcaagacaacccgagagggagctgcaaaacaaacaagtgtagtagtgtacagcatcaaaagtgaaaccttactcgctggtaaggtattagtattagtagatacaatctgaaattcagtgagcctgaaccacggccaatacttacttaaagaaacaattcacagaataatatgtaatatttcttattgcgatatggaatcaaacaaagaatctctttcaacatactacacagctgccaagatattatcttttagactgtagatcataccgatccccttgagatttagaagtcactaaagatatggcctattgctgcattgcaacgataagcaacaaagaattcagtcagagaatcaaacagtgacccagttgtttcatacgttcatggaagttaatgcattcagattttgtactatgataatcaaattgggacacgaatatgcgcatttctagctttccatcattaaaggcagaaactaaattgctagtaaccgataaaaagaaattctcaatacaacagatctgtatgaggtaaatctctgattttattattgattttagttctatcaacgaaaattttccaaatttagcgatggagaagtaacatcaagtacagatagaaattaatctacaaggatcgaagagagagagagagaaaaaaaaatattaagaacttcacagtttcatcaacaggttcattcaatgtgcagcaatatcactactactgaaaacgtcgattatcggatcagcagcatcaagaacggggctagaaggattctgactcggaaacaaaaccgacttagaagcaacaagcttcttcctctgaggacatctaggtccgaacatccttccggaaaagcaaggaaatccatccatggcgatgaccgtcgattgaccaggcgttgacgatggcgacgaaggaggagatgaacggatctgagcaattgagagaaagcggtgcgatctagcactgattcgcgagtctcttatttgagcgagagcaccaggcttgaggtacttgagaaaaggctcagcccggttcggggacgatcggtgaagagaacgagttctacgattcatgacgacgaagactacgatatagaattttaaagaaaaaaagagagaaaaagagacaaagaagaagaagaagacggcttagggttagagagagagagaggatggtaagatagtggggtttgggggtttcttaagaagggaagtataggcgggaagatgtggagggagaaattgggaagcaagggtttcaaaaccatggattgcgtgtgtggggcgcgggatcttcttcagaactcagaactagtagggctttgtttctaaaccatttagttattcggcccttttattttgggcccggtgggccgagagacttaaaataatacagtgacacgtggcagtatgtaaggcatgtttttggattaaagcgtggtctacactacacgtacgtctgcctctctgtcgatgatgtgaatgtgtagcaaaatctagaccgttggattaatgtttgtagaacgttgattggtgcagtggcgtagtttatgattacgtcctatccattcacttctattttgtcctctcgaaaatcttgctcaaatttggcgcttcccaaacgatttttttacttttagcccgcccgccctgtttttttaagatgcaccaaattgcatcaccattattttactttccttgggtgaataactgaatattatgtatggatgcactactttctttaaggaattatttcacaaaaattacaaaaatacaatttcacggaatttaaatatttttatgattttcttaattttatttacaaaaaatataaatagagttcggtaatacttttttaattagttttctatttttaaaagtagaaaagtaaaaatatttttcaaaaacatgttttataaaactatttttacttttcaattttat

SEQ ID NO: 164083 - DNA, 1863 bp, Cannabis sativa
  modified_base (1656)..(1656): a, c, t, g, unknown or other
gataggtttggttaaggagtctgctatctcgtgtgtggcaggcacatgattaacatgaatttgttgttgaagaaccttgtcacgcacacaatatagataaatttcgatgtgttttatgcgtgcatgaataatagggttggcaacaaggagatctgtactttgattgtcgcacaagatggagggaattcttggttgataaatatgcagctcattcaggaggtactgtatccaagacacttatgagacagtggtggctaagcttctgaactttgcttcagttgaagatcttgatatggcaacttgcttttgagacttccatgcaactagattaccacaaaggtagatacaatatctagtagacattcgatcatccaaatcaaaggcccaatcagcatcatagaatgtttcaaggttgaactcttaaactggtttcagaagcaggccatgatccaaggtgcttgcaatatatcttagaatccttttcacgactatccaatgttgttacagtggcttgtgcatgtattaacaaactttgtttacatagaaggcaaattcaggccgagttattgtagcatattggagtaacccaactatagatctgtagatagtaggatctttcataggctcactgccatagttggacagtttaagtccactgttcattggagtactttgagtgttcacattttgcatttcagttttacacagaaggccttggagatacttggtttgagtgagtaacaagcctttagatgtgtgaatagtccgaatcccaagaaaataatcaagttcacaaagatccttgagtgcaaaagtgttactgagatctgctataagggtattcaccatgctatcattgttgcccataaccaaaatgtcatctacataaacaagaacatagatgcagactgctgtagtgaacttgatgaagagtgaagtgtctgcaggtgatgagtgaaaaccaaggctgattaacactgttgagagcttgttcaaccatgctcgaggggcttacttcaagccatatgtggctttgttgagcttgcatacatagtcagggtgtgtggcactgataaaccctagaggttgttgcatgtaaatttcttctttaagataaccatttaagaatgcattgttgacatccaattgtctaattgaccaatcttttgttatggcaatggtaagaacaactctaatggtgattggctttacaacatgactgaaggtttcagagtaattaaaccaacttgttgatgaaatccattggcaacaagtcgggctttgaacctttcaacaaagccatctttgttatgttttactctgagaacccatttgtagccaattggttgtatatttggtggaagtctgaccaggatccaagtgttgttctttgtgagagcgtggaattcattgttcatggttgcattccattgaggagttttgagagcagattgaactgttcttggctcacaggaggctaacatggcttttggttttctgatgcctgccttgagtcttgtagtcattggatgtgttgctacagatgtgctggtagtagttaggggtgttcatcaaaccacccaaatttctcaaatcgcccgcactgcaccacaccgtaaaaaaatgcagtttgaaattctttgcggtgcggccgcngtttgaatttttcctaaaccgcgcggtgcagtgtggtttgcggttttgaattgttaatacatgaatactaatttttatattcatttaggtctaaattgcggtttgcggttcaaattgcatcgcatcgcacattataaaaaatactaatttgtatatttatttaggtccaatatatgaatgttcaactcaaagtccactaattattgt

SEQ ID NO: 164084 - DNA, 674 bp, Cannabis sativa
tagatttcatttatataaaatacggtcattcggtgtattttaatattgtatttttattattttgttgttaattttttgttatttgtatattattttttatgttatttgatgttattttcttattatttttatatagtttcgttatgttttcttctatttttatagagtactgtaaaaatgtaaaaaaaaaaaaaattgaacgtaaaaatatcaaaattttataataatttgtgttttatgtaattatcctttttatctatctataatagaaaagtagataaatataggtgtatatataaataaaaaattttcatatatatataatcaatttttatggtgaggcatttaaaaaagaccccattagggcatttaatatcttcttctaattgggcaattgcatggtaatacggttctcctaagtgcatcgtattaaaactggaatcgatttaaattttttgtcttattaaactattttttgccatctgctatttttgtcttccatatcaaagatgagagtcaatgagtataccttccttaaagatgcgatttgaatgtgtaacacgtggcaagcatcaatgttaatacgactgggctatcggttggccaaatctgaagttaacaaaatatatatatgttaggttttgtgccctaaataaaatctatttaaatataat

SEQ ID NO: 164085 - DNA, 1258 bp, Cannabis sativa
aggaagaggaagaggcaaaaactctaaaacgacttgccaaatgtgtggcaggtatggtcattcagcagcctattgttataataggtatgatgaaaacttcatgggacacatactagatagttataatgggcatgacaaaaaagatccaagtgcttacatagcaacaccagacactgtgaataatgaaatctggtatgcagatagtggggcaagcaatcacattacacctgaagggaacaatctcagtggtgctaccagttataaaggtaaggacaaacttacagttggaaatggtgagcaattagaaatttcaagtgttggcacaaatcagtttactggcactaatttatttttaaaagagctgcttcatgtactaaaaattgctaagaatcttatcagtgtctctaagctaactgctgacaataaattttttgttgttaatgatctggaaacaaagaagatgatgctgcgggagaaacttaaagatggcttgtaccaacttgagggatcaacaaccagctcttcatcaccaacatctttactatctttctcaaaaactagaaattaatcctctaattctcctggttctgcacatgttttgttctctgttgtgtctaagtctgttgcacatgagtttgttgtgtctttaagagatcaatggcataggaggcttggtcatccttccactaaaattttaaatcaagtaccttaatataggcaatgtaaacatttcaattaataaacaacaaactttttgtgaggcatgtcaacatggtaaatcccacttactcccttttaaatttcctcccaatagagccaaacatgtgcttgattcaattcacactgacatatggggtgcagccccatgtcaaatacaaacctaaaatactatgtttattttgtcgatgattttagtcattatacatggatttacgtcttgaaatccaaagcacatgcactcaatgcgtttattcaattcaaaactatggctgaaaattagtttgacaggaaaattaaatgctccaagctgatggtggttgtgcattctatcaacaagcacttgttaaaacacaaggtttgataaaaattccattagtgcttagagataagagataaggtcaaacataaactaacctaactctgaaagactacacctcaatacacaaacaaatgaaaaatatatgtatatgaatgggataaaattcaaccaaaaatttagggtgtgtttggaagtaactgtataattactaggtagggt

SEQ ID NO: 164086 - DNA, 2021 bp, Cannabis sativa
tatatatatatattattgatacctttaacgtagttttgaaggtgtgcattaaattatatttcattcaattaggacgaccatggtttttgcctacggaattgcaattccataaagagcattgaatatttgaatttatggatttaaacagctttgctactttgccaaagaaaaaaatataaataaataactttgctctctttagcaaaaataaaaataaatatctttgttctattgaaaatattttcttctattattatttttttttctccctttctggtttggtcaaacggtgtataaaataattcatatgtagaaagaaatgctttatatatgagaaagcaaagaaggctaaaccctacataaagtagaatgagagatttgattttgaggatgatatattttctatattaaacaatacataattttttgaacagaacataattgatgcttaccaatttcgtatatctctcctccttttggtatgtgggcaaaatttatcattagctacacaattatattatgttaagatctaaaagcatgtttattaaagttttttttaatagaaagtaattatacaatttagcacatttatctgaacgtgtaattacataggtaatcgagaaaatttaactacactctatttcttataatactgttatcggagaaaaatagacaacaccgaaaatattaaaacagagaattagaaaattacttctgttattgaaatctaacagaattatacaaagggttacacgccttatatatagactaaaatattgtatggacaacatgactaatgaactaacttaatcgcgattaactaactctaataactctaatagacccttttaagatggagtgtgaagattttttacacccatcttggttataaattgttaaattgagaagggaagagtggttttgtgagtatattggctaatttattgtgtgaggagacatggttcatcttgaggctatcattgttgattttttctcgtactataagacagtcaatttcgacatgtttggtgcactcatgataaacagagttctcaaatatgtgtattgattcaatgttgtcaaaaaagagagttgaaggcatgttgatattgatgttaaaatcgtgtaagatggaatgtaaccaagttagctcacatgtagtattggtcattgctctatgtttgagttcaacagaagatctcgacagtgacactgtttgctgctttttagacttccatgaaatgagtgattgaccaaggaatatgcaataatggtaaactgataaataactcatttaatctcgttctatgacttaaactcaaaactggacgtttttctatcgattaataacatgacaatactttaaatattaataaaatacagacatctagaccctggaaaacaccccaaacggcttagcgtttttcttagcagaaacggataaaacatgggttttatactacaaacctaaccaaaccctatcaaactttccagaacagttcaaatatcataactaagcataacccacaactcaattatccccgaaacgctgaaattagaaaactaccatgggagctcaagcttgagaattccctaccaaagaacagctaatcaagctttaaaacaactctaatagtttaagcttataaacgcgctctaacactaatctaaccacatagaactaatcatgcaagaattcaacacaaaatttatattttcttcaaaaattcaaatagaaaaagattgagataagcttaccttaacttttctacaattagttcaaaccttgatccaaatccttggatgaactgaggtaaaaatttggtttgaaattttggattttcttttggtttctaagctttgagaaagaaagagaagaagaagagataatgctaaaatttgatttttttttcttatttatcttcttatataacttaattaaaactaattttaaacctattttcttgtaacgtccccacttcaagtctctattgggttcttacacccacggactaatggct

SEQ ID NO: 164087 - DNA, 1447 bp, Cannabis sativa
ctctctctctctctctaagcttcgatcgatgacaccctccttctcgttgccaaatagaccctagagtctttcattcccttgtcatcgaccctccttctcgtccgtctcgattttttccaccctctttcccctagttctttactccttcatcattcttgctcatgtctctctctctctctagtatcaatggtgagcaccactcgtagttcctcatcataaccccaagggccgagaccaccaaagctcgagcatcgcgctaatatggaaaccatgagttaggtctgaagtttgattttttctttcatgagatcttgttttataattttgtgtatatatgtgagtgattatgtatatatatgtgtgtgagttgcagtactcattccatcgaatcagtttgggttgcaatactcaaggaaatgatattttattcttgaagttcaccatctcaggagttttaaatcaatttcttcttcaaatgatgaggttaattgtatttgcttcaattcaaggtaatatttgttgagacaaaaattatcaggacaaaaagcatcattcatgtcctaaacaagacatagtaaacgcttgtcgtttgtttttttgggttaattaattcaatcaaataaatatttgaatttaaaacgtgattaaagatatttcaaaatagttgagatattctcttaagtagttagaaattttcttaccgttaaagcttggggttcgtcgttcactatgcttgtagccattgcgcgtgacgatcagggtaacaccagatgggttcataccaagctggttggttccctatcccctcttacatctgaagcttctgcagtcttgcttgcagtcacaatagctataattgcagcagacacccatatgtgatctttgagggtgactcgaccaatactattaatgcaatgaaaaaagaggcctccttttgagaaattgaaagaattgttactgaagtttacgacattaagtcctttttttctcttgttgtaactttaattttatccttagaccatttaattttgcagctcacaacactactaaatgtgcacttcatttttgtaaaactagtaatatctctttggaggtgatccccagtaatgttttttgtaggagtgttcatcacaccgctcaaaccgcccgcaccgcaaaaaaatacgatttgaaattctttacggtgcggtcgcagtttgaatttttcataaactgcgcggtgcggtgcgatttgcggttttaaattgttaatatgcggttcaaaccgcactgcatggcaccgcaccgcatattataaaataccaatttttatatttatttagatccaatatgtgaaggcccaaccgactcccactaattattgtattgtcaaaacttgacacttttttttttcatatttattttcaagccttatggtattttggacaagtgttgctcaaggtttatt

SEQ ID NO: 164088 - DNA, 2988 bp, Cannabis sativa
  modified_base (397)..(397): a, c, t, g, unknown or other
attattagcttaatattcactaaaaaaaaatcagattgcataattaaaaacaaaccactaaagacaaaagctaatggggcaaaatgaccattttgcccctcccacactaaaactcataaaaggtcacttaggggtatttttggtaaattctaaaatttatactattcgcgatattcccaatgtctaactttattgtcccggtatactaaaaatactaggatgttgacaaacaccgcgttccaatgttgctgggcacaaaacatgcaaaatttatgaaattctaaatatgacatatcaaatgcattcttaattcaaataaattatcataaattaataatttaaaactaataatcaagtttcataattaaaccccaattatctgctaatttctaaattnaagctaagcggtctttacattaatagcctccaaacacttcttgctagatgaacaattaaaaaaacaagtgtttaatgttttcatttccttctccacacatcaagctaagtctcttctacataaccaaccacatgatgaacctttgttttggggtcattaatttttctacaaatttgctaaaatatactttttcttcatgttcaaataatacctggtgatcaaattgaatactataattttgtgatatgatacaatcttggctcatcttagctttaatttctttttcacagcaactaatcgtctctaatactaactccagtacttgagattattttaatcccaccaatttttattcaccaaatacacactgtttatccatttgacaaataaattattcttctttttagtaatttcccacaaatatttctccagagcagtcacattctaatcttgtattcttctaaattccaagccaccccctgccttaggcaaacaaataatatttccacaaaaacaccttacaaattgctttcacatctctaagcaatttctttcgtaatgtcataagctgagcccaatacgagtgtatggaaattaacactagattaatcaatataactctacttatataagacaaaattttagagctctaaattctaattctgttaaatattttatccaaaatacaattacaatcagcagatgaaattttcttagagcaaattggtattccgaggtacctaaaaagaagatggttgcgggaaaaagatacctcaagcactcgagcaacttgaatttctgccattccattacaatatattgttgtctttgctgcgttttttaatatacccaaagtatcagaaaagagtttcaatcctcttagcatgagtgaaatggatatgccgtcccattgcaaaacagtaataaatcatttgaaaaaaaaatacaagtggtttccttttaacattgaacacttattatgatatttaaatcttaaggttttttgcactgaatgtccctaaactatatgtgatttagcaagttggttcctaaacttttttttttggtaaatgggtccccgaactatataaattttggcaagctggtcctcaaattttattttttgataaattagtccccaaacttatattttcttgaaaacataaagtcatcacacttaaatgatagtattttattcattcattcatttatttttgtattaattttaaatagttttatattaatatattatcaaattaaatatatatattttttttatttatatgtatatttttaatataccaaaatattaagaagaaaagaacaattgaaaaagtttaaacaatatatattgtttttatataaacaactaagtaaattatattttaaaatttatttttcatttttactcccaggcgaacccataaaattttagcagcgtttatgcaaaattaaataatcaataaatatatacatttaaaaatttattaaaattataataccacatatttataaaacaataatcaaatatattataaatgttaaaatataaaaatttgagggggttataattctctttagccattatatgagttccttagtatttatactttttttttatatatatatgattaaaatatgttttttaaaaaataaatattataattagatgattaattaaaaaaataaaaataaaaaaatattaatataattatttttatcaaaatatcaacattaatattaaaattatttgaatttaacacaaaaataaattaaagtaggtaaaataaataaaaatatcaatatttaagagtggaaacttaatgttgttaaaaaaataaaagtttggggaccaatttaccttaaaaatttggggatcaacttgccaaaacttatataatttgaggatcaatttgccaaaaaataatgtttggagaccaatttaccaaaatttatatagtttagggacatgcgggacaaataaccactctccaactttaatcataatctgaggtaggtcttccattcctagaacaagaaaaattaacttttatttcttgtacttcttgaattctgtattctgtaaacaaaacacccaaaaataagagagagtcgtagactatgtagttttatatagatttaaccaaaactacgcaaatatcatgtatcaattattctattatttattattcgctaaagttttattaaacttatacttttaaatcacaaaaaaaaaaaattcatttattattaacgaaattttgagttaagaagttacaactcttttattttaattataatatttatttttactaaaaataagattttttttagttgagacattaatataaatatatacatgttatgctattaattataatctgttattttttatttttaaaattaactttatattacatttttaaaaagataacataaaattttatatatttattataatatggctgctcctaaagttagacaagtcaagtgtgcgtctccggcacttgaatgtttagggccctcaaactgcaaaaaaaaaaaaaaaactaggaaaattaccccacatactattttttttattttttttt

SEQ ID NO: 164089 - DNA, 2418 bp, Cannabis sativa
gtgtgttttgattgatagaggttcaactattcccattcctgtaaccaacttaattgtgagtttctgttactttagttaaatatatggaatcattataatttatcaggctttaattcttctacggaaaacaataaagtaaaacttcttcctcagacattacataatgcatacagtccttcaacaacatttcattaaacgtaaaatacacttcaaaacaaacaaacaatgcaatgatgcaatgataaataaatcagctcgccttaaacaacattgtacatgtcaaacaaagctgaaagtaaatattaacagcacatacaaagatgtgcaaggttccaattcaataaaatatgacatacaagcagaagagacacttcactgagttacttatgaaaagaaggccacaattttatgtcaagaaagaaataaacaaagcaaaatattacctcagaaaccacagcctcattctcaattggattcattgagcatgttgagtaaaccattctcccaccaactttaagcaaagttaaacctgcattaatcagcccatcttctgttaagtttggctcacagacaggtgaaaataaataaaatcttgtgagcgaaaaatcctattttcatttaaagcataacaaaaatactatgtaaacatatgactaaatgaccaggatttttggggtgttcaagaaagtacattaatatcaatacttttcaataataatcatatttgtagggaataatttacataaacctttataatcaacaaataaggacattataatacatgtataatatgcaaccaggaataatatgcaagacattaaactaacgcatcattagaagttaaaaacatagaagggaaggcctatagtttccaagtgcattctatccatatctatcatcagcttagcatcaggccttctcttgcttacaagttaagctctaataaatttttcagaaaataagttagaaagaccaatgtgcatacgcagcatcagcagccctctccagccaggaaaattaagcaatcctaatccctgccggatacataatttggtttcaaatcagcatcaacattttcatttaataggaagttaaatcaaaccagggaagcaaattaatctagactttgccagataggccgaaaacaaaaaaacaaaaacttaagtttaaatacagtaatagtactgcatataacttgcttgagcttgtccttactatttttttcagaacaaccaatcatttataattgcctgaaaagaggggagggggaacgtcaacctacatatcctaaatcttatagcattaagcaactatttccaatgaaggtacctcgcatggctatctgaatttgtagactatgaagcccattgcccagtcctgtatgcctgtatataaacaaagggagcagatatcattaatcattgcaagtactaagttaaacaagattttctttataaaagaaaatgggtgtggcaagaaatttataccattttctccacatatcaggtgccttacgaagggtaccatctccactacaaggaacatcacataatacacgatcgaacataagttggctaatagttgagtcttccattacattttcagatgcattaaaatgacttctgtttaaacggcagccagggaagtgctgagcttcatgatttgtgacaataaggttggcggtgcacattcttttggtttggtgaataagcagatggcatcttgcaacatcaagatcatttgctacaacctagtcaaaagaatatattgagagggagttctcatgcaaagtaacaggatgaagaaaagtgcatcacacggtaaggaaaggattatccaagaatatacataagagacttacagcaaaaggcaaaatcctacgtaaagaatgtaacacaaaataaactcagcattactaaccagtccactaggcagtgttcctgatttgcttgaacgatacacaatctcaaggagttgaaatgttttcgaaccgggtgcagcacacactgaggcaaaatggaacaaactagatataacaaataaataaacgaataaataaagcattgttttattttaatttttttgtttttaagtttacatgaataagttatcaaattgttaaatttataccatagagacaagcaatcttcttaactttcaaacttttaaacaaaaaagaggaaactttctgataagaaagtggcaacagagatttattcatcttcaatccatgtacttttcctttgtagctaaacaggggacggaaatataagggtgtgatttgtttaggatttgaaaactactttatgtttttaaaaattgaaatggtgggggtccacttaagaattcttgattggttgagtgttttcaaaaacaaaatttgaatactattttgagttttaggctaaaaaatgaaaa

SEQ ID NO: 164090 - DNA, 1667 bp, Cannabis sativa
  modified_base (1636)..(1641): a, c, t, g, unknown or other
gggcataaaacccaacagaaaagtgcttattaaatgaaaagtttgctcaattgattcgccgtcattttggtattttcccagacacgcacctagtacgtgcgcacattgcaagagtcggcacttaaagtatcgccagtgaacagcgagaataatttcttctgctagtgacacgtcagttgacgaccactctcatgatatagtgaaaaacttgaagatatctcacgtgtcaaaagccaatcatgagaaagtaaagaaacactgcaagctcctggaccccgagatgccccagaatcttggggggtaaatattgtcaataattttgtaagcttgacacaaggactctgatcaaggaaagctcaatgctaattggccggtcaacacctctgatcacagttcctagaaggtgggagccctaactcgcgtaaagggcctttatgaaggaaacactacatgcaaggcaacaatgcggggatcctccatgatcagagatctctcccagctccgagtactaaagtcaaatgctctcgcaaaggataagctcttctcacaaagcgcccatataagtcgcggaagaagtctagatgagctgtaaccccgttttgtatcacgacgaagctctgcctgtacatgtcagattgcaaatatcgcagccaggcctttttcaggtacgataccaggatttgtcccccacgttatgccgtagtacaaagcatacgcgcctagttgtacctgcctgagtgatccaacggccatcaacaagggcaattcaaaaggaaagaccctggggcaacacgtgtatgatgatcagactgtacgagctgacatccttaaataccatgtgatgaatcggacacctaccaaatcaacggtcgaatttcctctaagtatcatcagtccatcaagcatgtgaagagaagctagcctataaatacccatgcatttcataagatagaagcaactctttgaagacaaaaacactatatactacttatttaaaaactctacaaaaaaatcctattaagcttctccttcttcaagaagaacaagaggaataaagagtttcagtccattctatatcaatttgtattattattcgcctactaaagtggctaataaaatagactcgtatactaaggatagttaacgcccgaactacgtaaattattatttctttcttaagcttctaattatttgatttctaaaaatctcatcaaacaaaaggttaacctgagataggcaaaaagagcaactaaacaggttataaacaagataaaaaaaaaatcaaattagattaaaaattaattagactgatatttataattttcaatccccgacaatagcgcctaaaacttgttgcaaaaattattgctatgcaagtgcactcatccacaattagtaataaattaggtaaaactaagtatttccctcaaggactgaattaccaattaccagtcaatcaatcttttaattctacttgatcaaacaatatttagaatttttaaataaaaaaataaaagcaattgaaatgaaattttaataaaataacaatgagaaaggaattatgacaactatgatcatctactatctactcttttacttcctaatgcaagaactcaatgttaggttttatgccctnnnnnnaactccatttcaatgtaatctatttt

SEQ ID NO: 164091 - DNA, 2131 bp, Cannabis sativa
ttataattttttagtcaatttctaaatccaaaatcacttattaaaatattattttaattttttatagcagtatttattatagttacaatattatttttgtaaaattttaaataatttacaatattaaaaataaattcttaatatttcagtttatcttacatgtttcaaaaaaatttaaacttatttttagacactctaaattatttaaaaattttcaaaaatttacataaataatattgtgagtataacaaaagctgttatgaaaaaaaaatattctaatatatatttgcgaacacaaacattaattaaaaatttataatataagagattgatggtagaattttttcaattttttttaccacaaattgattgttataattaagtaacacatcttatatatattatttaaaattaaaatatatgaatcttgattgtatatatgtgccaccatttcattaaaaacaaaaaaaaaaaaacaaatgaaaaattagttgcccatagtaatgaatattctattattatattttagtatttggttccaatattcgaaggggaattaggtgataatatcacgtgggctgctgtttttggatgcttctcaatttgtcacactcccctaaatccttcttttctttattattctcttttttttaaaaaaaaaaagagtaaaaaaagaaaataaatgacaaagtgttaaaggttaaaaaacaagtgagaaatagtttgatagaattcacccaatttacaaaagaatgacttttttttttttgtaaggattttattaagaatatccttttctcaatatgaagcgcatcgtattaagataaacttaataataataaattaattttgatgtaactcttttgaaagggcaagcaaagtaacatcaatatcaaatcacataactattttatggcttgtggttgtcacacacacggccctatagtgtgtggtgtgggctcatttcaattaatacatatactctatagtctagactttgccaaaactatatgtactcttatatattattatcattattattaattggctgatttagtacaccgtattatattgtattatgttgtattgaattgtatttatattatttaatgtaactatgtttagtattgacttatattaatatgctgtataaaattatattatttttatcataaattcaatcccaaccttaactctggccctagactcagatcccatctccgaccccaagccaaaaacctcatgtcgaacttagaccccagtcccagattggggttcgggtctgggattcggatcggggtttgggtttaggtctgagttcatcaaatctagctctaggattcgggtccaagtccgagtccgagtccgaattcaggattcgcgtccaggtctaagtccggatctgcgtctaggattcagatttaggacctcgacctccaggtccctaatctcagaccttttctaaatattataatacaaaaactaatacagattatttgttatgtattaagtaatacgactcgtattgtattaaaattataatcctaacaattaatacaatgcaaaattgtatctaagtatagtgttatttattatttaaaactaattataaattaataatacatatagggttgatattgctttagaatgtaaaaggacagagaatcgataatacttccctcatttgttagggtccaacccttattattttcttcattaataattgaaagtttccacctaattaatttttatataatcaatgaaatgttgtgtattactttatcaatttactctttaatttatgatacaaaattaagtctctcttgcaaattactatatactgaaattaaaaattaacttatgcgaatatacttccctcttttattccttcttcattttttttttttaaatgtggccccaaaaaataataaagtgaaaaagctagaaaaatgggatgtagcctctgaattagtattaaattgtgctagggggaagaaatggagaaaatgaaagcattgatagtactgatggctttttcttttttagaaatatatatatatagggtaatattatggtaggaccttgcaaaagtttcctgccggtaggaaactttttttttttaccgttgatt

SEQ ID NO: 164092 - DNA, 2155 bp, Cannabis sativa
  modified_base (1699)..(1709): a, c, t, g, unknown or other
  modified_base (2049)..(2064): a, c, t, g, unknown or other
  modified_base (2116)..(2124): a, c, t, g, unknown or other
aaaaaatgttaaaaattagtatatagaatgattctcctaacaattaaagtgtaattatattttaaatactatataaaattataaagtattaaaaatatagaaaaaaatttttgaatgaaaaaaatatattaaaaaatattatatataatttaataagaaaaaaaaaacgtatgtaaagtgtatataagaaattgataataataataaaaaaaaatagtgaagaggtaaagaagagaataactaatgagagcacccttagaaacgaaaactatgtgctacttgagaaatttttcttcaaatatataacataaaaattgaaggaagttttttatttttaaattttaaaacagtttttttatatatattttatcgaaaatttatataaacattcacacagtaattaacaaaacaatttaatttgtaataaaagttcacataacaatttatataaaaattattagagtaatctagactataaatttaaaaataatatataaaatagtttttcaaaattatattctatttctaatctcatgcaataaacaagatattttgggttggatggagatctgtaattttccataaattggaaattggaagatgtgatcatgattgatgagtcacctcttaggtggtccctcccccaaactcatcagtcatcactgattaatggtcctgcactgcatgcattacttctactgtgacacacgtacgaatgctaatcactcaaaatttcttttttgttttaggaaaaggatgttctttgaacagaaacaaaaataacaagattcagggatcatcaccaatccaaatatggctacttcctcaactaattggaaccacaataaaactcaaaaatgaaatcaaccaaaattagtcaactaatttggaaccacaataaaactaaaatcaaagcccatgtgatgtgtacctcaatttttttaattaattgaacgtgtatcatgtacatttatttgtatactgcttttctccattttttatttgtagaaatataatattaatgtgattctttattactgggtgcttttcaggaaaacaaaaattgtttaatgttgctttcatctacagttttggtattttgatattccgatcacgttctcacaaatcttatcccaaatatagtttattcaaattttagatgaggttgttgttaagatttttttatgtgttattgtaaaagatatttgttgttcattttgttttatgttgtcgaaagaatttagacaacatttgacgtttagttggaaagaatgaaaacataataatgaaaatgaaaatgagaataagaataagaataagaataagaatgaaataaaatttaaaatgtataaaaaaaaatgataaaaaaattattaatttttttctcatcatgtattagaatgatctttccttccattttaaaatagaattatcttttcaccaaaatagtagaaatgtcattccaatactttaatattcaaccaaacaaagaaatgaaatggatattgtttcctttcttttctattctatttcattagatccaaccaaacgccacctaatgtaaaataaagatttgaaacttaattaaaaaaaatagcaagtactcaacctagaatggcgagtgtttaaacgaaactcccagataaataggattataatgaaagcgatgaacacaagaagtatagtggttcagtcagannnnnnnnnnnttagtccactgttgcaaggattttctatcttctcttattcatgttggatcgccccttttatatacaaagcaagtgttcttttagttacacagaacttataattggttataaaaccgttttacattaaatattaacattaaattgaaaaaaaaacgtaaatgaataaatgaaaaacagtttaaattcgttttactaaatataacaacgtatgagacttctatagtgagagttgcttgttcatcttctcgcacaagttcccagacttagggtgtgttttatcataaaggaggctaacgaacgtcgtatccaggtatctgctgttggaatatgttttaccagnnnnnnnnnnnnnnnncaagtatgtttcattaacatccttatttgaatttctaaaataatgaaataannnnnnnnnaagtttaagaaaccttacattggagatcgga

SEQ ID NO: 164093 - DNA, 1024 bp, Cannabis sativa
  modified_base (956)..(967): a, c, t, g, unknown or other
aaaaaaaaaaaaaaactcccatatgtatgatcaccatatgtggaccattttagtctttattagggctttgcttgtcccatataaatgcatatatcactcttatttatttttccttgagaaaaaaatattattttatttttcatttttttttaaaataaagtctcaattactaaacaccaagagcaactaacactaaggacgaagatttattaagattttctcaccacaccaaataacactatactacttgccaaagcaagttttgacaaaaatattagcaacatcattactagatttattactagacaaaactaatatagagcaaagtacatatatagatcaatgatattatttaatattagacccaaaaaagtgataataaacattgttattaattttaattacaacattcaaatcaaacaatcaaactcaataataatttttttatacctaaaaagagatgtattgaatgaaagcgttgcagacagctaaaacttcatcagccactttaggaacaaaacaaccattcaaataccaatttaccaaagctctagcaactcccaaatcattaccactatacttcttgttgaattaattacagtatctgtattcattttgaaaaaaccaaaagggggagaggagcccatttgaggagcgacttaactgaactcaacctcaccgccaggccttcaagagggacaaccactctcgaccgtgcaaaagaactagtctgctgcttgttgtcctaatgtagtcacgagtccaataaatggtgagcactgaagataactcaatattattatgaatttttttgttatatatacaccataaccaaatttttcacaaaatcacaaatagcaattcaatcatttcttttgagaggagatcaacaaatttatgaacaacgtcaagaaaaatcttccaacatacaaaccaggcccggccctgggcatagnnnnnnnnnnnntgtgcctagggcccacccagcctaggggcccaaatttttttttttcctcttttaaaa

SEQ ID NO: 164094 - DNA, 2103 bp, Cannabis sativa
tggggtgtaaataaaattttccttcggaaaaatgacctggcgtactaacataacatgacccttaaacccctcacacatagttcgtgaacgcattcaaaccaaaccggacagccaaacataatcttcctcacttgttaaccaagcctctagtattagacgtatatttatttactttttattctttatttcttatgttttgtttttttagtgtagcataatagtattttataatcaattaatagcttgtaacttaaaggtcttgatgatctctctcttccctcaccactaaactaaccttagtggcttaaattatctatttcctttgttggtgtaaagggctcttacccaattttttcactttggtgtttccatcatataaagggactatgagtatgagctgtaacttccgattaattcatctctgaacaaaaagacttcttctcactctaaaagttacttctcatcttataccttaagtacctgactatccctcaacattgtgagctacaattctttctatacttaagtcattgtgaatttgaatttttccgtaaagcaaataacatgccaaagtggaatgttgctattgctactgagattgcaactattgaaaatactataacatgtaagtggatttacaaataaaatataatattgatagcactacaaggcccgagtgccatcaacattattattcaaatacatttccactcaataagcttgttattgataagctttttttgcctttgctactaaggatgctgtttaaatcaattaaatgttcatatttttttgcatagtgatttttatgaagaagtgtttacgactatacctcaagcgtgtagtccaaaggaattaccatgtaatgttgtttgcaaatcgtgaaagtccttgtatagcataaatcaagcttctagacaatggtttgaaaaaaaataaaagttctagtgcattatttgaggaaggattcaactattttgcaactaatcattactgattcatgacacatttcaaaactagcttcataatgttgttggtttagatagataatgttaatctagacagtaataacttaaaagagctagaagctttgaaaactagattgaccaattgatacaagctaaggaatttaggcaacgtgaaatattttcttagtttataaattgcaagtttttcaaagagatatttgtatctcaaagaccttatgccatacatccagttaatagaggatattggtcctttgggatgtaaaccagtaactacacaacaaatttaaaactaagtcaatatttgggaagttagtaagctacattatcagactataacaaaaggtgaatttatatttctcagttaacaaattagttcaattcttggctaatcctcgaccaaagcattcaaggtcaaagttattttacagacttgtagcttggctaggtactagaaggtctacaacaagattttgtgtgtttttttggaaggggtgggggattctatattctcatgaaaaggaaaaagtagcatactgtgtcaagattttcagtagaatatgaatataggacagggtcatgattttcagtagaatcacaatataggacagggctgatgtctcaaaagcgtacgttctaaatgatctttaaggaacacgtttattggaacatcaaggccagggtgaatatttgtaacgaatgcacacttaagtgaatcaagtcagggtctcagttctctctaagattggaaggaattatattattaaagtaacgtttgatgaacaagttacaataaaaagaaattactcatttcaatcacattgtcttaattatatatataaaatcaataaatgatggtatcttttctgtaggatggcgctcctgacgtcatggagcagctgcatggttatgacttgaagtaagtttattctatcttaaaaaaattgtagctcattgcattttgcatttttcattttaacagtatatgtttagtttaccactttggtgcagagttgatatctggtcttttgatataactgtaacagagcttgctcatggtcatgctcctttctcaagatatcctccaataaaagtgcatagcttgctcaatctactg

SEQ ID NO: 164095 - DNA, 1158 bp, Cannabis sativa
atataggaacgtaactttgtagtggtaatagcaccattaatattacgtaggtaattaacttggttgatcgataatttattattggcggcttttgtaattaattatatgtaaatcttatcatcaactactctaaacctaatataaatatatatctttttttatataagaagatatatattattaaaccagtagtatccgcagccttatattttactgaattgagttataatcatgttcaaaagtcgaagtccactaactatgtgtggacaacaaggagtagtactaaatccaaattggggtaacattttccccttagataaatcaataatgtttgcttaattatcattattaaaatgattgacaaaaataagtcttattttacattattataagaaaacattaattagttcacacgaaaagctgccaaaagatattgcattcaatcctgttaaaaatattagtgagctcactatctgctatcccaccgaaaatgagagatgtagaaagaacgatacacacataatggcgttattgaatttcatcatataataggtaaatatatgagaaataatgttacatatgtacatgatacatttgattttttattttaataaaatcaaactaaatataatatttaatcaaattattaaaatctaattacaaattatgacttgataattactaagtgtaatataaatactacaaattatattaaaacaatatatgacaaatacatataaggttttttttttttttttaataaaatcataccaaataatattccaaataatattggagaattacctcatatactattttcttaactttttttttttttttttcaaatttaccgttggagtttttaaagtagtttctctagtggtgatctagtagtttctatgtgggttgtgatatgatttttgattgcaatttaggttgctctattaattgcaatagaaatttttgggtagaatttcgtaaaatatataaaaaaaaaactttttttaagtataaaaataaaaaaatcactagaatatttatttaattatcaaaattatgaaaaaaaattatagtaaaaatttgttgcatagtgtaatatagagtgattctacaatgcacccccttgaaagagatgtactgatgcacccttaacttgtt

SEQ ID NO: 164096 - DNA, 1376 bp, Cannabis sativa
aaaaaaaaaaaaaaattctttgtttcaggacaggaccgctctgcctctattaaagcattatccattattttataacacttaattaattttcaatatatatataatttataaatatagaaataaaaaaggaatttgatgtaatcacaacaggagtgtagagccttttcaaccctagctagctatccaaattgtgagactcttttgtttcctaaaaagatcaaatgattcccacattggtcgtccatttagtactactccatgcatgtgtgtgcatgtgtctatctaacccaataaagcttaaaatgaaaagagaaaattattttaattgaattcttttattcaattatagatatatatttctcaaattctgtcgtatctttgcttaataatgttcatgatatcatataccataatttgaaactgtcccaattgcaaattttttttattctcctactaattattttaaaatatttattacatgtgtatagttttagaggcattgaaatgagactagtattagcaatggcaatgggtattgagtaatattattattagagaatcccacatgtaataataactaaaataaaaaggagagagaaagaaggaggtattagctagttagtgtgataagtgagagaattggcaaaagtcaagtattgcaggcgtaagcaactaagcaaaacaataaaaacagttgagacatgtttctctctctattctatttattaaaaaggaagttgatgagagagagatttgcatgacgcggtttcggagctgcgagacagggaaaacacagctgtggtctgtgtgtatcattatttacattacataagcaaatcaaaatatcatattaatataaaatatatatgtatattatgggccttaatatttctatctatgtaattatctatctaattacgcgtggatgtaattatatatatatattcacaacagccaggctaaaataaggctaactagcaagccttatatattaaccccttattaagatcatggaagctgcctaaattaaaactggagtgagctagtcctaggatcttctctttcttctctaataatatatattatatattaagatttggggaaacacatgagggtgagggtagtaaatttactaaaacgccattcaattattttctgaataattttctaaaaatggcaaataaaaaaaatgaaaaataaaaactattgtctggttgtcaacagtggaaaagagtgacttgttgggtaagtccggaactctaaaataagcattaaataaaaactttccttttacttggaatctgatttgagcatgtgggttacaggttgcattgttcatatttgccttttttctgtttcctttttttttttttttt

SEQ ID NO: 164097 - DNA, 1695 bp, Cannabis sativa
atatatatatatattatatgtacgcagtactttttttttttgagtaaaaatgtacgcagtacttaagctagctagttaccaataacaaatgttaaaaatacattagttggacgtatatatatatatagctagttgacataattattaagagcactttcttctcaacttaattttttaaaaaatctaattaatttatttttatattatcttacacatttacgttacattataaatcaatttctttatattttttctatatcacttaaaaattatttactttaatcattttaataataaatataataatattacaaaaaaattaaaatatataaatataacatttataccttaatgactagtgtcattgtagagctacttacaaaagtagggaactgtatagcgctcccaacagaaaaataaatatatattaaataggttaaaaaaaatattagttatttgtaattaatttgcttcccaaattattttattcttacaattttcccccttaatttattttaggtttataagttctatttatgatttaaatctctcaacaataataacttatttaataaaataatatattttattattttttacctttttacctaaatattttagttattctattatctgagtgctcttcacgtccgtagatatgaaatctattacattacatattcatttagtatttatataatcatgcatgtaataaattatttttaattaattaatttcggtacacagagaacacatcagtcattgatgatatttaatttaatttggagtgaagaacaattttcttcatgtcatatatatatgtatattcataaatagatacaattgaaaattatatattaattagattggaaatgacatgaatatatgtttcaaagtccaaataaatgagctaaacaaataatgccgggctaatcacgcagtaatattacttctactgtattaatatttattaataatagtttgtggagtacgttgtacgtaattaagttaattgccttcctttgttaatttgtctccataatcttctgcttttctctgacaattatgttgttcttttttggttattttcatattatttttatccaataatataaataaattataattaaaataaataataaaaattctttaaaaattgaaaacaaatgtaaaaatacatataaaaaattatttgactatagaaatgttaaaattttgctaaaaattttattttttgtaatcggccttaaagtttttaatcgcaataaaaagaaaagaaaaaaaaatcttttaattaattaattaaaacactgtgatcagtacaagctactagtactgttaaagatctcacgacacgattcatgcatgtattaatttttagatcaaatctccttccaaacctatatgctgtacattaataattattaattttatatataaagtgatgacaatatataattaataaatattaatgatcagttaattataatttgcattagctattgataaggacatcaaggtttgtttgcatcattaattagagcacgttggctttgcttacttagaaagccactttacttaatttattattcaataacctaataaaataatacttcaagggctcgtttggaacaccgtattaggtcgtattgtattgtattgtattatattcaattggattatatatcatatttt

SEQ ID NO: 164098 - DNA, 729 bp, Cannabis sativa
cattcatgtataaatgaaacaaaaaaaaatcttaatttacgttaaaagtaattaactatatgttatacaaaaaatattacatgttagttaccaaatacagtatatttataattaatggcttataccgtcagatcaaataaaattatataacctaatatgatatatacagttcaacacactacaacttaataactgtgtaccaaacatattattaaaatagataaataaataaacaaataagattttcccttatattatgccgtaaaaaaaggctcaataaactataacattattagaatataatattaattaaaaaaacttcaaaaatattaaaattaattaattgcatgttcatacataagtacaactatcacaggaatatataaatatcgatctatatacactaatttaaatcattaattgttaataattatttttcttttaatccaaatcaaaatagaaggtatatatataaagattcagtaaataaatctaattatgatttaaaaaagaccaatttgcaacaaaactctttcatagtttcatgttttactttttatacactatagccttcttatatttgtttgggtaggaaaatttttttaggtttacttttcttttctttgtgtcatttagatattactaacactatgtttggtaggaaggggagatgggtggatggagaggggtggagggagagtgatggaaggagagactaagagcatgttt

SEQ ID NO: 164099 - DNA, 1097 bp, Cannabis sativa
gagagagagagagagaggtaataacaaacacagcacaatcccctggccaagatagattctatatttctttcattctcactttacaaaacaagattaactactcctgtaaaatgatgcatcgatagctccaacttggcttcctatatcattacaataaattcacaacaataattatgactaataaaaagattattgctctttcaggagcttgcttcttggaagatatagagaaacttctcttactgctactatcataatattataattttctacatcctttcgttgcacttggcatttatggatccttcaagagttagcgacctgttccaagactctgttcagatcacacaagatgatattacgtttgctctcaatccaggggaggtcgatgaacctcaagaagaaaacaaggttttactggggaaaattattagccgatatcgtttgggcaagactgcaatgcagggctctctgaagatgtcgtggagtgctatcaagggttggaaatggaaagaaattgatgagggtatcattcaattcacatttgcgaataggaacgatgttatgaatgtcctggcccgcagaccttggtttgtttgtggagccctccttgtcatcatgccatggccattgtggctaacccctgctgaggtgaggtttgacaaaacacctatctgggtgcatgtggacagcattcccccattctattggaacctgtcaaacttaaaggaacttgcctctaatgcttcgccggtttatgaactacccccgggtatcgaagacgccgtgggtatgagctctctcaggttcagagccacaatagacctaaataagcctattttttctgggttttttcttcgcagacaaaaacttaaggacctatggctccaatacaagtatgagcgactcccaaagatgtgcttcaaatgtggtttaatgacccatgaccagagtatatgttttaaatctcctacggttatcagagatagtgttgggaatttttacccaatgttcggtatttggttgaagaaggaggtgcctgagaagtccatgttaggttttatgccctaaataaaactctttacaatctgattagt

SEQ ID NO: 164100 - DNA, 734 bp, Cannabis sativa
tatttatatgatatgatataaattggtgtgtatgtttccgtgacccatgacataataaatattaccactactatagttacaaatatttaaaactagggttgttggtgtcgtaattattagcttcttcaatgaaataataattatattcagtagtatatataactatatagctatatatatagctcgtacaaactttttattttttgcaaatttctctctgaatatctgtatgtatctattatttggtaagtgaatccaatataacttgaaccccacacgaacagatttattaattattttacaaccaataataattgatgtacatattatttttggataatgcacattgagatccaaaaaaaaaaattgtagtttgatcctttttttgtcaaattttcaaaatatatatataagatctttttttttttttttttttttgatttttcgtataattatcaatcaaattttgcttaattatagataaagcacatgcatgcatgtattaattaattcgagtacacttaatgcaatatataagcttaattttgtgcaagtgttataacgagatcgccaagatcgatgttgagaaaagtacgatagaaaatgtgagtagatgaactaaactgcatgctctcatatatatatatattatatactaggtgaatgtacgtgccgagccacgtattgctagttttatttaagattttggtctttttaagattttgaatgtattt

SEQ ID NO: 164101 - DNA, 2617 bp, Cannabis sativa
aatagcttttaattattataaataccttcatgtaaagtgggcttatgatttttattatattatgattaatacttgtgctaatcacataaaaaaattataagtatattatataattttatattattcataaaaaataataaattttacatttgaaatttaattcgtaattaataaattaattttctatatataattttaaaaaattattaaaaaaatactagaagcatacttcaattctcatcgttacaaatgaaaaattctatcactaacatttttatataaattccacatttttagtttttaaaaacacataatgttttgcaactcattttacagttgtcatctagctacatttatctttgtggagaaagcattcaaactaaaccactgaacaaaatgtaaaaactttcataaacagtaattaaagtatttcttctaattttaaaagaaaaaatagtttaaatagtttttgaaaaacaattgcaacatcaatcacaactccagtatattaaagcgaaacccattatcttttcatttattttattttaaaaatacattgcaatttctttgttaattctacttttttttttttttatatatatatatatttgacacaatattactatctttctatatattttaaaaatagtaacttatgtttctaattttaataatattattttgtttataataaatgttatattttagattaattatatcactgaataattacatatatatatataaaaagattatagaagtttggcaacagagcttaattccctagttataaaataatttgaaaggttattttttatttttgtctttttttattgataaaaaaatatattaaaaattaaataacagcatcttttctaaaggaaaagaaacaaagttcatgtgcagagaaatagaaggaaaaaaatgatgagagctagagataataactttagtgactgccgcattaatttaggtgtgcacattgtatatatgtgaaaaagccttttattatacatgtatttatattatagaaatggtagctaacatgatttgcttgatgggtcacacataatataatataataatagataaattgattttacgagatgggttcattcatttgattgaaaatatatactacccagttttcttcataaaaggacaagttgaggcttcatcttgagagatactactatccgaccttgaaccctttagaagacctccaagtagttctccacgatcatagaagaactccaccttcacaattttctcttgttcatccagctacaaattcagacaacaagaaattggtttcatttgtaagtgtctcatgcctagaacaacttaaggaaaattaatttaataaaacatagaataggaagggctcaacttttctgatcttaaaatgaaatgattcgagtaatataaacaataataaaactgagaaaagggattgcagaaaatatacctcaaaaatggacatgccaaagagttgaaccatttctccggtggggttatgacctttgaatggaccttccatatagccccagtgccggaacttgtaaacaatcactggtggaccagagtagacatgaagaatttccactgcaaatcctcgaggaaaggcagttgtaaaagcacggtgagaagaatctgctgtttcttctgctgggttgtaacaccgcaagttgtctggtaaggatgtctgcaacaacgagttgtagcctcccccaagcttacgcttctcctctaaactcaaagctcttctacctatatagatagatgatagatccaatatagtctccttctaagacatatgatataaacatgaatttcatatttgaacactaatataactttacttaccatttaagcttagagtgtacttgtttttatcaacagttttgtagtcatcaaaacttgtcttgtggaacatctccatttcccatgtcttcacaaggttttgcactttctcttcaagtgatcctgttggccatatctaccacatttacacataattttagtgatcattacaataacttgaacagctttttagtccccaaatagatttagtatgtatttttatatagtaccttagttctgccttcttcaaagagcttgttcacaacatcatagttgggagggcctccatacctccatttggtgtttttctctgtttccccataaatatgtgtacggtacttgtcttctttaacttcaatagatgccatcttagtttatcttatataataattttcagttgtttaaattgggactttcaaacctctgtccacaaagttcttatatagactctacaagaaaagtcactgaacaaaaatgaaaattaacttagagttttccaatcattctctttaaatacactcaatagctaaaataaaacttgagccttacaaaaataaacttcaactatataaaacaaatgactttctataataaaaaataaatagaaaactctttaaatataaggtgcaattttttaatattattttgataaaagtactattactttttttttattatttcaataaattaatttataattaataaatttaaattataaaatattattaaataatttttgaatagattattatta

SEQ ID NO: 164102 - DNA, 2288 bp, Cannabis sativa
ccaccgggttgcatgctcagccctctcaacctcactacaaccatcaaaacccaataacaacaaccaaaacaaccctaaaacaagctctcaaaataattgctaaacaattcaaaccctaagagaagcaatatcacaaattcacaactcaaaaccaaattatcaacttagagaatcaaagagataaaggagctagggttttaccttcaattcttacttgaaaaccttctgaattcctaatgaatcaccaagaaaaagggtgaatttggtctggtcttgcttggtttcttgagaggctgagagagagaatggttaggaaagagagaatttgatttttttaattaattaatcattgtcccttattttcttattttacccttaattaattttagcttataaaacttaattaaaacattaatattccactaaagaaaagacaaaatcaacttaaggcaaaaatccccaaaatgcctttcttctccatgaagtaaccttagaatctaggggtaaaatggtaaaaacccataacctcactcaatcttgacattctaaatgtccaaataacttgctctgctaattccaagatacttaaccctatctatgtgactctaatggccacattgtcagattccaattccatggcacaaaatataaagatgttaaaattcataattaacatgcatgacacacctagaatataataaaatctccataattgagaaattatttcacaaatgcctatttctgacaataggtcgtattttgttctaatgcacatatataacataaacagtaattaaatcactaatgtgctactaatttccatatctaaatatgtagtcattacatttatccctctgttaaaagggtttcttcctcaaaatctaatctgaataactccggatattgagccgtcagaactctgattcctaagtggcttcctccaccttactgtttctccagagtaccttgaccaatgctatggtcttgctccaaaggactttgtctttactatcgaggatctacagaagtggctcctcatagaataaatttggttgtagctctaaggcttcgtaactcaaaacatgagttgaatctgacacgtacttcctcaacattgacacatgaaaaacattatagcattgacacataaaaaatattatgcactgctgataatgttggagggaaggctagatgataagctactaatctaaccttctcgagaatcttaaaaggcgttgtaaacctagtgctcaactggcccttctttccaaaacacttcacccttttcattggtgacactcgtaggaagacattatcccctacttgaaaatgtatatctctgcgttttggatctgcataactcttctgcctgctttgagaagcaagcatcctggtctttattttctttatagcctcactagtctactgaactgaatctgcacccaaatacttcatttcccttattttatcccaatgaatcgaagaacaacacttcctaccatacaacatctcatatggaaccatccttatagtactctgataactgttgttgtaggaaaattttatcaaaggaaaatatttactccacaaactttcaaaatccatcacacaggcttttaacatatcctttagtatctaaattgtccttttggaatggccatttgtctgagggtagaaaattgtactaaacttcagtttcgtacctatgaccttctaatgactctcccaaaatttgaaagtaaactttagatctctttttgaaataatggactttggagcccaaggagatgtacaatctcctttacatataaatcagggtactaatccactatatatgttgtgagcttcatttcgcaccactagtagtaggatttcaaatcttgatacatcttggtggtacctgaatgcaacgagtagggtgtagtgtggacttcatctagtatctctttcttgagctcaccactgctcggaacacaaactcgagccttataaagaaacatcccactgtctgatactgagaagcctttagcccgacaagctaaaacttcctcctgagacttaaccaactcagggtcttctgcttgagcacttctaatcttttctattagatcatactgaagcgtcaaattaccaagtctccaaccacaaactcaatacccactttaacaatgtcaattggcaaccgaggagaaatcatcttggtactaaaaatctacccgaggacctttcctactcaaggcatctacaaccatattagctttctcgggttccttgaaaccctcccacta

SEQ ID NO: 164103 - DNA, 1491 bp, Cannabis sativa
cctcaaaaaattactcttagattcaacaaaataattatagaattaagagtacacaacatgattaatcatccacaccatccaacagtcttattggatgtgaaacccgtttcagatgttcgaggttgaggagaaggtcttggttctttgggtttggctggatccacaaaaataacccacccatccaagaacttggcattcattccttcttttgcattctcagcttcttcaatactggtataagttatgaatccaaatccctttgatctccctgagaccctatcagttataactttggctgacacaccatatattataatcaaggccaccatgtaagtactagtaggtcaacaaaagccacatacataacaatgataaaacagatttaattaccatcaacaatccgaccgaaaggagaaaaagcttctttcagcttttcatctgtggttaatcttgaaagtcctgtatgagtagacaagacacttatgttccatgttcaatctgaaaatattattaagagaccaacacagaaggagagaaactcatcttttatgtattgagaaaacataccactgatgaaaagttttggtgttgtgagagttgagatgtaacgaatggcaccaagttgagatgatcccagaatgcgtagaaagctagatgacaatgccattctattttactatacctattactctctctaacaagtccttttcttacaaccttctagttttttctgtggcctgcaatttttaaattccattatgttcaattttacttcactggctaccctgtatataaaatttcaataaagaaactaacaaacaacacaaagtataactttactgatgaaatgagccacaaacacaataaattagagatgaagattttggaaagtagaagaagttttctcctttaattatagtgatactaaatgttcaatctcccatttactacattccacataacattaatgtgaaaatagtgttctaaaatttcttgttccttggtttgaatgaaaaaagatccaactctaaattaaaacccttacatacgaccttgttctaaaatcttagtgattcatttgtttattaaacagagcggttaagttctctaatttgttgtctatcttaaaatgttcactcaaggataaattattatgtaattctcctaacatatcacttatgttattcaacaatcaacatgggataactaaagagaaaatacattcttcacacatattatcattgagttccactaatgactttatttcttgtgttaaatcatatcataacatgtatatcatgttcaaagctccaattatataagtatcttacctgtataataattgcctatctattaattggtaactattcaatgaagcacttgtctattttgcttctcctattaaaatttggctaattcggatttttgcctcctgaactttaacatgtaccaaatcatgcccttgaacttttaagttcgttaaaaatgctc

SEQ ID NO: 164104 - DNA, 2669 bp, Cannabis sativa
gtaatacgacgtcgttttttcctgagtttaaacctgtggtgggtcttctcgcttccggagatcaaaattgggtacgtgtataattaattaattaactaattttgttatattttctggtaataattattaattataatataattaaatagttatattagatgtttaattaattatattattgcaggtaggaatgcaaagttgtaatcaaatgcatggaattgaagattcgaatataatgaaagtgagtcgatattcggaagaagaaaggaaagaaaggattgttagatatttaaagaagagaaaccaaaggaatttcaacaagaccattaaggtatataattataatataatataatacattctttcaaattacaaattataataataaactatgtaacattataattaattgtaatttaattattaattattattattattatttatagtatgcttgtaggaaaaccctagctgacaggagagttcgagtacgtgggagatttgcaaggaacaatgaattgtgtcatgatcatgatgatcaatttcaacccaaaaataataataatgaattattattatcagacaataataataacaataataataataataataataataataattgcaaacaaaatactgacttttgtagtgaagctgaagatgatattgctgatactgtccaggtaaataattatttatatatatatagatatacttttgtacgttatatattattgtatatattaattaattatatgatatgatcatttattattttcgtctttactatacttttgcagatcaaatatgatgatgaagaagattggctgcaggattttgccttgtgttgctttgtaaatggaggaatacctaataataataataataaaatataataatattattgtagagagaaagagattgttaattattattattgatcttaacttaacttaattaatattgtagagtttggattgttcttaattatcagttattattattatcagactcatggtgtatttttcctgtggtatatatatatatgtgtagtaatttttcatataagtgtgtgtaaagagattgaagtaaatttattaatgtgttcattaatctggctctagtactttttattaattgccaaaaattataattaacagtgaaattagaaacaaataacaatcgaatattatattttttttaacaaaatgatcttcataatatttatatattttgattatagagtaatagtatagtatagtggtgtgtttctagaagtcgaaatataactattagaattaatatatttatatatgtttcacgcagttcgtaataattaatattgaccatatatatatattaattaatggagaatatatataatatatcaaatcaagttaaaaactaaaaagtgcctacaattattacaaattaaaagtactactctaatttctattggcatttttgtctgggtttttgaaaactgcaattaattttaaagattcaaaaacatttctgttgttagttaagtaaagtaatcagtgaatatttttttagcttttaacactaaaaagttcttttaacaaaaactagttttatatatatctttcctaggaagagctttctcagaaagcagaagaagataacctagctagctatgcatttattttagattgatttacaagccaactattttataaataaataagttttattgcccttgaactattattattttaaattaatcttgctccttaaacatatttttgttagtaaaatttttttcccaaaatattctattgcttagttatgtcttttctatcagtttcagttttacaatatagctaacaaaaaattgtgttaattgacactatgagtatgatcactaatgtaatattgctacattgatcaaagctaaatgtataaatacaattacaaattaatgttaaattacaataaaaataatttaaaaaattataaattcaaaatatatagttaaaaataaacataacaattaaaaaaaaatgatacatttagcacaaagattagagatatatagcctaaagcatagtatatacatatatctcataataagggtttcacatatattataagctaaaaatatagggggcatgaatcaaaatctccagttaaaaagtgatgtcccatataaaccaatttaaatttaagacgttaattaaatttttatttattaaaaaattaaacctttaattgagataaaagtagttagcatatttaatataaattaaattacctaatttgttaaaatttaattagtttaacacaatatgaaataacatttttaaataaaaaatcttagattctggagcatgaccctaacaagttgcaacaaagagtatgtattgcccatatatatataagcactttgttggctacgtataacacaatatatagttaatgataataagaagtatatataattcagtatagaattagtggggaaattttttttcaaacgaaaatggtaatagttggagctgtaatcctatttattaattatgcatgtgaggtgaggtaatatgcatgaagctgcagatatccctgtgatcactaaataaaatatgtttttatatttatattatagaatagggaatatatccacatgtgcacaatatatatatata

SEQ ID NO: 164105 - DNA, 971 bp, Cannabis sativa
ttgtcaatattattaccaatatttatgacaattttggttccaattgctagagctttcaccaaaaaaacatctggtactatcacaatgcttcaaataataagaattggaacttcatttttttcgcattctcaaaggtagttggctaaaaatcgctgaagaaaaggacttagtttatttttgaaaagttgtaatttggcccacctaaaattattttttgcaaaagttcttgtctgatgtcccttcttttcagatcatatggccaaagtacaatgtaaatgctctctacatatctctttttaatgtaattgaccaaaaactattttcaagaataatgagaggagctaggaggacgtaggggtgtagatgtagtatttcattcgaatggggatttaagacaaattatagtgctttgaatataccaacttgaaaggatctttgatgtttgttctgtataagcaaataaaaatctttaatgagcatgtatatcttttatacatatgaatggtttatttttgaactttgatttatatattggaaattatttttaatttttcaaaaattaatagtgcaactctataactacaatatatattgatatatagatacaattatttaaaaattgagttataatctatcaatatacacttaaaaaaaaaacagaaatacctctaccaataaagataaatttggtgcccaatataaaaatcctcattatatttttttcctaatgttttcttaaaattatattttttttatgaaatttttagaaataatattataaatatttatagataaatagcgatataagtatttaatattttatgttaaaaaaaaaaaagtacttaatattttaagtttagaagcggcataacttaatgtttatttatagcggcataagtacttgttatctctcaaaaaatccaaaataatggtgcatgaatttttactctagatatagaggtccaacaagg

SEQ ID NO: 164106 - DNA, 1619 bp, Cannabis sativa
  modified_base (674)..(675): a, c, t, g, unknown or other
ggacaacttaaacgagcacagagaaaaggcatgaggagaatggatcaggccctatagggtgatttaagaaacaacatccataatcggatatgggggcgagatctcccaaattatcgtaccaaaagttacaatttttatagtattattaataaattaaaacattatattacccataaaatattatcattaatttcacatgtatactacttatcccattgaaatctaaaattacatcattttcattagaaaagttctaaaataatatactattattggtccaaatcaatatcaaactccacccattttgatttaagaaataatataaaaaaaatcgttaaccacttcaaatgtgccacatcggtgggcaccttaaggtgcgcaatagcaatactgttttcattgtagtgctccaatagaaatatcaaatcaacaagattacaactctatgacaaatagtacaaaggataaattatggattaaataatgttacaatactaaaaaaaatatacgcataaaatagagaatctagagaccaaaagaaaaattacaactcaaagcaataagctacacatgaaacacaatatataaatagcatatatatataggagatgtgagatcaatctcatcaccacatacaccacaagtatataataggagaatcaccaaacttgaannaggtcttacacctttgtccaaaatcttatttccccctaccacaacacttatggaaaataaaagaatggaaatagctttctaaatttatcaagcctaaagtgtttctagcaatgtgctcttctgatagaaatttgttgtcttacaaagtgaaccgaagatcttaatttatagtgttttgaggatcacatatgaaaatcaaagtcttttgaccacatggctattaccagcactttaatcggtgtttaatgggataaaaatattggacaagagagctagaaacatgcttaatcaattcatgtacgttttcaaaaatagttctaggtgttcgaaaaaataaccataaaacaacatattaacaaccacaaaacaattgtttccaaaaaactcaatatttagttttgtaactcctctccgagttaaatctttctccaacatcccaatactcatttaaatgatataattaagtattgtaaaagtttctaacaacaaaaaacttatcccattgattctataacttccatatgtaataactcacttaattacatattatcaattgtgattcttaagttacaatttattttcaaatttgtaacttctcatatgttataatttttatgtgtattattatattatatatatatataatataatacaactaacacattatatatattaatctcatatcaatataaaatatatcatattgaagtattacattacaacttaatttagttatataagtatgattaagtttctcttcaattgcatattatttagtttagagcggagtccacataatagaaattacttgtccccaactctctattccattcctatcctaacaataaaaatttgacattggttcattttcactataaatttttttacttttagtcataagaaaatttgtgactaaaaataaaaaaaaaaattgtggctaatta

SEQ ID NO: 164107 - DNA, 1324 bp, Cannabis sativa
aaaaaaaaaaaaaaagaaccaagcatgttgaggtgatttctttctaccctttttgtaatattgaaagagaaactatttctcatgtgttggtgtcttgttcttacttgaaagcatgttaggccaaaatttgttttgctgtcacaatagaagttctagggacttttacggactgattaactactatctttgagagtcatggtggggggaaatgaacatggctggaatggttagttgggcactttgaaaatgcagaaaagaatttgtttggaatcaaaaaacaaagatgttactgaggtagtagtgttagtaaagattgtccttaattaataaatagcaatatgctcaagacaaatcacaagatacatccttaggtttgttgaacccagaggatggagctgagcagtagaaaactctaagctttgatacgattaagatgaatactgatgtcgctttgtacattccaactgtttcagttatgcttttgtcacccaaaatcatgctggtttttagaggaagctagagtttcttgtattagaggaagtgtccttctaaaaattgcaaaagccattagaatacgtgaagcactaagttggattaagcaccaactatgacgcaaagtggagatcaaaacagattgtcttatagtcattcaagccatctaaaacttagctattatgttatcctactaataattatgagaatatatatatgagatctggggtcttaagagccattataacaagtgtgtttcattatgtatcaaaaacattaagttttgaaagtaaatataaataaagtatccttaaaagtgtgacttatataagtgtgttgtaaaaatgtggtcaaataaagtatttaagtcttaaatcgatctaattcaataagattttgaccgatctaattacaactgatcatcaaacattggatatccaattgaatcagattggatggtgggtgtgttgtctaaaaatccaatacatccaacatatccaatcaaactaattagtattttcatttagtttggatgagtaattatattttatattgttatacataaaatttatacatataaaaattaacattaaaattttacttttttttattggatggatccagtcgaatccaatacatgatactggacctaaaattttagatgaatctgatctgattcaaaaataatagatttaaaatattgggtaaacccaaattcaactaataaatatatatgctagatcgattagatgactgaaattaaccgaatcggattggatggtacaatttaatatctaatatataattagatcggatctggataggcctaaaa

SEQ ID NO: 164108 - DNA, 1262 bp, Cannabis sativa
ccttatcggagagatcatggtgctatgtaagggagccgaggaagcgttaaagcaaggttacaagaagatgatttttcagagtgattcctctaacgcgatctctgctctgaaaactaaattgcaggaaattggaactcttcatcataacattcaggatcaggtggtgaatttcatcacttcattggctcattttactctgtcggaagtctcctggatcccgaggagttgcaatggtgtggcccattcagtggctaaatgggcaaatcaaaacaatcgctttggatggattgatttgtctagtgagaatggcgccttaccccctgtgccatcagagataggctgacccaaattttctctttgttgtaagttactggttttgtttgtttagtcagttagtagttatctttcttcttttgtttcagttggactgtggttgtccgtttgtttgttttttttcgttggtgttccctctgttttccctgttcccagggttcattaatcaaaataacaacaatgtcagaagacaaaatcagctaacaaaacatcgaaagaacaactaggcaataaaatataagttctagcttaaaataaaccaaactaaaaaaacactagaaaaaggggtgcgtgagatggaagagagaggttgagaaatttgtgagattaaggtgacactgtggctgctatctgataacactgccaatttttttttttttgttattattattattggttacctatcttaagtgggtcccctacaacaacttataatgttgctttctttggtgatggccttaggcattaatggtgttcaatagttattcataataattattaaattaaaatatgtagaatctattattaatgctactatgcactattaataccctttcaatatttttcctacataaattttatttagtgcaatagacggatcttgtacgaagcatcgaaaaagttcataaagattgaaatggagagtcagcaaatctctactagcaagagagttcaatgcattattcttaataataacaataataataaaaaaagttcatcggggaagtcatgttgaaaaataacaattgggaactttcatttagttattatcttagttccaaaacagaccctaaggacttcactcagggttggctctgagttaaaatgggctataggctaaattttttttttttggctcttactataaagataaatagtatttttaaaaatacatttttttttatttaggcccctaaaatgagtgggcc

SEQ ID NO: 164109 - DNA, 813 bp, Cannabis sativa
gggtctaagcaagtaccttcctttcagagaaggggtaaaagaaaatagaatttcagccaaaaaaaaattgtatatatttgtataaatattaaatatgtgtgtatgtattgaaagaaaatagtccttttgcaaaataagcaatgtgggtaaactgcagtaatgtaggggaccatagaccgattctcattaaaataaagtagggtttactctggttccatgcaaagcccagctgtgctttcatttaatatctgttttaatttctcaatgctaaatcataagcactgtactgtagctgttattaagagagagtaatattttgactatgtgatagagttttttttagataataataataataatcatgggaagttgtattatttgtcagaccaaagaggaagaattagtgtgtcctaataggctactctttcctctgaattgaatagcctggttggattcagttatgtgaaataataataataataaagtaacccagactctctgctacttctgaaagtaactcatcagtgtagtacctaacaaatatattatcattatgcattaagtagttgaaaaaaagaaaagaaaaacaaagtggtattattaaaaagcattgacaaaaatagaatagccaaacaagcaatcctcaacctcaaacctcacccttattagcttcagtttatttaattatggctaactaaggtcatgaaaaatgcaccataaattattaagattgttagatttaagaacgtttgtctaattttagtaaaaaaaatctaatatggataaaaattcagaagacataatttagtatat

SEQ ID NO: 164110 - DNA, 1093 bp, Cannabis sativa
  modified_base (1039)..(1046): a, c, t, g, unknown or other
aagttaataacaaaactaatggcagttgcagattgatcaaatgtaaagagacaacatatactcagatactctattcatgttctttaattattatatataaacaatggaatatataattaattaatgtgaataagtcaaactttattcacatgaaatacattaaggagatgatgataaaatagtgggaatttatagaatgtatattaaaatatagatttcatataaatgaatcaaattagtttttatggccattacaaaatgatgttatttagtattgaaaaagtctcaattctaatagttatactttgattgaaagtctacttaattaaattgtgagcaacaacattaaaagatttaaatttttttaaaaaatttaaatccaatgaaagattttataaagttcttacaatgtgctacatagattttaatttcttatcttggatttaaactcttgatcgttttgataattatgtcagaatcacatttcactgtaataaagcaagcttttctctgcaacaagtttcaaccccaacagacaagaggatgcttccccataaagagcattggcaaaaggtaagccactttgtactagtccaaagcaccttcctttcatgatcacgagccaccactgccaacatcacttttccctccctaaaccccacatcgtagttaattttggtctaatcgatccacagttgggggagtccactcaatggcaacaagaaggttgtaaatgaaacaaaagagagtgaccataatgagcactataataaataaaataatgtatgttatgcaggtggatattatgtaccttctcatttctcgctctccatataaggtcaacaacgatagatgcatataagaacacatcatcaacatttacgttctttccattcaaactccaaatgaatttgacccaatctcaaaatgtagtccttgaatcctgaatagggatgaggccccacgaagatgctctcgaaagatgagaagccatggtacatgaagaaacagatgttccttttgttggaatttattttannnnnnnnttagatctactcacaagtatgttgcttaacatcctaaatatgaactt

SEQ ID NO: 164111 - DNA, 924 bp, Cannabis sativa
aaaaaaacagttaatttttttgttaaaaagagcatcattccttcgggatcaaatttgccagtccaaactgataaaaaaaaaaagtaaaatcttctttactaagttgattaaagcctcttataagaaattccttaatatcaattatattggttactattgtaaaatttattgggagaagagttcctccacacagatttagctttagagcaatctacaagggcatgggttatagtctccactttactcttacaagaggaacaattggggctgctaaggacctttttgttatagaggttaagggcacatggtaagacatgattgaaggctttctagatgaaatgttttattttaggggagattttggtgctccaaacaattttctaccagagtttgaaacaatcgggtgtggatgagatgggagattggaaatagattgtgagttggctaggtgtggatgaagatgggagattggaaatagattgtgagttggctaggtaataggcagtgctaatagtaaattacctgactgatgatacccccaaataaggcaatcatttgaggaagggtcaatgggaacctataagattgcattgacctgatattgaggcaagtattgttgaagttttccaatgtatcatcagtaataaagttatttaaaaaatgagggagttcaaacttggaacccagttggagtcaagtaaagagatggagacctaccatttcccactctcaaaactagacctttcttcagtaagtccctaccccaaaggaggcttctccaagtaactgatgagcagtggcctttggaagcactaagaaactcattgtgcttaaaatatctagctttaaggagagaagacagaagaaaggaaggattagtccaatgatgagtccatatttgtcttataaatatgatcaatttat

SEQ ID NO: 164112 - DNA, 1378 bp, Cannabis sativa
ttgtccatgtacctataagcttcacgcaactttcccctatttcatatcttattctccaatggctataaaatatgatgtattttcattttttttttagagtattttactaaaacttaattctaatagtgatataaaatgtgtgttaaatttagtttaaattgtgtcaaatttgacacaaaagatagcatagccaaattttagctcacaataaatattatattttttaattacctttttgtcactcattaatactattcactaatgaaaaaataattgtgtgtaacaaaatattaaaattttatttttgacactttaaattattcaaaaattctttaaaaatctacagataattttatatagctgcaacgaacgtgatcttaaaaaaaaaaattaaaaactcttctaaccgaaatagataaaaaatttatcgaaacaactttttaagagggcgtactatgaacttatctaaaataatattttgcatttgtttagggtgataaaaaaattggtgaccataactttaacattcttaaatatacaatattagtaaatttgtaaaaataattattttttaaatattaatttcttaaaccaattgtgaaaaataatgtaccctaccctttatagtttttttttttttttttcgagaaaatcaaaactttattcaactcaaatcttccaaaactatggaagaatagcaagcaggtaaagatactccactaagaacacgattagcctaaaaaaaaaaagctctcgcaaaagcatgcgcaagcctattaacagatcgtttaaccaaacaacattcaacagaaaataaagaggttaacaagcctctacaatcttttaacactaaaccataaggagaagctaaagtcttagcattcttaagatcattgataagtgtaaggcaatcggactccactattacatgatgccaccctttcctcttgatacaacttcgagcttccttgagacccattgctttcaccattaaaggactccaagaaccaaaacaacatatttgaactgcctccgaaacagaggcgatgctatccctagcaaccattccaaaaccaaaacgaacatcgtctgagaaaatagcgccatcaacattaactttgatctatggtaaattcgatttagtccaatgctcaacacatcgctcatgacccaagttattaggagagttagaaaactttttttgagcatcactctaaaaaaacaaagttaagagaagttgttgacaccacatcctcaatcgaagaatgctttgagatataaagtaagttactataatatatctattctatataaagtgtgtctatataaccgaattcttggtttatgagaaattcgtgggtgactttttatttatatt

SEQ ID NO: 164113 - DNA, 1078 bp, Cannabis sativa
atatatatataccttttgagaagttgagtgtgaaagtgggttgatccgccccaagatagttgatgtggaagatgagttcatcaggtaagtcatctttgcttctccagactacccaaccaattcctgcatataccaagccgtatttgtgcccactaacgttgatgctcttcaccaatgggagccggaagtcccattccagttccggatatagaaatggtgctatgaagccaccacttgctgcgtccacgtgaatgggagtatcccatctgcatacaaatatacatactaaatcattaatcgtaatcattattcatattcaattcacgagttgtttaatttacattaatgtacgcacccagtttcttcattctttttcacgagaagatcatttagtagtttgacatcttcaaattcaccattaagagtggaacccaaaatagcagcaacgcagatggtgttctcgtcaactagctcaacggctttctcagggtccatcacatagtatccttctcttaactttacctccttcaactccacctcaaagtaccttgcaaatttctcccaacacaccttcacaaatgaataaggacatccaaatgggctttgttaatttacattttataggaaatatatttaagaagcctgatgtagtgtagagagcccaaaagtaatgggttgaatacctggacattggctccagtaacaatattgggcttatcaacgggcaaaccttgggccctgcgtctgttttgccactttcttttgaaagccaaaccagccaacatgatggcctccgaggaccccacagttcccactcccactgcagcctctgattcccctaatggcgcgttgaaaagatgagctatcatgttcacacaccggttctgttcacaaaatacaaatataaataatcctgacttgttaaaaaagtattattatgactagaagaattaacatcagttgtctcccattagaaaaaaaaaacatcacttgtctctatctcttcctattgaaaaggtgttacaactctaggactttattattattattattgttattgaagtagataggacttaat

SEQ ID NO: 164114 - DNA, 2188 bp, Cannabis sativa
tgacacataatgaagaaaaaaatgtcaatatatacagacgtttttcgtgactctacctaagtattttcctataattattttttaaaaaaaatcctatcattcacttcttttttttttctcctccctctctctctaaaagttcttaaaagttgtttatcaaagaacttaaattataaccaaaattaagagctttgattattttttaaaaagaaaaatagaggttgagattcataaattctctaatggtgaagtcaaaaaacaatgtaatttttttttttttttacatatctctcttctcatatcatattcacaaaaaaattaattttgtagtggatatgattgtttttgacaaataattataaaaaaaaataagaaaataaaattaaagatgaatataaaatgaaacaatgacacctactaaaaaacaactttacataaagttattttcaatacctctatgcataattagtaacaataaatttgatctctcttgttaattaacaaataacattgtatattcaaagtgactcacattcctattttgggcattcgtgataggattatttattatagttatgacaaattatatatctaaaaaatttgaaaaggaaattacataaataaatatcaaattcaaaataattacaaaaatatctaaaaaaataaatattaaaaaatatcataccacatccgcatatatatacctgattcaaacgtaattatactaaaatataaaagttcaaaaaaagtcgcaattcccctctttttaggcttacagtaaatcttttgattagcaacaggttaaaatttttgtcccctaaactttgacatgtatcaaattatgccccttgaacttttatcggagcatgatttgctacatgtcaaaattcaagagacaaaaatcctaataatagtatactaactagctacttttttataaaaaaaatatatatttttaataaatttgtacactaattacttatatatataataccaaaatgtatatttaattcagtaaaaaaaaatatttaagaataatttttttcaaaaaaaattaacaattaaaaattgaaagttagaaaggttacaattaaacatattacatactgatagacttttttaattattcatataatttattttatacatatatctactctaatataccaaaatgtatattcaatttagtaaaaaaaattatttaaaaataatttttttcaaataaaattaacaactaaaatattaaaagttagaaagtttactattaagcatattatatattaatatatacttttttaattatttatgtagtttattatttgagagatacattatggtaattttcaatttattttaatcaccaaatatataatcaatatactaaattaaatacgaatatgtatagtattctaatcatataaaaaatacacatacataacagttttatataatatacaaacatattttttaaaattaaaaaataaaaaaccttaaagtatacgcgcggtttgaaacaataaatctaaatttaaatataaaaaaatagaaaaagaaaagaaattataaattaagctataaaatatagaataatgtaatagttttaaaaatggcacgaagctacgttaacgaaactagtgatttcaccttgagttggctatgaatcttggaaaaattcctcttggggccaactttttttacatctcttcctcggactctaaaagtccttgagaggatcctcatgagagatacgctaggttactatttgagaggggcaaccatttagggtgcattattaaccttcgggttggtcaccgtctttcgcactatgattgagtacttgacttgttatgtttgggcatggcactctatcactaaggctcgaataggtgaagaacaataaaagaggctcgaaatcactatagatggtgtctttcatctactagttgtcagagaatgaaaactaggtttaagttggttgaattcaattgttagatgagatgagagcttcatgttcctttttttatagtatttcaactagggtttaggatttaattatatggattaaaaaagaataaaataatgagcaaattacacactagtggtcggccacttaatgggcctcactagttacaattttgtcactttatttcaactacttaatcttctttcaataataccatattttcca

SEQ ID NO: 164115 - DNA, 1887 bp, Cannabis sativa
ccctattatacaaatatttttgtacatatatatataacatacaatatatccatatgatggattgatctttggtcattcgagcccaaattaagtcacgatttattttttaagaaaatgttttttgtagggaagaaaatgttttaataaataacttttttttatgaaacgttttgcttcttaaactactttttttttttggacaaaatctttccaaactaaataaatggttgaaaatatctccctttaatgacattttgctcattttttaaaacaatttactgacaataattaattatataattaattgtagtacaaaaatctatttaattaacaactttaatcaatcgaaaagccaatttatttattatttttcctacaaacaatagttataagaatacatatacatatttctagaattcatattgctattttgaactgaatctacatcaacgatcaataatatttttatatttcaaaaagaatctttgcaacaaaagaaaaaagagagagaacaaaacactcataatttagaagacaaataatcctatttattcttttctatttttgcatgaagaacaccatgatcattttagttagaaataataattaataaaacagagaatacaaaagtgaaacatcctagatcctatacgtgcaaaacgtttgggaatccaatccagctaataaataataatattatatatgagaaatgctaaattacaccattgtttaacacctttttatgtgtcaatatggtccaactaagtaacgggtccatataaattaatataatagcttttagggtgtatcgttagccaatcgcaacgcggcatgtcgagaaggtactaagcaccactggtgcctaatagtcatgctcattatatatatataagtacataggtaccctgtttttcataatatttgagtgagtgtgtttagagagagagaaatggatttgaattcgtttctaacatcgttaggaacgtactgtctgatatttttgattttggtattgctctactcatggatgtcgaggttgccagtaaacgccgtcgtttactaccccaatctcatgaataaaaagtccaaattacccaaagggaccggaacgacgtcgttggagttggatccgactaaatacggatctggatcgggttgctgcaacccgtttgggtggatcggagatgccgttaattctagtgaagaggatattatcaacatgtcaggagtggacactgctgtctacttcgtcttcctcaccactagtacgtatacatctataaatatatatatatatatatttggttactagtaactaaatttgttgtaactaatatgtataatttgtttggcagttttgaaagtactatttttaagtgggttagttctgctaccagttcttctaccagttgctgtcactgatgatcgattgcaacgcatcaaagaagagatagatgatgatcttcctcttgatcttcaaaagttatccatgggaaacgtcgatgtatatatattaattatactaaattcacacacacactctctatatatatgtttcatttaactttatttattaggatactaattatggtccattctgaattttaggggctcccatttcaaatatgatatttttataaaaaaaactataaataaaatattatttgaaaaggtaaaataaaattataaaaatacatcaatattaatatgaatttttattttttttttatttttaagttttcaactttttttatttacaaaagtaaataataaattagtgcatgtttgacatcataactaaaaaataattttttgtttttaaaaacagaaaattattttttgaaaacaatttggcttgtttggccttgtattttgaaaacagttttt

SEQ ID NO: 164116 - DNA, 2282 bp, Cannabis sativa
  modified_base (2118)..(2118): a, c, t, g, unknown or other
  modified_base (2235)..(2238): a, c, t, g, unknown or other
cacatgccctcccaagaaaaaatagacatttatacaaggggcaaaagttaagccacttcttaaaagcttcctttccatcaaaattaaaggctttctactttttctattattttgttcaaaagaaagaaaactcttaaaacaagtaccacaattatagcattaccccacatagccatgtgattatacctttcataaaggagatatttgaacttaattggcaaaaaaaaaaaaagtaatccaatcatggataccaaagtaaatagcaatatatcaaatcatcaaactttcttctttttttttcacccaaactgattataaacaaaaacatttgtctcatgaatgagaaaacacaggtctctttgacaatggaagccatgtaaaaccatacataatattatggcatatacatattatgcctttgggtgaagttatgaaatttcaattaagcctttgcaacagcatcacttgctgttgctgttgttgcttctggttctggtgatggtttcagaatgatttcaacattgtcatggactccttgcagcaacaactcaccatcataggtcaagaattttcgcctctttgctgctcgtaacgtcccgaccaacgcttcgaaaatattggcacacttgtcatcatgaaatagcacaccaaatgttaccttgaagaaacaattcaaacttgtaaatcagccaccattgatactaagcagcacactatatttgttcaaattagatgaacaaacaagattcgagtagtgtatttcattagaagtaaaatttggcccaacataatgtaaaatatgtcaaattgaactttttttttatttaagcgtttatatattacaagacataatttgggactcgaacccaggacctccaactcacccgcactctctcatggccacttgagctaacctcaaatggttatgttagtaatgcagaaagattgagtcatatatttttcttttttggtaaatgcaggttgaggaatatgatgaagaaattgtatggttgagtcaaatttttcatcaaaagttgacttggcccatacatagatcaaaaatggagtttgattgaaactatgatcatctaatgaaaccataagataaagcattggcacacattaataaaaaaaaataaaaaatgtagaattttgcaaagtgggttttgttttttcaaactcaaaccttaaagttcccatctaaaagaaaatcttagacaacattttcctaagtctttcccctctctactaagcagaaattaaagtcttaaacttgagcattccatttatgattgaatggattctatctaggtcagtcatgtgattttttttcatcaaatcaacaaagtaaagcatcaaatttgcatcactatactctaaattgaaacgaatttggtaaattgggaattgacaaaaaagaaaaatgagatctcagatccatccagattaaatcacaaggaaccaaaccaatattcatagattcaacaacaacaagaacaagaaggaaaaaacaaaggttttgtcaattgttttaccttgtaagacccatcaggctggagctttccaagccttttgatctcaactctgagtcgctcaacctcttcttccacgttcatggcgggtttttcctttcttcttcttcactttcttatgggagagaaacaaataaccgcacacagctctccccctatgttaccttctcttatataattataatatagatttctttttaatgggtctaatcatttgatatctttatatcttatctaaatgtgtttttaataacaacatggtggtcttcaaccttgtttataagcgacattttataattagttagcgatattataagaatcatcacttagttacaccataatataacaccgatgatgctgctagatacgagtgatatcttttaacaattctcttttaataatcctctaaagtgtcttatattttaaaattataataatttgtaggataaataactaagtttaatttttgatagtaataatacttagattatttttagaatttatgttggtagctggccggtaattactaagttaacattcacatgttattttcttattgatatatttaaataaatttttaaataanaaataaaaatttaatgacttgaattaatcaagatttgtcttgtgactattaactttatacttaacatttaggtacttaaagtttttgttgcgatatttagcacacgcaagtgtacgnnnngtttcaagtagtagactcactaggagtgaggtcgatcccacagg

SEQ ID NO: 164117 - DNA, 1423 bp, Cannabis sativa
tataggccatttgtaattttgtgttgtactattaggtagtaaagttgtttgtttgtggatcaatacatctcacttatttagcaatatatatatttagctagacagtaggcatgatatactctgtaaaaaaagaagtagttattttattcttatatatttctatattgttaatatgaattgtaataaatgatataaaaatattagcattttttcaaacataaaattttattttccacactcagaaggaaactatttttttattccaaaataaaaaataaaaaaaagaaaaaaaaaaaaaaaaaagtaggaaactacctttacttcctgaaagaccacaaccatacaagggcattccaattgtacatcgaccacaaccacaactaattgaattccttattttttttgttgtcttcatttattcattcactacatgtacaagaaaaccaatttgttatatcaacctcttgtccactaatccatgatgatgattattgtctaaaatttaatacttccccacgtataataaccaactcttctctctactctccatgaatgaaataaaagcttattctgatttttgcatccgtaaatgtaatgaacacattttaacactgtggaaggtcattaggcggtggtggcaaagactcatttgggccaaaaccattatccactatgaatgccatcttcaaaccccaagttgtgtgcacctctaaatgacagtgcaaaaaccagatccctgcattaattacataaacaaaaacttattaattaaaacaacatcacactaatttgttgtataatccaattaatgaaataatgtaattaataattaattaagtaacaaggtcaactgtccatgagattatataaagtgatgtgaatacatccaactttattaaaagtcttttcccaatatggagataagaatagaaagaacatgtattgcttgaacgtgcaacttcttttaatgcatgtggtccagaagataattataacttttgtgtgttaggagaactttatgacatatggttggtttttacttccatactaaggtactcatataaatatagtaaaatggtgtaatatctttgtcaaaagaaaatatctatttaattataataagaattaatcagatatctattcatgatctattgaatttcgaagttgacacattgtaatatacatctgtggtgatgattgaacagatgataaatagcagtactcaatttattttataatagctagagatctataatgtacaataatgtacaatacacagatatatatatatatatatatatgtgggcaaatctcacacacaataatttcatgtgatcctacatcacatgcaacctctagcgttaacgtatccaataaaattaattccaaatcacccataattatatgtataaatatatatata

SEQ ID NO: 164118 - DNA, 1612 bp, Cannabis sativa
cgaagctgcattcctaacaaaaaccctagctcaaaatcttataatcgactcaccaagatctcttcttccaaagtgacgcgtataaatagtctttacaacgctcccagctggatgctgtctatgtttatcacttcaaaaagacatgggcacatgcatgcacattatattaatatattcataataaaagtttaatattggaactccatgcatctaatagataactataatacacctcgtgtgtatcgtggtatgttttctttcacccacttgtatacctcgctttcgattttgttatctagctatatatatatagttactttaaatgaagcatattcaattgaaaatgtagttcttatgtagcttaaatttatatatatatatatatatatatatacatttccatttataaggtaacagttgtttgtttgatcatgattcttgtcctcaataaaattcttcatctaattatgtagcttgttttggctaaattgatcactgtatgtacttataggaatatgaacttattatactcttgattaaaaagctagcttaattaacatgcgcaaaattaaaagaaaaataaaaataaaattggaagaggccggttaggtactgcttcaaattactttttcaattgtcgcaaatttagtaacaatacgattctttaaaatgtatagagttattagtagcgaaacacttttatatattttacttatgtctatttaacccttttttcttatttactactagaaaaatagtgtattttttcagttttttgcaggaggaaaaaattaaacccgaagatacaagtaaagagaaaaatgaataaaaattgaggacctacatctttggttatcgaaaagctaggtctgtaaaatcatattctcgaatttgaaattctcatttcttctttcttcttcaactatttctcaacaaaaaagcactgctggctcagaaatctccattttttccataaactaccatttttcttttaaatcttctaattttctcacccaaaaacatatatattctacaaaaattaatttattttaggatttgagaatagatgtaggagtttaggtgttaggctaattttagtctaagtttcgagtcgtattttcgagtagttttcgacttttatttctaattttagggttattttacgcttgattcttttgttttaggtccctagatatttaaaggaagtattcacaagaattgaggacaagagattaaaaagttgagaaaaaaatgtacaaagttcttttctgccaaagcccgtcgcgacgggcagaatctttcgccatgatgggacttggcaaaaaattttctaagttgagattgagaatgctccgtcgcgacagggaataagcttcgtcgccttcctaacgacaaaaatggcagttttgtaatttcacgaattgtaaagagaaaacttggctcatttaaaagaaaaatcgtgattttttatcattttcagaattggagccctagaaacaaaggagaagacttcaagagtggttggtggcgatctggatcgatttcttcaaccagttctttcttctctcttaatttttatatgttattttctgtttcaattttaattatggat

SEQ ID NO: 164119 - DNA, 1239 bp, Cannabis sativa
  modified_base (506)..(507): a, c, t, g, unknown or other
  modified_base (1205)..(1205): a, c, t, g, unknown or other
tgaattaaattctttttccaaataccaaaacagataaatgtgaaagggatataatatagaattttccaatgtaaattactaactagtcgtattattgttacttaatagcaatgttcttgtattatgtgttgtattatgcataaaaaaaattaaattgaaaaagaaaatcaatatcatggttgatttttatattttactaactaaaaattcaagacaattaagagtaaattagaaagaaataaaaatccttattatttatattcttatacatatttatatatatgtatagtagctgtagagtaacggttatcaaaatataattattggcataaatggtcataatatatttaagtacgaaaaaacaaatagtaataaaagctcattaacctttttggtttagtgggggcaaagttatattaaaatgatcttgatttttatacccaaaaaaaaaaaaaaaaacactattcaaaaagctcatcacttttctcttttcttcttcttcttcnncttcttcttcttcttcattttctcttccctaaaaaaaatcccaaatgcaattcaacacaacctataaaaaaaacaccaaaagaacaaaacttgttcattatttttttcatatatgcatccccattattatagttacttgattttttggttactagttacaacaattctatttaagtatggttattgtgagtcatcatcattatcatcaattggaattggttaccaatttactctgcctgtggtggtgggaatcagtagtggaagagcttatttaatggagagcagtaatgaaataaaaaatgagccaaattttaaggtggcattgagtgttgaagccattgaagaaaagttcttttgttgtttggaagtgtttttgggagatgttaaggtttggaattcatgtcattacacaagattttatatggttgataagtgtgttcttgattttactcaagatggggttttgaatttgaagggttctaaagatacaattgggtggacaacagctacttctggacaaggtgtgcaggtaattattttatttatttttattattagtaattttattataatataattaataaaagttattgctatatagactatagtaatgtttgttcctctctaggtttttgatttttttttttgactaattaaataaatgaaaatagaataattatcttttttaccccctgtanttatgacactatactattatgccccttaatctat

SEQ ID NO: 164120 - DNA, 991 bp, Cannabis sativa
tattggtattatttgttgtagtgggagtggcggaactagaaatgtactatcggagcttgtggcctctaatggcggaaagaacttgaggcctccatagaagataatttccatgatccagctttgtacccagtttgtgagagaagataactagtgtaaatgatggagttgaggagttcgatggttgttgtaggcttgtggctaatgagatggttggtgaattcgctaagatgattaacgagagagaagacaacaaatgagaattagatccgagctctgatatcatgtaaagaaacataatggacataatagaaaataaacaattgattctcattagattggtaagggtgaattacagcctttatgtagttttgaatttacaaccaaacagacaatgactaaactacccttttaactaactaaactgttttatgacaattaaaaaatgcgttagttataaaccgtttctacgtagttatactcttaacacgcataactcaattcatcaactacaaataaacaactacttgttaaaatcggttttcgttaggctccttttcagctagttagttattttagttatttccttttcttgttttgttatttttatctcattgcttatttaaggcttcaatgatgtaatcaattttcagttcagatcaataaagaataataacaactttttctctctcgtctctgtcctaatatggtattagaagatatacaccattaatctccaagctttaacgcttcacaacaatggtgagaacgcaaaccagagcttttgctacaaccactcatcccgtgattgatgccactgctacacatgctcctccaccatcttatgcttccactgacaacatccatggagtccctacaccagctctgactacaaactcaaaccagaacgacaggcctgcatatgaagacatctgcagccctgttgggttttatgccctaaataaaattctatttcaatgtaatccagattatt

SEQ ID NO: 164121 - DNA, 973 bp, Cannabis sativa
cgggccgggtttgtggcgggccggccggcccgactgacattcctaggagttagtcattccattcttatttcatggagcctattctattactattgtttttcaagaagcctcttactataagattcagaggtactctcttaagcttttatgttttcatttcttcctttattggttatctttttcttgtagtattgtactattatgagtaattttcttatgattgctggtgttcagtttcaatgctgcaactttggccttaaatattgatttgaatctggagtgctctgcttttcatgagtgattagaaactctgatacaaaatttgtgtgtgaaaattgtatagaactatagatattactctattaaaaagtatttgttttttattcattcatttttcgcagaattgttttgctgactacaaacttaaacaaaggtaattaccacaattctttagtttaccttttttttggatataaagttatagtttactccttttttttttttctgaacctttaattgaattgttgcttctaaccaatttattatgtttttgcaataatttgtgatttttttttaaaataatgttatttcaaatctatttagatttttattttaaagtttgaagttttttcataattattaattagtttgtcattttctaattctttcagaataatacagaacgcataggcacctgcagatattgtttgttggagctttaaattttttttccatgtgtaattttttttgtaaggttgtgtaatatttcttttactgtacatacaattaattctaagaatttaaactttatttggtttgtagatgtttatataaatatttataaatttataagaattttattataattcttatttattaaaattatgaatataaattttaaattctttaatatctttatataataaaagtgtctatctaacgacatttcttagtttaacagaatatacttaaa

SEQ ID NO: 164122 - DNA, 598 bp, Cannabis sativa
agagttacaattgaaattaaaaagtaacagaaagtgtttaactaatatagcatatagtataaaattttataattgataatatatatcgaaatgcattgagcatgagtatctaatatatacatatatgcattgttgggatagaaaagaaaacatatttatgcattgaatcggcaagaatactttgactcattatattaaaacttgggatatcattatcttcaaactacaattaatcatgatataaagtagttattattatgcttacacagttaatagtatccaaatatcatgttgttgaacgaaaaaaaaaagaggttattatccatactagtaatattttataatgccaccattttaaccttaaattatccttactagtaattttttataatgccaccaatatttggtattcattattgggtaaacactacatctttttgtttaaaacaaaatatttgacaataaaaacattgtctaccctaatctaacccatttttaagatgataataaatactagaataagagaatcaatactcttgcaaacatcaacaaaaaaaaaaaaaatctgagaatgtaacgcccttacttacgtaaaata

SEQ ID NO: 164123 - DNA, 2335 bp, Cannabis sativa
tttctttttctttttcttttttgggtgcatgtggctcagtgttttctttcccttttgtcatggctacatcaagttattatgaatgaaggccctcttccacatttttgcacttggcctcagttattcatgctcatctatatatatcatcactccagaattttatgttgggtttttgctccctatgtgtatttgggaccacttcctattttataataataataatattaattataataaaaggcatgatctgcttttactcattctatccacacttcacatatttataatacaaatattttagggttgtaacttgcagcatatcaatacttagatgatcagtttcccaagactctgtatatgcagaccatagtaataattaataatatatatatatatatatatgtgtgtgtgtggctttactgtgtttgcattgctaatggaaggaatagtagtctcatcactttccagccaatttcaaacaaaagtcaggatttaatactgataatcatgatcatgggctagtagtattgattttgacttgtgcatactcgaaatttttcatttattattgtaggttttccagtttttgttagtgtttacaaatttaatttaccaatatgatatataaattaattaatgccctattgaattctcattaatcaataatatttggcatgttgaatatgaataccagtacgcaatcactagtataaaagtcacgtttggtcaagaagaaatttaataaaaatataaaaatgagaatacgaataagaatgaaatagaataaaatttaaaatacgtaaaaaaattgataaaaaaattattgcatttttttctcatgttacattggaatgatttttctttttatttcaaaatagaatagtcattctaccaaaatggtagaaaggttattctattagaatgacattctaatactttaatatacaaccaaacaaataaatagaaaaaaaattgtttcctttccatttcattttatttcattacctccaattaaacgccacctaagtacttaaaattttgaatttgtgtttgacagaaatttaatgatattttttaacagaataagtatctaatttagtaatataatttttgtccaattttataaatacagatatcatcagtatcttcaataagacacgtgtaagatctttgttagaatctaaactacacaaattgagacactcaaacaaagatcaagcaatgcagaaaaaaaaaatcaaagataaataaaaatacaaacaattaatgatcaaaactaaaggcagaaaagtagagacaatgaacactaaaattactggttcggatctgatctcaatgagagatattcttactctaaaggtcggcaaggcttgagaatcaatccaataaattgttgaacaaggttacacactcaaacacagattaaaaaaatcttattttatcttactcgagcaacaactctacaattctctcaatttacaaactctcagcttagtttcataaccagctttgtacatcaattttcctaaaccctagttgattagtctatgtgagtttacataggtttctaagctggtagcaggggagagaaaagggaaggacaaaataattaactaattctgttagcttgagtcttgaatagttaaaacagttggcctagctgttttaacttcttgatgctatgtcaataattcgagggagtgtgtttgataggctgagaaatagggactaaatttcataattctccacctggttcctaatttcttccattgtagcatttaatggatctacgcagtttccttagaggctcatattttgataccacgtaaatttagtggagcattgaacttactaaatagtatcaccttagtcaatagatctccatggtttattgttagaacttaatttatcaatatcttatttactgatcaaatatgttgattataacactataatctaatatcctaaatatgcatgtataaaatcaatgaatttaaacacaaaagatgagatttctcacataatagaatgcagccgaatataatgtctccttctgttctaacactctaacatttgattccttcattcataaagttttaaacaagtatggaacctagatctattttctcttttctctaagtttgaatctgaatataaaattgagaagaccacagtcttccacaatttcttgagtatcacattgagcaatgtgggcgaacactcaatacacaaaagtttgatctcttggttgtattgggtagaaatcaaagagatagagagagatagataaatagatagatagatagataaatagatatatatatatactagtaaa

SEQ ID NO: 164124 - DNA, 1543 bp, Cannabis sativa
tttacctaagatttaagaaacactggaactcaaggaggataccctcaagggtcattcaggaacggaagttgaaaaagtatttgggatagtcttttattcgggaggttgcttatatggtacgtctctaacacaattccgaggaatctggcaacatgtcccctttgccaaattttagaaaggctcacgataaaaaggtggttaccttttttgtgcaatgcgccaccactctcacattctccttcactaaaacagcgcacgacacttactgtcattgtcaacagtaccatgcatggtatgatagactgctttttggaattgggcttcacttacccagcccaatagcttacaagaatgttaaatttatgtattttaccccatcaatggactttatcctataaaaaaccctagtacggcctaaatccatctgagccaataagcatggtttcttataaatatgacattttctcctccatgcatggggttcacaataaaaaaatgtacatttaagctgtaaaaaaatccatggctaagagcttataaaactgcattgtggactaagactcattaatacctcaaccacataaaaatcgtgtgttattctctctttattctaattttctttagcttaatctcttttaattattaatttctaaataacttagtaaaaaatttggtgctttcattgatagctgaagaaaacttctcaccattgtttgtcatctacaataatggttggcacaagaaatacgattgtgcagtcgaatagccaaaccactcagaatgtcaatgaaaatcccattgttgatgctctgaatcctctatttttagccgacggccatgcggggagtagaggcgtcagtggtgggtggtgaccccttcaaaaacatcaactagcttgaagaacttcatggagaaaatcctaacggagaaggcgctagactaatattatgaaaatgaaaaagaaggtgattatgacgaggaagaggaggaggactatgacctagaaaacatagaggatctctctgaagacccataagtaacacgcttaaagaaattggtcctaaaccatgaggataagatggcaaagtaaaaagaggcacttgccaaatacaagaaaccctcatttatttgcaaaccttgattgcaacatgaggtctcaacccagaggttcctccaaacaatcaaaacttacccctggcgttcaaatcaataccaatctgtcagtggctactagaaagtacaatcatctgggagttggactgtcaataccaatgaatgagaaggggaaagccatagctgacgatccctagaagaagaccaatccatcacaacctacggggtttaccttcgtaagtaacagaaggagagaaaatgttatccttcggaagagaagggttgaccaaaccccagagcaaggtcacccaaccaattcgtaaaggaggatcccacaaggcaataatactcgtgctcaggcaccgggacttaatgttgggttttgtgcttaaataaaattatattataatataatcttttctattcaatt

SEQ ID NO: 164125 - DNA, 758 bp, Cannabis sativa
aagtccatatcaaccaaatcacaagcaagaagagtttgttcaaacccagcaatcaacaaactcggatacaaatggccaccttgcttatcattttggctcaacacattgtttaaatcccctataacacaccagggatcattggaagaactcaccagggacttgattaaattccaagtatcttccctttggcatctttgtggttcactatataaccccgtaagcctccaccttgaacaaccttcaactttaactaaaaagtcgatatgatgttgggaaaagcctaccactcttccatcttttgagtttttccaaagtaaagctagtccaccactcttaccttgggcttccattgtaaacactccctcaaagcccaacatgcgacccacatagtcaattcttgtcttaccactttttatttcacacagaaaaataaaactggttgcttttgagaaataatctctttaaggaattgaaaagtctgttggttctcaggcccacgacaatttcagcttaaaacattcataatttttggcgggcctctaccacagaaccctccccaacaacattttttgtcactgttgaattgttaatgaccatactttcactattttctctactcgacccatttttcttagacaactattattttcctctttgactcagagaccattaaatccccatccacctcatcattgacatcatcattcttactcttatcttcaaaaatatactcggctggagatcccataaaattagtt

SEQ ID NO: 164126 - DNA, 2311 bp, Cannabis sativa
aagacttttcaaagtctggtccttggccttttgttacacgcttggtgcagaacactgtcaacccaattattactcagtctagacagccatcagcaactccaccactaatcacggatcgtgagaagggtaaggcagttatgactcatgttttgccatcccctggaatcactgcatatcaagttgctgctacatcttcacacactgaagcagagagttctggtgtaaacaactcctcaatgtctaccaatatgatggaaaaaatcatcccaccaatttcatctcatgtgttgccttctccttcgattgatataacacctgcatctgattatgcacttaatgcttctcctgatattactgctactcacactactccagaaattactaaaaaatcattgcctaacttctcccatcagcaatcggtggttctctcagtcgccactcctccggcttactaccacatgacaaaccactctatacttctgtcatagcgcctttgacatccactcctttgatgacatcctcatctttagttgtccactcttctgcaccagcacatatctcttacgtgaacgcagcaaccagcaatagattttcatcattgttcaccaaaagataattggtttcaacaaacagaaatgttcatcaagtccttaaacgatgtcatactcgtagtaccccactggctgattcaactaacactttccaatatcacatgtcgacggattctacctatgacaattcactggtggaagacctttctggtgtttctttggcgcaggctgaacctcagcctccccaatcaccatgatcctgattagttggaatgctcggggtctgggcaacccgagagcatttcgtcaactccgtttgcccattactaataataaacctgatgtattatttattatggaaactaagcttagcgtaggttctatatctaaatttcgtaatacttttaattttcaaaatgggattgaagtgcctcgagtgggattagggggtggtttgatgcttctatggaaagccaatattaatgtatcaattattaactatggaataaattttgttgatggctatgtctctgctcttgatgactcggtttggcatttctctggattttacggtgctcctaatgtatctcaaagaactttcacctgggaacttttaaaaaaattaaaggattcagccctactatttccttggcttgtgatggggggatttcaacgagattatctctcagaatgacaaaattggaggggccattcataatgattcacaaattgatgcttttcatgatgccattgactcgtgcactcttgttgaattagactttgatggtgatcgatttacgtggcacaataacaaccatttgggagcaaatgtaaaggagagattagattatggctttgtcaacgagaaatggatagacactttaccaattcctacggttgatcaccttgattttttctcctccgaccatcgtgcgttgaaagttatcattgctcagcctaacagattacagcaacaacaatttaagtcaagattcaggtttgaaaaattatggctaaaagaagatgaatgctcaagtcttatttcacgttactggagccaatcctgtggtagtgaaccaatttctcaagccctttgtaatatcaatgtgtgtgcttcacaccttcaaaattggcacatgagtaagtttggggatttgcctaaaaaaatcaagctttcccatgaaaaagttgctggtcttcataatacaaatagcactagtcctgaacactttgctacaatctagtgaaagaattttggatgaacttttgtctcaagaagaggattgttggcatcaacgttcgcgggtttcatggctacaatctggtgactcaaatactagattttttcaccaaaaagcttctggtagaaagtctacaaacaaaatcaccaagcttcaggatattcatggtgtggagcaaacctctactgctgctattgtagatattattcagcaatacttcagtagcattttcacatcagagggtgttcacaatactgccattcgaacagttcttaatactgtcccacacttagtcacgaatgagatgaatgtggaactaaccaggcctttcaaagaagaggatgtctttgctgctctcaaatccatgagtgatgatggtagtcctggtttggatggaatgtctgtcatgttttatacaaattattgacacattgtgttgggttttgttccctaattaaaacccattacaatttgattagttatcaatttagaatattgaagtgatttatgattacatgt

SEQ ID NO: 164127 - DNA, 1593 bp, Cannabis sativa
aaaaaaaaaaaaaatcattttatggttttttttttgggcaaaatttacaaaatatgccttttctaataaaaaaaaatatggaaaatactaaaaaaaaaaagagttaaaaaaatatgataaaaacaatttaaggtaaccagttacattcttagggtaattacttaccttatcctatatttctcatagtttttaactttttgtccccccaaaaaaataatcatatttttgcaataaaaatccttaaaatgtgtaatttttaggtgctgcaaatttttaaatacaaacaatatatttatttctttatttattttttgagaagggatccgatatttttagtcaaaatttttattcttatatttttttttcaaaaaatacttaagaaatgaaataggccgtatcgtccagggaccaacaataattatttggctaatttttattaggtgctgcagattttttaatacaaacaatatgagaatattttattattatttttttaaaaaaggggtccaatatttttagtcagcgttttgatttttatattccaacaaaaatcaagataatggaaatgttcaactgataacctttaaaagaaaaaaagataattttgtttttaaaatgctaaaaaataatcctaatcaaaataggactaaaactctccgtatcctaatcaaactaggctaaacacacagttccctatataaagacagtagtaatactcttctatcatattatatacaactctttcacttatataattaatatataaagaacaaagtgatcgatcctcttcgtaatagtaaaaatatacacataattgctaataaacaatggatccttgtggtaataatgtaacttgggctgaagtgtgtggtttaaaaataggaaatttaaaccacaacgtatgttggccactattagtgggtgtaacattttgtgttgcggcttcttaccaagcaagtatttatataaaattctttgtgtgcacagccctaactacgcttaacccatgggaagcatcaattgctgctcttctaatgataatagccattgcatcactcactatccatgttgtttatgtccaacaaacactgaagaagagaaagaaggttatggaaatggaaaaattcacaggaaaatacatactcaatcacaaaacggttattgatgtgaagaacatacttgttcttttttgggtttgtctttgttcgagtggtgtttacttctttagactctattttgaaattctgttggaatcgactaatgttgtagcatcgcctaggtcagacctattcttggctgttattcatgttgcttggatggctatttttatatttgggggtgttgctgctgtggagtttaatctcaatccaaaaaggatttatagtgtttccatgatggagaagatgattgcaagctttgatgattataacaacaaacacaattttattatctccaatgtttagttatagggtttcactttttttatttttaaattgtaattgtaatattatgtttctagataaaagacacgtgtaattccaatatagttttatcgttagagaaaattatactttataccttttttatattgtc

SEQ ID NO: 164128 - DNA, 949 bp, Cannabis sativa
tatatatatatataaaacatattagtacctgtcctccatttataaaaagattaaagaaaataatatatatttgattatactatatacaatactcctagctagctgctaacctcagcttgatgaggttggggtcaccaataaatttatgtagattcttcataatttaatcaaaaggacaattaattcattaattaagctgaaacatgaagactttcagtttaattttctgaagtttattttgaaatgtcttttttcaagttcacaagcatttgatatctattttgtctcttatgataagttaaatttttttaaaaaaatattgttttcatctaccaaagtccaaaattaataaccaaattaagttgacttcttcttcacgggtttattcatcaaaatgtgcaattcacaaacccctctaagctattgacttaattcacgaacaaatacatagtaaattcttaactagtacgtactatatatttcgattataattaattaactagctatattatatatattgtattatactattttttttcttgtttaatacatatgtattggatcttaattgatgatcttcgattcattcatatattgtgtacactttcactatgtcaaagtgattttattatcttattttgaaaactgagaacatgatagattagtatgtaaaattgattttattttcatatacatgatgttatatatacatacataaatataggtttaatttgagctaatatatatgtttaatttattaacaaaaattaaaaataataatttttttgtttcttgattaattatgtaatttttcaaaaagattacagacattagaaaactcttaattagtcacataacatcttggaaaagtattatataattaagcttcaaatccatatatatatttatacttttttataaacatacaattaattaatatatatattta

SEQ ID NO: 164129 - DNA, 3103 bp, Cannabis sativa
ttgatgaaatggtattttatttttatgtgtttagtcttaccatgaaaaatagtatttttacataggaagatgttgctttgactatatgagtatatgatagggttcctcttagctaggtttagctccttcattagaccctttaaccatagggcttccttcatagcttttgttgtagcaatatactcagattcagtagtggataaagccactactagttgcaataaaacttttcaactagtacaatttcccctattaagaaaaagtaggttgatataaatattttagtgtccctatcccctacatagctagcatttgtaaatcccctacatagtcagcatttgtcaatcccacaatgttataatgttccgggtgtgcctagtatataaatcctactttagttatgctttttaggtatcttataagccatttcatggctttccaatgttctttccccgaactagacatgaacctgcttagcacactgattgcataagcaaggtcaggtctagtgctgaccaaaagatacattatataccctaccgcgttaaagtagggtacttctgccatttcatcttgttacaatttattcttagggcgcattatcttggacatgtggtattggttggtaattggctatataatacccttagcatccttcatagagaatttttctatgattttgacaatgtaatcttcctagtgtagcatcagtcttcctttatttctgtcccataggatgttaattcccaaaatcttactttccactccaatatccttcatctcaaactcaggcttgagtaaaatcttaaccttatcaatgtttgccatttccttgttgacagcatgtcatccacataaagaaatagatagacgactttggtcactttagtgcctttgaagtatagacaacggtcacaataacttatgttaataacatgcttagtcataaaggtatcaaaccttatgttccattatcttgggaactgcttcaatccatataaggacttgcctagcttacacacatacccttctctgcctttgacctcaaatcccttagattgctccaagtagatgtcttcttctagatacccatgtagaaaagttgtagttacattcatctgatcagtctccatgtcaaactgagttgctagggataacatgagtcttatagttttgtacctaaccactggataaaaaatcttagtaaaatccaccccttccttctgtttaaatccctttgccactaatttggctttgaacctcataggttcatccttggtacttccctctttaaccttgaatagccattttcaagacactacactcttgccttcaagtttaagtactgctctccatgtcatgttctttattagaaagtacctttcttccttcattattttcaaccaagctttgttgtttctgtccttgaggacttcttactgaggctcatagatctcagtatctaacttgcacgtctaggcataggcaatactctcatcccatatgttgtagttgtatttctggttaggcttaggtatccttattgcttctgtccttagaaaattgatactctgttaggtcttcttgattgtgttcctcctgatcttgtatcccaagtcccccttgatctattttaaattggtctagtgcggcctaaggttccacctgaactggttccacctgatttggattaggtttaaagtcagttaccatgcttttaggttgaatatccatagtagtacctgtagggttagtgtttgtagaaattgcattaagttcattagaatttttgaaaggaaaatcattttcttgaaaaatcatatccctacttataagtgttttgaaatcccattttcctttaacccacaacctgtagcctttaactccttctgggtaacccagaaatacacaatttagagcccttggctcttcaacacattggtgtgcaaaagttgcacaaccaaagacctttagatgagataggttaggtggattaccaagccacttttcctctggggtctttccttctattgcactggaagggcttctgttaatcagaggttttagtgaccactgcttttccccagaatccatttgtaaggcctgcattgaaaagcatgcaccttgctttattcaattttatcatgttcatcctctcaacaacaccatttttctgaggagttttcctcactatcatgtgcctctaaattctattgtcttgacaataccctgtaaattcattactacaaaattttatgccattatctgttctcaaggtttttcaattttctgttagttagattttcaacaagtaattttcaatgattttttttttttttgaaaagcttcatttttatgttttaacaaaaaaaacccacaccttcctaaaaatagtcatcaacaatagacaagaaataggcactgcccccaaatgttaggattttctcaggccttcataaatctaaatgaacataatctaatataccttgtgatttgcatgtgtcagtttgaaatcttaatctatggtgttttcctagtacacaaaatttacaaaaatcaaccttggttaccttatccttaccaagtaacttttattcactcatgatttgtaggcctcttttactgatatgccctagtcttctgtgtcatagaacaaccttagtatcttctattacatgttcttttgtattgtggcagcatgccactggacttccttgtaagtaacatagatcaccattattttatccctttataatcaccattgaacctttagctagtttgatggtacctaccttaattttgctattacaattctcaaatcgtcaagtacacttataacgattaagtttctagacaaatcaggcacatatttaacattagttagagttctaataatttcatcatacattttaaaataattagtagaacctaatctgtcaatatttcaagtttgatcattccctataattactttccctcctttagactccctgaatacaacaagtatgttttattgttattcaaatggaaagtgcacacagaatcaataatccaatcatctttaaaagatgatgcagccacatagacatctccactatcataa

SEQ ID NO: 164130 - DNA, 1320 bp, Cannabis sativa
ttagttaatggatggaaaatatagactttgttcggtttgtattcctctgcctataaatttttttggtttaaattatctcttatattaatttataacaacaatttttattctcaaaaaaaaaaaaaaaagattgctatttatactgttattttttttttcacttttacgtttatttttataaaaattattttgattttaaagttatatgggaaactacattacataaccctagaacaagaagtagaataaaggagaccaagacaaatatttagaagccagtactccatagtcaaggaatgacattagtcccagtcagcctgaggtagagaattttcttcccatttgaagttcaattgagccaataaaacaaaaataaaagctactgcattatgaaaataataaagagctacttaatagatatggtaataattaaaatccacaagatgagaagagagagcttaccaaaagataagcctcatcttgagtttgagctttgaggatgggcaaacacaacagttgtttctagaaagagctttagagacaaagggaccttaagaagatcatatggcctaaggtcttttattacatgtataaaattttcagcttctttattttatgcaaaataggataatgtttcaattaaaacattctttaaaaactaagaactcatttttctaatgatgagccatcatacttgaaattgtaccctgcgaaaacaataaaagacagactactaacaattttggcaccactatgtaagacttatctgggtgtgagcaacttatgtaagtataatatattacatatgtaaggttttaagttaggataaaaatagtaagagaagttaaacattaaaatgataaaatattgtgtagtataaacgatgtcatgaatgatctaattaagaaagcagaaaaaaaaaattgttaaatttctcatgaggcggtgaaaagataaaacgacagtgtatggatgggtggcaattcaagagtaattgaaaaaattgagtaaaatttttttattaattaagttgacaaatgatgaaaagacattaaaaagttttaaaaagtttgaatattgagggcataaagggaaaacaagcaggaggtgattaagagtcttattatatattactatattagatatattgtttactaatatttttggaaatcccacagacttatgaatgttatacacgagtacgctattcttggcacccatcaagaaattactctgaaaagaagagacatcttgttgatataggtagtacaaatcaatccatttaagcccttttttgttgtgtagtctcatacctacaca

SEQ ID NO: 164131 - DNA, 1330 bp, Cannabis sativa
  modified_base (1250)..(1250): a, c, t, g, unknown or other
tgatatcaatattgtccaacactgcttgatatgtagatgataattaataattttttatattaactattaaataaaaatgtataagatttaatatttaattatactaataataatactattcttaaatattgtattaacatctttcttcatagtttaagtgatttccatttgtgcttttggtttgtctaaaactttagacttgtttgttgctttgtcattaatttgagctatttgtttgtgcaattaattattctcatgtactagacccaaaattgaagtgaattaaattgatttatttaccaagttaagaaatccataaggacaacactcacaacaattttattaatgtatgtctcatgaacataccaacaaatggtatttaatttaattaattccttttaaatattttattaatatgttaattaataattaatatgcttctttaaggggattggttatgtggaaatgggcctatttttaatgaatagatgctttttaatatctgtataccaattatgaaattccctacaatttgaaccctttggaatttggatatgcaccaaaagattcctataaatactattattttattctcaactttcacataatcacataattttatttatttatttcttactatcaatgagtgaaaaacaagtgaacataaaagttcttagttttgtatggccattgaatagtattgctcttctctctctcttccattttttagtggaaattattacctcctttattgtctctttttaattcatgaaaagtcaaagaaaaacataatacaataataaagacacttgtaagaccatctccataggtaaaaaatatactaaatttagtattaaaaaataataaatgttttactaggcacacattttacaattgtgtctcaatgcataataccaaattaaaatgtaaattaatataaatcaatatattaaatatattgttttctttttattttctatgactacattttttttgtttacatagatatattgacaaaaagaattatagcatttatgtccaaaagaaaaaaaaacattaaaacacaattttatcactatttcttatgactattttattataagtaacaaaaaaaaaattatgttttattatgagaaaacaataatactttattattgttatgaatagtgtactcttttcatacataatgtaattgattatgacttataaaatgcaatcatcctaaagtatttaggtggcgtttggttggnggtaatgaaatggaatagaatggaaaggaaacaattttcattccattcctttgtttggttgtattttaaagtgttggaat

SEQ ID NO: 164132 - DNA, 2364 bp, Cannabis sativa
agtgtcgaaaaaggttgcgaaaaatgagtagttgtacattttcccttgtttcaattaagcctagtaaacaattcatgtctcaaaactcttttagtctttctaacataagattagaagtgattagtgtatcttcttcgtcttctattaagcttcaaaaatctcatatgagagctgaacttactattatggctcctactaccaagcaaagtgttgtttttcctgaattaacaaaaccgggaattccattcttcgatttacgcttacaagaagttgtcaaacgacagtctcaaaacactcacacctttcatattgacgatcaagctcgaagaaagccgcgatttcatcctagctttcttgaggagtcatatgaaaggtgtaggtgtatttgtgaagaatatgccaagtcattctatctaggttcttttcctttttctttgaaaactttatgaacctagctagatgttacaattgttggaatatttatggttatataattatgtaggtaccatgctaatgacagaagaaagaagaaaagccatatgggcaatatatggtaagaacttatatttcttgaactctattaccatatctcgatttttcatatataaatgtaactaatgtatttctttcaaaaataaattatccaaatggtcataaacagttgcttctagagtagcgaaatagggcttcgccaattttattattacagagtcaatttgaatagttttttttttctgaaaaattcaccgtgatatatctaatccaagcataatatcatgaaaaatagatagttattccttctcgaagtaacaaaatgttgaattttttgtgttatgttatgtagtttggtgtaggaggacagatgagcttgtggatggtcctaatgcagtgcacatgagctctgaagttcttgatagatgggaaaagagacttcaagacatcttcgacgggcggccttatgatgtactcgacgctgcattaacagatactattttcaaatttccattagacattaaggtaattcctttcaatcttttcaaatttcatgttctacaaaccgcttcgcgttactcaactctctttgatcacagccttttagggacatgattgaaggtatgaggatggacactagaaaattccgataccaaaacttccaagaactctatctttattgctactatgtagctggaactgttggattaatgagtgttccaatcatgggaacatcaccagaatcattaatttctgtaaagagaatatatgattctgcactttacttaggaattggtaaccaattgacaaatattctaagagatgttggagaagagtaagttttaatcatttattttcttctatgttagctatgtctctcatttgaattctctaacctattttttggacttgttttcccttctttagtgctatgagagggcgagtttatcttccacaagacgagctagcgcagtttggattatcggacaaggatattttctcgagaaaagttaccgaaagatggagagaattcatgaaagaacagataacaagagcaagattctacttcaacttagcagaagaaggagcttctcagcttgacaaagctagccgttggccggtatgacacttttgcaagcatagttatgacatgtttcacttctaatcctaatcatacggtaatcctgtgctaagacagactaggcctatacttagggtctacctcgcccagaggcttaagaaaaattatatttttaaaaagaaattttttatttttatagtttttaaggtacgtacaagtttacaaaattatgacacttttttttcaaaattttgttttcttgaaaaatatgaaaaaacagtataaggtaactggtaactggtaactcttacttgttttcttcatgttttttaagtttttcttaaattttttgaagagaaaaaaccatatttttgtacaagttgtacaaaaattcataaattttacgatttactcttttttaaaattacgataattcttttgaataagggttgaaatttatttattttattaggcctaaataatttggttgatgaattaatgattgaatttttttggtaaccatttttcaggtatggtcatccttgttgttgtacagaaacattttggatgcaattgaagaaaatgattatgataacttcacaaaaagagcatatgtaggaagaactaaaaaacttcttatgttgcctttagcttacacaagatcactatcaacaccaaccatcaactttcattgtgaacaagttgcttaagcgataataataatagagaaatgttaaagggcatcaatggtacttagttctatgtgtcaatatcgttattggtccaactaa

SEQ ID NO: 164133 - DNA, 2668 bp, Cannabis sativa
tttttttactttttttttaatgtacagtttgagtatttttaaacatttttagttggtgaattttactaaatttacgtgttattttacaaatttaaatttttagcgacaactctctcgactattattttacttgaacttaaccttttaagctcaaatttcaataataaagatttccaaattactgaactattagtaaattgtcatccagttaactatcaccatgaattacttatgtgtacactcttgtgcgtcatgtttatattggtaaatcaaatattattatttcaaaatttattttaatattaaataaaattataaaaataaaaaatatcataaatttaagaataatttttaaataataatattagttatacgaatataaatgtgtcacgtgcaaagagtgtacacataaacaattcataaatttgctaacagtttagactatagaggattttactactaaaatttgagttttgaataatagttgagaaggttaagccgaataaagagagattttttcatttttatacttcaaaataattttttttgtatttttacggaaattcacacggaaactcatacaataactaaaagagcaatctaaatcgcaactaaaatccacgtagaaataatcggagcaaccactaaaacaacccaaactgtaaatttttctttttaaaataaaaataaaaatgctatatgggtattatcccaaaaaaactcaccaaaatttacaatttcaagtgttttttttattgttatgcttttatttttggtttggcaaatttcaaatatatatttatttcatgttaataatcaatttccatttcaagtctctcaagactcaaccatttcttcttcatctaacctaaccctaattatttgctcaacctcaaaggacatgagaggcttttcttctctgagcaatctagctactaaaaagccatacaatcacatcaaattccagagaaagactccacctttaacgccaacttcttcaattgatcaccaatacatagctcaacttctttcgagtaaagactggttttttttactcaaccacgagttttcaaaaccccaattgaactctcaatttgttgtaagcatcattcataatcaacaaaacccatcaaattcattcaaattctattcatgggtttccaatattaaccctttattgtcaaagaatccctcagttttgggggttttagctaaaaccctatatagaaaagggcctcttgtattgtcagttgagttggttaatgacattagaaaatctgggtttcaagtatctgaggagttgatttgtgtgttaattggtagttggggaagattgggtctttcaaaatattgtcttgaagtttttagtcaattatcattcttggatcttaatccaaacacaaggttgtataatgctgttatagatgcattagtgaagtcaaattcacttgatttagcttatttgaagtttcagcaaatgtcagaagagaacaattgtagtccagataggtttacttataatattcttattcatggtgtttgtaagattggtgtagttgatgaggctcttaggttagttaaacaaatggaaagtgttggatttcatcctaatgtgtttacttacacaatgttagttgatgggttttgtaattcaaacagagtggatgaggcttttcaggtattggagactatgaagaagaggaatgtgagcccaaatgaagctactataaggtcatttgttcatggggtttttcgatctttggtacccggtaaggcatttgagttactttttggttatgtgaagaatggtaactttttttcaaagttagcttgtgatactatattatattgtcttacaagtaattctatggtgaaagaaactgctcaatttttaagagagattagattgaaaggctatttgccagatagttcaacttttaatatggcaatggtttgtttgataaaagaagattttgatcttaatgatagttgtgaaatatttgaaagttttgtagatgatggtgttaagccaggatttaatacttatctagctttggttgaagctatgtatagattaggaagatttgagaagggaaatgagtttgtagaatcgatgtttaaggatgaacttgtatcgaatatttattcgtataacatggtaattgattgcttttgtaaggcccaaatgatggtaaaggcattagagactttccaagatatgaagcttagaggtattgctcctaatttggttacttttaacacactcattaccgggtattgtaaagttggagacttaaggttagctcgagaacatctggttatgcttttggagctcgggtttaaaccagatatctttacattcacttcaataatcgatggcctttgtggagtaaaccagatagagagtgcttttgattgtttgctcgaaatgattgagtggggtgttgctccaaattctgttacatacaacgttttgatccgctccttatgtgttattggagataccgaaagatcattaagacttatgaaaaagatgaaagctgatggtataagaccggattctttctccttcgatgcagttattcaatgtctttgtagggttggtaagattgtgaaagctgagaatctctttcgttcgatgttggaaatgggagtaattcctgggatt

SEQ ID NO: 164134 - DNA, 1764 bp, Cannabis sativa
cgcaagaattatctcaatggttttaactgagacagtaaactagttagaataaatggatgatgaatgagatcttctttccatctctgatccatatttttcattcctaacaaatttttaccacatttcaaataaaaataaaaaatagaagtttgtttacttagtaattaatttgagcatttgtaaaatgaaaataggtatatataaaggagtgatatgtgtttcttttgtttctttgggctgggtggttatctttcaatctcacagcctcaatgcataagtgaggaccatttagaattgcagcattaagaggctataaatggtgcacatgcaaagacaccaccaaacaaggtattatctaatcgacaaggatatatatcatggccacgcctactgatcaactcgatataaatatatatatatttatatacaaacaaaacatatattcttattatatattaattataaattttgtattggtacgttcacatcaatatatataagatatagaaatccagtcaaacctcaaatgaattacttattaccttcgctcgaaacccttgaaactatttatatatatatatatatatatatattagttttaagcaataactttagattagtgtatttttcaatttagccactgtgtgggctatttcctttccaatcaggaatttggagtagtcgaaaattaatgtactattagactctttgtttatttatttaaggagctatatgaataaagtaatgggatcatatgattatttttgctgaaatttccataagtactatatatactcataattttgtaaaatcgagcagacaaaataatcctcacgctgctaaaaaccgtcgtaaatttttagccttacctaatagggttttttttaatagaaagtattggttaaaaaagaacaacttatacatcagtgaccacaatgctggatattgatgtgtttggtggcttggttgaaaaattcaaaataggtctatttatttactttgtgtgaacgaacacgtaggccccaactaatatcatgatgagcttaaaaaaagcaccctaatttatttgtaaatatatgcaccacatcacatcacgaatgatttctgagataatttttgtgtattctatattttgtaaacggcaagaaatatggttttttttttttaaccatgcattaatttgaaattatttgtcgcaactactaaactcaacttctagtcactgatatttatttaattttttttgatagtacaaagatgagcaatattgttacagaactttgccaaaggttccaagccaattctatacctaacctaaagcctttcttgctaattcatgaacaaatacattcgtttttctcggtacaaaagaataggcaatgttagagaagaaatgtaggttgtttagtacaattattatatcatattatattgtataatattaatatattgaataattatatatcatgcaaaaaaaaaaaaaaacatttgcaaaactgctagaatatatttagcatgtattgttgagatttattttaacataatctaaaattattaacatgtatgtttcattaacacactaaatatgaattctatggtgcggatctaaattactaacatgtatgtttcgttaacaccttaaatatgaattctagggtgcagcagaatacataagagtttagaaaaccttacattgatgcagcagaataataataactcattccgctcagatctctaatacttgttcctttttgtcgcagaata

SEQ ID NO: 164135 - DNA, 895 bp, Cannabis sativa
ttatttatttacaaaagtctcaaagataatgatagtatggacatgtgtaagattattgttcaaaagtgatcaaattcatttttgtcttgttagctgttaattgggttgagttttcaccaaacgatttttcatgtgtggtcaatcatgctaaattagaccatgtctaaagtgactagtggccggaataaataatgattagagctacttaattgtgtattcatcacctcgtgtttcttgttaaaataatttaacacaatatctttatatataaaactagagaattaaatcgtgctttgcgatgttgcttaatttttgtaatcttcttatatttatattatactcattgagttatatagaatttaaaatataataatattaaaattagaaatgtattttatttttttaaaaatatataaaaagatagtgatattatttgtgacaaatgctaaaaatagtgaaattaacatataaattacttctatgttcgcaccttagcttcaacaatgtggaggtcaaattcgattgtcaacgtgttattcatatcctgcagaagagaaatttattcttaattgagtttgacctaatttttatagatatttatgctatttgtaactgtgttaatgtttttaagtttctcttttgtaattgttctaaaaactctttagctaacattctctttaaacttgcaatgtttttggatatgacaagtaggggtgagcaaaaaatctaagaaaccgaccaaactgagtaaaccgactgtccgaacaccgaaaaaactgacaccgaaaaaaccgaaaattaaaaaaaccgcattcggttaaaaccgccttaacatgatcggttttagtgtcaatggaaaatcgaccgattaaaccgagaaccgaccgaacatata

SEQ ID NO: 164136 - DNA, 1013 bp, Cannabis sativa
agcagagcataagtcctcaacttaaccacactcaaaaattaaagacaaaatagatacatgcatcaaaaaagagcaaaacagtgtctacgtacataaaacagtcaattttcctcaaataaatgttatagttgatttaagctttattataactaagaaattctaacactatgcttcgtagaggggagagaggttgatggagaggagagacggagggagactctctagctattgaatatagtatcaatgtttgttgtcttaacactaatggaaagagggagagtttaagaaaataggagagtatggtattgtaagtagaattagaagggtggaaagataattatttattaaaattactatattattctcttcaaatatatgttatttatttgttatgaagggtatttagtatacttattttgttattttcttctttcctttcacttttggaaggattggattttgtacatttggaggaaaattttatccttctatttttcccctcctttcttcttttctccctaccaaacacatgatttattctctcctttcaacattttccttctgcctctttttctactcaaaaatcgtttccaccaaacgtagtgtaacaaagaaactagataaatttgggaaataaatactcattttgttggacaaaataataccaagttaagatatggtatttgaaagaaagaataatgagaaaataatatgggaagatgaatagcataaaagatattataaacaaaataataccgaaagttaaactatatatttgaaacaagaataataagaaaagaatatggtatgatgaatagcataaaaaaagtaagaaaaatctaaaatccatagaaaatgggtgaaactagaaataaaatgggcccaactaaaaaagcccaaaatcaggaaaaaaagtcttaattccatttctcattgggaattttgattttatatacttaaaaaattaaaaaattttattattaaaccaaaaacctaaaccctaaaaaaactat

SEQ ID NO: 164137 - DNA, 1550 bp, Cannabis sativa
catattttgtaacagtgaagcattcgcattttcatctttcaagtttttaaggaaatagcatcacaaaataattaaattttaatggcagggtatcatttgcagattcacaacaagattatgattcatctgtactgttgaacgaccattttgatagcccacttggttctccaggcaccagtgatgtgttggtgggtacacaaaacaaaagtttttttttaattgttactctttttggcctgatggtaacaattgcttcatctttttttgtgcagcatcaatactggaattgttgaaacttattacggactctggttgagtacctcctcagcttattatatttctttttaatggtgctgaggaactttttatgctggtaagatgttttattggatcaattccacaactggaactatgactcacccttataagttgtaactttatgctcattgtacatatcataatgtctgatggtaattatgatgatttctcacatggttttatgatgactcataagtggcgtgagaccattgacgcttttataaatgtggaagcatttgggataggcggaccaggtagaacaccatcaaatcaataccattctcaataattgtaaaatataaaagtgtgcacatagttcgttcctactacatgtgcataattaattcattggctgtcctatatttctcttctttaaattgagtgtttgtaataagaatacagaaaccactttcatttctaatgcaatgttaatcatattgatattggatttggacaggttaaacttggtttctcttcatactttatttgtatcaattgtttcattctgcatatgattaataatttggataatgttagggaaagtggaatgaaatagtgaaacaactgatttttcttagaaaggtcaacaacttttagatgctgcatcattttttttttacttttattactaaaattgcagatttagtttgtcaatctgggatgactgcttctcctgtcaacttaaaaggtattttatttctttttacagtattttcattgacaattcttcaattgccatgtgttaaagaatttattatatttgaatggtttgtttactaatacttctgaaaaataaaagatttttaattttttttttcttctaatagcggctatctaagggttatttatgagaaatgaatcataaagttttgaaattgactttttgtggaaatctgtatctatgaacctaatcagtcttaattgtgcttaattttgttatatgttggaatttgttgttaattgctcttcttttattgattagttgtgtttggtggagagcatgttgatgtgaatataggagcaaaagtgacaccaaaagtgcagtcacttattctaaattcttataagttatcagcatattaatgatttctgtgctatcatttttgtggagcgtgtcgtctctcctcattttttaatgcttaatgtttatgtatttcttagtgttaatgtatgttcaactacttctaatgttgacttgagcctttgggtaaacttatttactaggtaatttt

SEQ ID NO: 164138 - DNA, 4227 bp, Cannabis sativa
ccccccccccaagatggactgtacaaaccatgtacatacatttttctaatataggaagttaagatggttgaagcaagtggtttaatgaagacatctgccagctgtagtgtgctgttgactggacttaatctgctgagaacgcttgattttgtctcgaatgaaatggtagtccagctttatatgtttggttctttcgtggaatgtgggattatttgctatgtgtatagcagattgattgtcgcattatataaaagcaggttgttcttgaggtatatggaagtcgtgaagtaggtattggagccatgtgatttcactgccaattggcgcaagagcccgatatttagcttcaccagagcttcgggatattgtaggttgtttctttgttctccaagagattaaataatctccaagaaaaatgcagaagccagtgttagatcgtctggtaatggggcaagaggcccaatctgaatcagaaaaacctcaaagttacagagatgaagaagcagagtagagaagacctttgccagggcttccttttaagtaactgagcaagtgatgtgcagcttgcatgtgtggtgtgcgtggtgaagacatgaattgactgagaatattgacaagaaaggttatatcaggcctagacaaggtcaggttaagtaatttgcccacaagttgtcgatatggagaagggtcttcaagaggttctccctggttatcatcaagcttgattcttgggtccatgggtgttttcgtgggcttgctacctatgtatccattgtcttctaggagttgtagtgtatactttctttgagataggatccttctagagcacgagtaatctcaaagtcgaggaagtatttaagggtgccaagagccttgagggaaaatttgttgttgagagtggattgcaactggtttaataaagacaagttgggtccagtgatgattatatcatccacatagactaggagagcaatgaaggtgtcttgagaacctttggtgaacaatgtataatcagcctgagattgagtaaaaccttattcaatcaatgcatcagaaagttttctataccactttcgtgatgattgtttgagtccataaattgacttatttaatcacactgtttgaatcagtgtccaattcaggggcaaagtcaatcctttggggagttgcatatatacctcatcatggatgtctccattcagaaatgcattgttaacatcgagttgcaaagtgtgccatttcttgatggtagaaatagccagcagtagcttgaaagttaccattttcgcaataggggaaaacgagccgaagaagtctaagccttcttgttgagtgtaaccttgtgcaacgagcctggctttatgtctttctatagaaccatcactgttgagcttgattttgtacacccatcaacatccaatggctttcttgttaggtggtaatttgacataggtccaagttttatttttgagtaaggcaaacaactctttgtgcatagcttggttccagatcttgtattgagaagcctgactgtaagtagctggttcgtatagtatgataaaaatttgtgaagaccaggtggagtagaatttttttcttgcaacacagagtgacattcatagtcacgtaagtatgcaggttgtctagttatcctgttggtgcgtctgagggcacgttttggttcttcttgtaaatctgtggcattgttgtcctcagcaatattttctcggataggaagatcagattgcacagttgtatcctgggttgagtgattgtcttgaggagaagtattagtgcaagtagtattaggaataacagtagaaaaatcacttacaacagtttcagaaacatgtttagaaggaaaaaccatgttggaaaaagggttaacaaattctttagttgtgttaagtcgatgaaagggatatatgttttcatggaagatcacatttctagaaatgaaaaactctttttttgttaatatcataaagtttatacccttttataccttgtgggtaccccatgaaaacacaagttcgagcccttggggtgaacttattcctgtgagcagtgagagtacaagcaacaacaagacaaccaaaatttcttaagtgttcatatttaggtagttcattgaacatcaattcatagggacatttaatttcaagattaggtgtgggggtgcggttgataaggtatgctgcagtcattacacagtcactccagaatttgatagggagtttggcctgaaaaaaaaaaagtgctcttgcaacattcaagagatgttggtgtttcctttctacaatagtattttgttcaagggtttcaacacatgtgaaatcatgcattattccaaatttggcaaagaggtccttaaagatcaatttaggtgcattatcggacctaaaacatttgaaagtgcaatgaaatggggtttgaacatatgacagaaaatcaggtatgatttgaaagatcaatttctaacaatgtgcttcaaaatgtaactgtactcatttaatttttataaaacaatacagaaaaagaacctcgaggttcaagatcccccatgccaccatgtttggatccaatctcggaccaagagaacgaaacttgtcactgattatgacaagaaaattgtcgaaaagatagtaagtatatattaatcgttgattaagtactaataatgagttaatatatatatataaaaatcatatactaattgcttgaatatgtgcactaggctcaactagaggagcaagttactcagagacaagttcaagtccatggccaaaatgacattctgacgcaggcgctcgaaacaccagggcatcctaggcgttttagggccgctaggtatgctagtacttgaaaaatattgtttccttaattatacaaaataaattatagcttattttatttattcatttgcaggttctttgccaaggcatctaaactgtttggcgcaaagaaaagagacgtttctgatgttgtggctcagaaacagagggagattgagaaattaaaatccgaaattaaatcccttaaatagaagaaaaatattactgaacaaaagtagaataagatgaggaaggaggagaggtggttcatcaagcatatgttccacaacaatatgctcatgaggatgagggtcgactacaaaattatgttgaggagtttatttcctaaatgagccacttctcatgtacaatttcactaaacaaagggcccttaatcagctagtatatctttgctcaaaaaatttcgacaacatagtggcccgagcttatcaatacgaacatgagggtccaataaaagttcactgtaaagactacgatgattcacatgctcgggttctgattttagaaatgctgcaagaggatgttgaaattccaatctcaattgacaggtgcaaatatgttaaggaagtagcaaacatgttccttccttggcttaaatacctaattgtaacacctgaggtaacttttgttataaattaattatcaatgattagtggagtttgaatatcttaaatattcaatcatagtgaaataggttctgcgaatacatgtgctgcagtcggatggatgaataaataactattttatctgttttgtttcagtagaattaggatcaaaattgatatattatatgatattttcttatagggtccactagctcaaccaccatcaagacgtggtgtgttgaaggggaaaggtcccatgctttctcgaaaaggcggtgctcatcaagaagataaataaataacaccagagatcgtagctttgatccctaagtcactaaaatggatgattgatgaatttgtaagagtcaaagataaacgtgatataatcacaattcgggtaccccgaggattcatggcacctcatacccaaattacgttatctagagaggattagcaacaggtgatgttgtgtaacttcatcgacaaggaaatattgcttggaatgatgtatactcttctttgatctagttaaccttatcaatcaaattctagtaaaattattataaacactaatttttaacaatttaatgcttgcacatctgggagagcataaatgatttgagaagaatttttcagttttacgacccatagcttctcccaatgaatggtatcaacgatgaagagaagaatgcgtcttttaagtatgcgtccaatcgattggttgtttggctatcatcgatgaataacaaccaccaaatgttctttat

SEQ ID NO: 164139 - DNA, 1323 bp, Cannabis sativa
aaatacaaagtatttccatttcaaagcctcctcaagacgaaagaaaaatactatagaaggactttttgatgaaaaccagcaatggagaactaaagaatcagaaattgagactattgctcttaactacttccaggaacttttcactaagagaaattttgatgttgatattaatgataccctcagaagatgtgtcccttatagattgactacagccgaaaatgcactcttattagagccttttactagcgaagaagtaaagacggcaatgttccaaattcatcctttaaaagcccctggaaaagacggcttaccgggtctgttttaccaaaaaaattgggagatagtatgcacggaagtgactcaagcctgcctcgaagtcctgaataacaacgctgactgccaatacataaatgaaacactaatctgcctaattccgaaggtgaaacagccaacaaagatgtcagaatttcgccctattagtctttgcaacgtgatatacaaggtggtgtctaaatgcttagctaatagaatgaaacaaagcttaaactatgtaatctccgacaaccaaagtgctttcattgggggtagaatcatccaagacaatgcgatcataggatttgaaagcctccattgtttgaagaaaggtcgatttggaaatggaaagaaaatggccgtcaaattagatatgtctaaagcttacgacagggttgaatggaatttcttagaagcaatgatggttcacttggggtacgatgaacaatggattaaaaagattatgaattgtgtaacaacagtgtcattttccattctaatcaatggctgtataaaaggtttcttccgacccgaacgtggtttgagacaaggtgaccccctatctccattcctctttctcttatgttctgaaggtctttcttgtttaatattcgaagctgaaagggctggtcgtatacacgggctgagatttggaaacatggaacaacgattgtctcaccttttatttgcagatgacagcttagtcttcttggatgcaaactttgaggacagcaatgctcttaaagaagtgcttggaacttatgagaagctgtccggacaatgtataaacttcgagaaaaccgagatgtgtgtgggatgcaaagttgatgatactatggcaaccaatctagcctccaacatgggcgttacccttgtcactcaacataccaagtacttaggtatgcccacctttgtgggaaaaaacaagcagcaagtcttcggaaaattaagagaaaaagttgaagcaaagctccaagggtggaagatgggtcttttttctcaagccggtcg

SEQ ID NO: 164140 - DNA, 847 bp, Cannabis sativa
tttgatttcttgcgggatggagttcctaggactaaaaatcgcaatatctgttttggtttgaatggaaatatttaacggtaacagaatcaaataataaaaaacgttaaactaagaattgacgttacatagccacttttaatatataaagatatttacatgaaaatggtcacttttgcttttattatatggatatattttttgtttcggtatatgtagaaattataattaaattatttaataagggacattaattctaataggtatctcttaatattttagacaatttatagtgttgaaaatataatttaaacaattagttttgtgtgtttattattatttttttttctattaaagattacaatatattacattatataaaataaattgggatataatcttttaggttccgaaacaaccattacaatagagacaaaagtaattttcctaccaataatctctatattaatttatacatatatgaactatgtttataatctaaatatacatgcacaattttttttttctaattaataaattcaaaattctataacctaagaacgacctcgtaatttatttagcaaaataaatggtgagcttttttgtagttcattaacaattatatgaccctcatcaaatacacacataagtctccattctctattgtcatcgctaactattatcaattaccttggcttgcaaaagtcgatttagaaaaaggtgaactaataagatcaaaatacactataaaaaactaccactttagttgacaactttttagtcacaatatacttttttttgtgattaattgtgacttttagtcacaacaaaatgttacttgcgactaaaa

SEQ ID NO: 164141 - DNA, 883 bp, Cannabis sativa
ataaatcattatcgccagtttactaattaataagacattttaattaataagttaaactcatgaatcaagcatttttggaagcttaacttttgtccagttatacaaagattctttataattagaatacttttaaactagtcttaatcagaatttagaggtacaaacgtttgaaaaatctatttatcaatatcagcccaaaaaattaataaaagattgatataaagtttcctcatcataattttctcaaaccttcatttcattatagctatagctgtctagtattggtaagtgtggtaatcaagagtccaatcaagatgttttatgtttatttgtgtttttgaataagactacataaattaatatatttatataatttatacttacacaagaatatgttctttcacattgtcaacagtcataatttgttacagcaaataaatcttagcaaaattaaggagatcaatattatgactatcatatcccttgtattaatataatccatatgtaaaaatccctcacatttaacagtgtacaagtatgactttctactacatgtgcttaatcagacacatatatataattaatatctatatgggaacttaaaagtttgataactttgattggaactaattatagaataagtactttgattggaactaattagaacaaaataatttttcttctaatattttttctttctttcatggaaagtggggatttttgaaaaaaaaaattggagagatctacatttgaagcatcttcattatgtgttgtatggcaataaagggtaacatccaaaagtgaagtttaaccacttggggttagctcaagtggccataggtgggtgtgtgagtgttggaggtcctgggttcgagtcccaggt

SEQ ID NO: 164142 - DNA, 1721 bp, Cannabis sativa
gaatggaatactgtagaggagtcgttacattagtcattagccatgcagttcctatatttatttctctatcaaaaatgagacattattagtgaaataattaaaaatgaaaacaaaactaaaaatgtcagagccataattcttttttgtttttcgaaacggtcacagccataattcacagtacataaatacagtgttgaagactataaatacgtgaatccctatataggaatgtggttaaaagtatacagagaaagtgataatgaatcttagccaccacaagcacttaccttttttttccaaaaaaaaaaatgtattcatataaagaacgaaagaaagagctagtagggttcataaacaatattatttaaatgctgacagaggcgattggtaaaagtagaagaaaagagaagaattttgattaatgaagatggggagaagggcaaaatggtaaattaaaggagatgtatgatgaaaagttgaatgataaaagagatgataaagggaaaggaataggtctttatcagagccattaatatatatactatagagaagaatccaagcagagagagcccggaaaaaacggtttacaacatcactaatgcagcatcgcaagagtacttttattatcttctcaattctattatttaaaataaataactaaaatacacacaaaaaaattactacaatttattatttttttattttttatttttaacttttacaatacaacatatatcaatttttttaaagtaaattattaaaactctatatagatacatattcttaaaaaagaaaaattaaaactccaaataattaattacatatatttagtaataaataataatttataaatatatagcatgaataataaatttttaaaaattaaagtgtatgaaatatcatgtttttagtttaattattctttaaattctttagagaattcctatttataaatgtaacatttttttgttcttctcatccacagtactctatgctccacggcctctgcacaatgctaatgtaatgcttcgttttaaaaagtgagccaattgggtcccatattttttgtttttgctaataaataggtaatacaaagctaaacgagtaataaattagtattatctcttaatcccaattttgatctaatttgatgtggtgttgtaacatgttccaaactctaaatattgcacataacaaattagtttataaacatagtgacactcttagtccaaaaaatttcaaaagataagtttcttcttaaaaattatttaggcattttttcttcaaatattaaaattcttcatactattatctttattgtttagtgtgctaatttactttctttatttacgtttgtacataaattttgctcaatttttttgttaagtcgaatagctttatgaggtagtttcaagttgttttgtctaatttcaacggtagcttcatcttatatgagtcagcttccttgcggtaactcgtattatgagtttctttaccttttgactatacaataaaaatttgttggcaggataatcctcctctttgaagtttgtcttattttgatcctgattactttgtcaaaaaaattatttccttgtattaaataatatagttctttttattaattggttactcgaaaattggctctgatgatgtggatatgatttttgacacgtgataaaaagaaaaatattctcagagttgagagttcttagtcataa

SEQ ID NO: 164143 - DNA, 1311 bp, Cannabis sativa
ggtatgcatatataacagcttttttcaacccaaaattaattccagagtaagtaataactaccattagctagctagcttctcaaccatatttattaccaacagtaaataaattttttccatttccggaagttgagaccggagaatataatagaattacgtacaaatatatgtaaatatagttgacgaggtttatttaattatttaattatatttataagacagcatcttataatttatatgtatatagataagaaactagctaataattaataagataatttgatatagaataactcatgatatatatcctgctttacgttttcttttcagtaggtcaagcaagaaactgagacgtgcgcatgcatgatttagaaacttaaagaacaaacaattatttatacttaaaaattattcaaagttttgatctgtgtcaaaaagaaaaatacctcttttagtcgaatgacccttagtagcttctattaaacatcataactctttctttaaccagctccttatatattattataagatctggagagtccacaacatgtatatatgtatatatatatatatatatatatatatataaattcagtaatatataaaaaggatttttagagaaatttaatgaaaaaaaacataaagttatggaagaaaataatcatttattatataatgcgatagggcttgggagtttacacgtacatctcatgcaagttaattatgtacatatcattttagaaaaatacattcatttataattaaactgcctatattttataagcacatgcccttttcttctccccgcaccctaaactacatttagaaacatataataatcttatagaaattaagataaatgttgtgagaatttaggataaaggtgtatatgacttcaacttcaaaaccaatatttaacaataaaagtagtacatctattatctattcacacattaataatgtagaactatttttaataaatatcctcaaaccctacttcttctatatccgcaccatttattattaacaactataaaattcaaaaaatgttaccttaaaaaattaaataaaaaaaaaactgttaagaaaaaaatattaattgatgaacaaaaacaaatatgaatgtggatatggaagtgatgctagtaatttttattcttttttcttcagtatcatattgtacatactatagcaatttcatatatttttttttttttgtaagggatatatactaatttattctctatgaccatctcaaatggttacaaaaatttggtgtagaatcaccaattctatatatatatatatata

SEQ ID NO: 164144 - DNA, 927 bp, Cannabis sativa
agataataaagtcacatggagagtaacttagacaaaattagtattaaagaggtaaatataataaattttaaaaaagagagttaaaataaaaggtaaatatcattttgtactctgtgtttacaaaagttattaattggaccttttgttttgttaaatgataaaatagatgtgaagaattgatatatatagatgtactcaataatataaaattaagtttggtgcaaagtaacattatttttacaagtgacttatatttacctaataatataactctattagttatatatgctttatattcagcacataacacaatataacttctgttttataaataatataaaattaaatttctatccttaatacatataaaattatcaaattatccacataattacacttggacgccaatgcacccggttagtaaaaacggttatatcaagtacatactatatttttagtctataaaaaatttgcaggtgattaaattttgtcagttaacatgataatatatgtgtgaaaatagtttctcttttaatcaattaatagattatatattattgttttactgcgtgactggacacgcaaatcagtctatgcgtgattgaatcgtcagcctcgtcggccttatatgtatatatattaaaatatttacacaactggggacaacagcaattagactcactaaaatcttgacctttgactttaatttgcatagacacaaaactgccacgcgcacatacaacacaccgcttttcaattatttcttgaattattttcttattagataatgaacaaaattagggcaaagagttcttgcggaaatgatcaaacacaattcacaagaaaaagagtcagaataacaagcagaaacaagtggagaagagggagaaaattatatatatgattttagtaaaaaaaaaaaaaaaa

SEQ ID NO: 164145 - DNA, 1595 bp, Cannabis sativa
taataatggtctcgttaattgataaaatcgaatctatcccatcaataaaatcaacgcatgcaagacacatatctgaacccaaaatttcctaattcttttttttttatatatatatataaaaacagcccccataccatctttacccgtacttttattaggatgcatatgaaataatgccactcacacatcaacttcagtgaagggtctcatcaaatcacatctcaaaatattagttaccagagattggatgtaatccaacacatggttcttaattagtgttcaaatgaagccgatgagaagtaaaaagagacccaaagtattgctaaaaaattgaagctatacggtgaggttcctcaacacaaaccaagttgtgatcaaagataccacaaattaaattcttctttttctggtgagaagcactctggtgaaagaacgccaaatttgtgtcatcgaatttcatccaagaattcttagcctgcgaagcccagtacttttcatctttgtacataagcacgtcaaactctttttctctttattgatagatggaccaagaaatgttgtcaagatcagagtcgaaacgagccaactcctcattttcattttaataacagcacatgttcgtataaatactttctcattccagtgtttaagaacattagtgaccacacaaatattatcctgaaaaccatccaatccatggccacttctagtattccaactattagccaccaactcacgataatctagttcatctgcccaagccatttcaaaatggagtcgcgacttagccataagtagcccccgcccttcattaccacgtagaatactggtcaaaagaggtctatgattagaggaccaaagcttcaaaagagtaacaaaagaattaaggaacatagactgccaattcgagttacataccatacggtccaaacactcttgaagaaaagagccatctttatgtttattacaccaagtaaagtgagcatctttaaatctcgaatccaccagactgattttagaaaaggctcgacaaaatccattcatgtacccgtgtgcccaattaggacccccaattttttttttcatgtaaataaagaattttattaaaatcaccaccttccatccaaggccccaaaaaattatccaaaattctttccattaaggattaaaaatagtgacgtagactcatatcaggttgcccgtagaatactgtaaatctccaccataaaacatcaggagaccgcaccataacattaatatgactacaagagtagcctttaagaacaacctccacattattactccaaaataaacacattccaccatgacgacccaccttcttaaccactaactttctaacaaaatccaactaaacccgcataatttccaacattgagtgagaaaccaaagtctcagaaagaaacacaagattcaaaaaaaaaaaaaaaaactccttagcatggaaatttaatgtgacagtcagtagtcccgtgatccgtaataggaaatattgggtaagctatgcaatcccacatcgcctggagaaggtcaagtgggatgattcagagactgtgtaggtatgggactacacagtt

SEQ ID NO: 164146 - DNA, 4333 bp, Cannabis sativa
  modified_base (2437)..(2446): a, c, t, g, unknown or other
tctctctctctctctcattcattcccttaacattcctactaattatgctacatcagtccatggttaactttctgagttgaatcctccaagatccctcccttttcctgctcttgcaatactttaaaagtattttggattcttgcagaaccagtagtaataggtttccttttcatctttaaattccctattttcttaggagtttcccaattttccttacccttattaggtgaaggtgagtgagtgatgatcacttccactcttaattgaagatcctaggaccttcttattactgtcatccgcatgtatttccacttcattctcaagtttctcaaccaatttacatcagacatttctctagtaacttctacagatttctctatttggttttcttcacccactccttggtattagtcttcttacattttgccatattatggccatagcctttgcaattattacatttaatagaaagccactccccaaatttttttccttaatctatccattttcattgacataatgaataatgtaagggggatcatccgtgattttcatctccactagtaccctagcaaaccttatcatagatctctcatttgtaaatttatccattatgactggtttaccaatagtgctaacaagagcactgagtcagttttgaccgcagtattgtaagccaagatttggtaaatgaatccagggagggacaaaataaactaacttgactgcattcaaatcacgagtccaaggtttgatgatcacatgtttttgatcgaattgcaccagtccagatctccaacaccagatcccaagtaacttcatcattgagtttgaatattgttaggcccatattcattctcaccactctttcaatcctaaaatgaccccaaatgtgcttgacaaatccttcaaaaacaacaaatggaggattttcccctagcaccatacaaatcacagcagaggtccaattttaagcctgctccttgacttctacaatttccatttaccctacttctttccatttttgatcattagctatgcatagtgaatcttagctgctgaatcagtctattggccctcttttaatttagctcaatgtttctaaattgatgaatgaaaaaccccggcccctgctcagtctttaccacccaagatttaacataactacctagtttcttaggaaaattatcataactagaattcccaattacctctggcaacttatccttcatcacttcctccacatcttccctcttacttacaatctcttcctgattcttcaacatctccaaaattacatctatctcagggagtaaatccaatttctatggtactccactcgtttccacaccattatcaagtagtttggttgaaagggctcctcaattcgagtttgcgtaacatgcttttgagatatcctcttcttcttcattgcgagagaagagagagacctataaatcttttgtgataacccaagaatacctcgagaatgatctaagtgtatttgaattcctaaaacaaaagaggtatcaccaagatcttccatctcaaaatttcttgacaaatgtctcctggtttcgtgaaaaatacttatatcatttgtcgcaagcagtatgtcatcaacatacaaaacttggaaaacatgttttacacccactaaacttgtgatacacacgatcatcaacaacattcatctcaaaaccaaatgagagtgtcacttgatgaaatttgtggtaccattgacgggatgcgctgggttttgcttatctgaatctgatgccgttttgatcgtctatctagtttttcacaatgacaaagatctatgaagtcagagaagtcaagtttacaactttgcgtttctcatttctagctcacccgtaaatgaagagtttcgagtctctcatttttgcaaaatagcaacatctctgagaactagtgacagacttcgtcaaaacacagaaactgactaagtgatatcaaaatatcacttaggcatcttaaagtacatccctttgattttttatacttacccaacatccagattgacgtcatatgtcaacctgggcgctgggtcatgaactaccttcaataaaacatcaataactcactcaattatgacttgataaacacgattcaacttgcattttgaagttaattcaatgctctatcaagtcatgtctcacactcggacgcaattctgaagttatcatcgtcaaaattcactcaagggagttacaaaaataagctcagggttacccacagtgggacccatcaggctccaagagatggccatcaccaccaagagctaattttcactattagatcatcattaactatcataaatatcttatttgtatttttttttcctatttttgtgggcctcattcacctataaaggagagctctataagctcatttttcacattcagaaaactannnnnnnnnncagagcttctctctctagaaattagagcttctgacacttagtatttttctataattgccatctcatgagaaataaaaactcaaagtagatgtagctccattactatcacaatacagggagtgaagtattataaatttattgtgtctctcttacttaaatacttattcattctttctaatctagcgagcgagtgtgacttaaaagtctagtttaaatttatgagtcaaaagatatattattcaaacaaacaaaattttcagctttagacatagaatttggaaaaatagaagagaatgcaacattaccttcctcatcttcactactttcggagtcatgatcactccaagtagctatcataaattttttatttttcttgaaggtatttgcacattttgactagatatgaccaaattcttcacactccttgcactgaatactattgttattatattgaaaaggtttaagaggagaagaattaccttttgatgactttccattgaacttttcgtttccaatcatcatcatgtatttttgaaagtttaatgcagttgttgtcatttcattatcaccatcttcatcatctgatgcttctttttcagagcttttgaaagttatggtcttcccttttatttggaggcacttggtttatttttttttgatgaatctcttgattcaattcaaaggtacgaagaaggccccatcaattcttctactttcataatactaaaatcctttgtctcttccataaccgtgagtttaacattgaacatgtcaggaagtactcgcactatcttttttaccaaaacaaaatcatcaagtttctcatcaagagcaaaatatttgttagaaatttcaaataacctttcatagaattcagatagtattttagaatcagacattctaagatcatcaaacctagtttgtaacatgataaatttagatctttcaacatctgtagttccttcaaactgggtttgattgattgtctaggcacctttagcagaaacacaagtagaaataagcttgataaaactttctccaacaccattaaaaatagcaactagagctttattattttaactagacaatttttttttcttttgtatttcaataaagtttagattttacctttgtgcttccatcatcatttttctctgtaggaggtgaccatccatataaaattactttccatatacattttcatcttatgctttaatgaaggctctcatcctaatgttctaataaggatagttagagtcagttagaaacgaaggatgagatactgagcctccttctgcaaagaaagacatttcacacaagaaacaaattaaacagaagttaaatacaagatctcactaagagtttagtgaactgttctgataccaattgaaattctatttttattaccaagtaaaattttcaaacaatttaaataatacagaaatgtagtaaaattgtttgaacataatttaactcgattctattagacacataatctgacagaacaaaaatataatgtagaaaataaaatgacacacaatattttatacgtacactactacaaatatcaaaatttgcgatggtcctgaaaataattttttttcggggaccgtcactaaaaaaattaagtaactatttaaaatcgtcgggaaaaatttagtattcccaacggtttaaaatcgtagtaaacaaaataggtgatactttttactaaaatgtgattttttaatggacccttataggcgactgtttaaaatcatcgggtatagtatatgcgacgattttaaaccgtcgcctataagggtccattaaaaaatcgtcacctacttctcgccacattttctacgtgcccacctactttttttttatttcccacatgcccaccta

SEQ ID NO: 164147 - DNA, 694 bp, Cannabis sativa
aactaatgaaagacacttctgagtgttgccatgttgttgatatctgatttgaacagttgctaaagctaaattaaatcattgatgacagtcttcagtagattcaaattgctgatattaaaatcaccaaaatttgcctcaaagacaagaaactaaatttcaagagagaagagaagatggggatgcaaactatgtgcacaatacacaaaaaggatcataatgtatattaattaaacataaacaataatctcccccatctggtttctgtttctagacagttgtttcagaagcaggagtgtaccaaccatggtgaatctctacagccttctttctcctcgctaatcgggactttctgcgagctccggtgtttctgtgcaatgttcccaccttgacagctttgtcaatgacggcatatgcatcagcgatgagcttctcgaccgtaataacttcttcggcctgagcatctggcttcttctttagtgtttctaaagcttccaaaacctgcaaaagacatcacaaaaaagaccattcaagctggctaaggcaaatcaactaagccaatttattatcaaaatcttcacccctcttgagtatttcatgaacataccaaatgatgattacataaaagattatcattcctacttaccaaatgattaactctatactgtgctaacttcaagaatcccccaaaacagct

SEQ ID NO: 164148 - DNA, 609 bp, Cannabis sativa
aaaaaaaaaaaaaaaagcttttgtatacttaataatctaaaatattattgcatatgaacaagaaaaaaataataaaaaacaaaaatcgttgcataagccagggctcgtacctccaaagtttgatgtaacaagaacccttttttcccactttgttacgtactacattgtagaaaatattgcatctatttttagtcaaaagtttatcattttatttatgattaattaatttttaatttaagatatgcccatatattattttaaattatcataaaacaatatattgtcaaataaatgataatatataactctctaccttttttctcaaaaaaaaaaaataaataactctctaccttatttattgatcactatataccatttgaaatagttaacaaaacgcatttgaaagaaagaaagaaaaatagctaacaaaacgatatgacgtatattagggtttgtgtcattttcttatgtacgtcatgatgcacaaataagtatttttacatttatattatatactagttgcaacaacacgtgctacgcacgtgtaatctttttggaagtaaatatataatttttattaatgtgctaaatcagttaaaagataagatt

SEQ ID NO: 164149 - DNA, 1633 bp, Cannabis sativa
  modified_base (1607)..(1607): a, c, t, g, unknown or other
aatgtccttcttttgagaccatgggtagtgtgcgaatacttattggttcttatgtcatggccatcatggcctacaccagaagaggtcaaatttgaccacaccccaatctgggtccggctgaaaagcatccctctttttattggaacaaaacaaatctacaggagttggcaggaaaagtctcgagcttcccccacttcattgaaaaaaattttaaaagaggctcttttggaatgggtacgctaaggtttagagccactgtggatttatccaaaccactcttctcaggcttctttctaagacgaccgggtataaaggatctctatttacaatatcaatacgagaagctaccgatgacacatgaacaaagattctgctttaagacaccatcggtgattaaagctgataaaggaggcttcttcccaatgttcgggaattggatgggcgaagatgctagtgaaaaattttcatttcattcccctctcctaaaatggttcaatgactggatcattaatcagaaggcagcgaaggaggagaaagtgcgacatcttctaagtaatcagagaataaacttgtagattgaagtcgcggattcgagagaacatcagacataatacctaggaaagagacgacaagttgagacggtggtggaaaccagagaggaaactagcgaggtggtgttgaaccggtatccagcgctccatttgccaaggattggtgaagttactccatttgagaacactacaaatctgatagttgaaaaggtaattccagagtttcctactttgaagatgatgggaactaggcagtagaaagaagatgtaccaagcagtagtggtatgaagcccatgcatgcgaaggctgggagcaagcttgctatctcaaatttcccttttgtgactaaagacaacaggctcttggtggacgacactagaaatggaacaaaaatagatgagccaactaatatagctgttggaatacaaatggcttatgcagacaattccactccacatgggtcaaagggggtgaaggcccacgagagatctggcccttgttcgagaggcccaggtgtgagaattaaatcaaatgaattgggccctggtcatcaaagccttcttggatcctaggcccaccttattgaatggccatcaaaagagtgatgggaattagcctttgatcaattgttgggagcaagaagaattgataaattaatatcactgtgaacctactctgttcaaccccatacttgacattggagagattaggtgctatgaggctgagcatggtccgaggaaaaagaaattgactgatggtttctacattctacccaagaagagggaacacaatggtttctcttcaaaagaacaaactgtcaattctaacattgaaggaaatttggactctcccatgtcagagattgagggaggatttttgccaggatcttatgaaaagtgacagagtaatcgaaagagaggaagactgagaaagtatacaagtcatgctacgaagcctaaggagacaacatcaagaaaaagaggaagaccggtgaaggacccattcccacttgcaacaaaaacactgagtctgaaatgttaggttttatgccctanataaaactctttacaatctgattagt

SEQ ID NO: 164150 - DNA, 960 bp, Cannabis sativa
aaatacacgtatatgagattgtccaatatatatgaacattgttatacgttttaaagagaaacatacaataataattcttgacaattagagtcgccaaccaatatatatatatatatataaatattaatccatatttttattttactatctatattatcattttatatacattaattaaatcataatttagattgtacaagctgtaaaattaactataaatttaaatcataaaatatataaacttcactataaaatataaaattattttaatatatgtaattttcgattataataaaaaccgcgcaaagcgcggtaccattcccaagtctaattataatctaaattttaacatccaattcaattcaattgtagttggatatctaattttttgtaattaaattggattaaatcggttcgattcagttcggttcaattaaattggatgtgcccatcccaaaccgtgagtacccaccgcgaatgaggcgggaagtacctactttggtgcgttatgggacgggattaggggacaaatttattaacctgaagcaggtttggggtaggatccaaggtgatactgcctaccatatatcaaattccattatataattttctaaatatttattcgtataatcatattaaaattattggtacaaacttaatagttaatctttcttattattatcatattaaatactttttaatataatcttgtacgtatcaatttcgattattaatatcttcttttaagtttttattgtacgtaacttctttgattgagtcctgctaaaattatttgtgcccttattttaatttattcgttagatatgttatgtatgcttgcttgtagattatatataaataaaagtataattaaacagttatcaaaagagtcgttgtagtatagtggtaagtattcccgcctgtcacgcgggtgacccgggttcgatccccggcaacggc

SEQ ID NO: 164151 - DNA, 1127 bp, Cannabis sativa
ttttgaaaatcctcttgagtaaacacacccttttattatcctttccttgaacaactcttctccaataccaacacccatctaaagggacttgcaaagatcatcccaaactacattttctgaaccattactcgtatctccacctttctaaagatatataggcacaacaaatctgaacaatattttgaatcacagtttgctcttttgaaaaaatagactactcttattaattagtcctttttataaaaagatagagtagtcttattagtttataaaattgaattaagtaattaagctatttaactaatataattaataaaaaatattgacatatttatatatatatatatttatattcgttggattttaactctctcctaattctcatccatcatcattacccaacatataaatttaaaagatatgatattgttaaatatgtcagcatctagcttataatcaattgatataagttctcacctaagataatgatcttataatttatacatatatatatatacatgatatatgtgtgtatataacatgccattgtacatatatagcatatatcataccaattaatttgaatgatgaacaaacattaaatataattaacaaatatattgagcgatgagatttcggtgtaatatctctcaagaatatatttgggaaactaatgtgtttaacactattatgtaataatatggttgtttatttaatttaatctgtataatatattgatcataatctattcgatttgtcctaagtacagattttatatttaggagaagaggggggtcgccttttttttggcttggaatgggaaagaaagagaatgagatggatttccacatttttttaaatttatttactataatataaaaccaagtaaataaaaaacttaaatatcacatttccaattttttttaataaaaatagggaaatttatatggtatattgagttttgttattttttttacaaaaataatgccagacgatatttttacttttttattagtgttttttataaggttcatactattgtgtttattttttagttttttttgtttgtttgttttagtgttgttttacggttgttttcataatttatttgggaaatttgattttct

SEQ ID NO: 164152 - DNA, 1454 bp, Cannabis sativa
  modified_base (1247)..(1248): a, c, t, g, unknown or other
ggtcgtttctacaaaacgagcttttctcggcagaaaccggcttagtctgtcggcgtcggattttgctacgcataagcttaaatgagggaaaattaagatgacccagaagaagaaaactgcaacagctctagctcccgcaaaacgttgtcgttttccgctttcttttgtacaacaacaaccactactactactgctactattgctaatattgctattactactactgctacttgatctttgaccttctttagcttgcatttgggccaaactgctggaactataataataacagatatatagaatgtatttctggtagtagtagtagttactattactatttactacttgaggcagccaaaagaagaccatgaaaagctgtatggggttttttataaccataaggctgtatgtacagtgagtactgtaaaatgggagaaaaggtaggttttggtggtaatgtttgaaaagggaaaatgaaaaggaaaaaaatggagcttgttaggaaaaagaaacaaaaaataaatattagaggaagaaataaaaggaagggaaaaagaaaatatagagaggttattgtttccttgtctcaaggggtgtaggtggtcacatgttcttgacccttgattcctggaaacttcttatatatctttggctctgaatctttggactttggacctgaaaatttctattcccacccacttcttctttcctttggttttatctttaggatttgaggcatctggttttgagcttatatattattattattattatatatgattaataataataataataataattaaatatagatatgtaggtttgttttgtgaattgtgatatggctgatgatgctacttggagaaggtgtgggactgtcaagtattaataaccattgtctccggaattatattcaaatttatatatcaaaattttataaaaaggacatttcaaaacgaaaattataaaaggagcagaggcatattagtaaacaaactcgatagtcgtacccttttttatttatttatttagttatttaattttgggtggggggttgtcactgctacaacttgctcttaaatgcaaatctctgctctcagagtttacattgatctttttcatctttttttacttcttctagactgatatgccctttatcaaaacagtatctattatttggattacatgttggtagttccattagaatataactacaagatcaagatcatataataataataataatnntaataataataataatataaagtagatgagaagaattaaagaagaagaagatgaagagagaaaaagaaagtgaatgagaaaatcacagttgtttattctaatggggtgaatccttatttttacaaatacaagagtcaaatattaagaaactaagataaaaggaaactaagaaaagatgaatgttgattacaattaatgataataaa

SEQ ID NO: 164153 - DNA, 2624 bp, Cannabis sativa
tgtcgtgtgaaaaataaacaaggtatacaagagcattttctgaatgagtgtcaatgttcatgtcaaatagttttggcatacacgagcacttcccaaaggcgtgtcggcgcttgtgtaaccctaggatttacccaagtaatctcttttccaaacacttcaagcggagtttgagtcaaatgcactgcctaaattaatcaattggaaaccctaataccactggccacaagcaatgtgactcaccaagtcagtgctcgtgtggtatgctctaaataccaagaaagaattccaataaggtaccaaaccttacttggttgaaatatcaaggtcaaaacatgaagaatggcataaccaaagctaaaaaaatgtgtagaacttaagcaattctaatgcccttgcttgagtacatcaatggtaacacaaagccatatgagctagggcacagtgcatgcccttgctcgtgtctttttgaagataaatgaggagaaactagaataaggtcactttaatttgaccttgttggagtaccaaaccctatatacatcaagtcacacaagcattgcccccgagatggctttgctcgtgtgaggaatgagggatacatcaatgtattcaagcactgcctccaagatggcattgttcgtgtagaacgagaatgaaaaccaagagtatgaactaaggcaacaaatgtcgtagttcgtgtaagcatgagttaaggacaaaggtacacgagcaaggtcccaaaaaatgtctttgctcgtgtaacatgaattggagggaaacaaaaccctaggtcacaagcaaggtcaaaacttatgcccttgctcctgtacattaactaactttagggttttgtggaaaattcggaagcccaaagccattcaaacttcgacgaagtctcaaggtttgatcaaagcatcatcaaggcccccaatgggggataattcttatcatatgcgaacagtgccagtccttctaccactgttcaaatatgaaacatgttttccaagaaacggaagcttctaaaagcatttcaaatgataaccaactccacatataaaaaactatttgtattttatgctttgtttttattattattgaaatataaggtacgagatagtttggtatctccctaaatgtaagggaatcactcatcatacttgagtgttataaatagctttgtcctaggcgtggaaaagaggatcactctcattcaaatatcactcattctaactgctgttgtatttagaaaccataagagaaagaaacaacatactgctcattgtaatcgctccagaataagttttgggaatataattctggttttattcttcagcaatcaacattaaattaatacaatctaaagtgtacttactacttaatctttgcataaaaaaaaagtgtacttaatctattgtcgttaaacgtgagtgaactactataaaattcttacctcatcttttacataatttttttttttaaattgatttactcttgacaaccattgaaggttttggttcaattgcttatttattatattttttagattggttgacaaaaaaatcgcatcaaaactttaaaattttctttttcttttttaaaaatatgcatatttttttaataaatttaaaaaaattcactattttgaaaaaaataaaaaagtccaataatatttaattttaaggcttaccaaaatctcttttggactttgtttaaaactaaaccaaatatcatcgttcccaattctttttctattatggcaattagcatttagtgtgaaaagttcaaaataatatttaaacggataatataactggctgacaatttataactttgtttagtaatcccataataaaattactattaattgaattagttgaagagttgaatctaataaattattgtaaaaaagtataaaattattaatatattacatctaattacttgtatgaagtattctaattaacactactaatttttctagtcttaaaataataaaaccccgtagcaaacctaaaaatatgaaacattacctatacactaacttattccaaataaaaaggattcccaaaaaattaccctttaaacttttaaggttattaaaaattttcaaataattatcaaaattattaaatttaaagatttttgtcaaatttcatttaattttattaacaattcgtcgattgttatattataaattgtgctatctgaactttgctatctattaaattacatctttcgaattttgacatgtatcacattgtgcctctaaacttttaactaagttagacttccgttagtaaaattagataattttttttttttttaaatttaacaatctcaatgtataaatgtataatttaatacaagtgaaagtttagggagaaaaatcttaattagtaggagaccaaaaaaaatccaaaaaataaggtggcttttggttaaaggtaatgaaatagaataaaaagaaaaggaaacaatcttcattccattactttgtttggttgtatagtaaagtattagaatatcattctaattaggggtgggcatcatccaatccaatctaattgaaccgaaccgatccaatccaatccaattacaaaaagttggatatccaattacaattg

SEQ ID NO: 164154 - DNA, 1482 bp, Cannabis sativa
gagaaatgaaagagttgatttgtgtaattgaactgaatgaatacaatgtacaaacggagagtttatatacaatgcttaacatgagcagtaaacggaaataacagaaaaagggaaaagacaaaggtgcccctgacacttaacaaactaactaacacaaataaccaaacactaattgaaacaactaccctaacagttaaggtaaggaaagtgaattcgtgttactatgtcttggaattgtgagtctattccaaacacctccttgccatagttgattatgatggggagagcataaagcagtataagcttctttgatctgatagctttgattggagaagttaatagtggttattgccttgaatttctttttcaccttcaccacttgtttccaataccaactactctgtataggcgcttcacactccctccaaatctttagttttaagtacacgacatgagcccatttgacccataaggaatcttattttgtttcagttgcgcaaacatatttccatatctctacttcgttttattcttgtactcttctgaatcccaaaccccgtgtattttttggtctacaaatttcatcccaagccactagtccagggctattagcctttgctaatcctttctagagaaagcttctattgcattcactctctgaagaattttctttggaataattatcaataaggccaagtaagaatatattgacataagcactaagtttactgaagaaaagagatgtaatttgcatgaatctctacatattgaatatgagcaactttttcattctccaccagctctttgttaattggattttgctgcaaaaccatttggcactgcaacagattgtgatatgcacgagcttctacaacctatatatctctaaaattaactcgattaattctctttaactcgttcttcctttgctttaacttttggaccatctaaaacattggagaacctgctaccttcttcttccaaatctccactaaattggttggcaacatccaatcagatccaattgaaccgaatcaatccaatccaagccaattacaaaaaaattggatatccaattacaatttgattgagtgttaaaaattggattctaattagattggatcggttatgggatgtcattctcaaaatttaattaaaaaatgatccaatccaattacatttatatacattaaaaaaataatttatattgatttatgtataataaaaaatatatattttaattatatatttactgaattattttttgtgtgtgtgtgttgaatttgtaacatttgcctattttatatttttatttcatcatgatgttttgttctattttattattagtaatattgttgttttagtcatttcaaaaatttggttgcattacacttgtaataatgatatttttatggagtattaaacttaaataaatggtgatatttaatttttatgtacttttcttcatatttttaagttaat

SEQ ID NO: 164155 - DNA, 900 bp, Cannabis sativa
attcagaagaggcttcataactgggcaagcaagaatatttcctttgctggtagagctcaacttatccattttgttcttttgagaataaggaattattggatgaatatctttttattacctcaaaatattacgaaaactattgataaggtttgcattgacttcttatggggttccaatggtaagtataccttacttcttgggagcaagtttgcttaccaaaaaggtttggtgatattggtttcatagaagataagaagtgaaactttgctcttatggctaagtttatataggctatcttgtccaaacaagatagtctatgggtaaaatgaattaattccatttacgtaaaagattaaggtttatggagcttcatttcgaaagcaaattctagttagtatttcaagaagttgttgaatatgaggaataacatagacaaaagtgctttacttcaggctagtattggaatgggaaattcaaagtcaaatcattttatttttctctcattaatacttccaagatctgttatgcttatactatttggaatatcgtatttgtgttcctaagcactgattaattacttggcacgctatcaataaccatctcttaactcataaccaccttggtaggttcatggagttgccttctcttagctgccctattccatggaatctcaccatcacttgttctttgattgtatttttactataagatggtgcttcaaaaaattactagttggatgggtcaacttgcttggcctactgatctagtggcttggaaagagtggtgtgctagacctccactataaaaaatcttacttttagtcataataaaacttgtgactaaaagtaaaaaagttttgactaattattaattatcattcctatgttgtgactagaaggt

SEQ ID NO: 164156 - DNA, 938 bp, Cannabis sativa
taaaataatttccaacaatattaatggcagaattgtctaagttacacaatttgtgacatttaactatacaaattatttttttagtggtaaaaccctccaaacctccattcagtttatgtttttacacttccatccaaaaaaaaattatgttaagtgtcaaatctaatgtccaagtgtaaacatgtcaaatttttaatggtccatgtaattttaactgtttcaaaattataaaaaataatttaaaaaattataaaataaatacattttattttattttatttttctcttctcttctttttttcttttcatttttcctttctttttctttttcttatcggccatcagattccgctcctatttcttcttcttctatgagaccaaacaccccaaacgatgaacccaagacccaagtcaacgaacatcgtgacaaacccttggcgacaaaccacacgagcagatctgagctagatcgatgatgagagggttgtgagagtgctccgtcaattgtgttctcgagatttggggtttctgagatttgagaacccatgagtaagaggtggggaatcgtgagagaaggagaaaggatctagggtttagctcgttgaatgatgttggcttcgggttgagggaatagtcaatatgactggttttttgaattgggttttcatgggacattcgatttcaaaaatctcaagcttcgaaagtttagagattaatttcaaatctttgaggaaaatcaaatggatatttttgtcagtcggggttctggggtctccatcgatcgtagttagggcttatccccagagggtgttgtgatattttgcgtacgcaagtacacgtatcgtgaaaattgtaaactcaccaagagtgaggtcgatcccacgaggatattagttaagtacgttaaaattaaactttacttctatttggttaaataa

SEQ ID NO: 164157 - DNA, 1800 bp, Cannabis sativa
cacttctcatcatggtagaggtggtggtaattcattggttgatcaaaaaagaagagctccatcgatattagtaagtttgagtcaaaacaagaggttcagagggcaccaaggttgaggtggcccatagggtggctttggatgttggagtgtgccagttgtaaaagacatcacccgggtgagtgtaaaggtagatcataatttcagtgtggcataaggggacactttatgaaagtctgcccacaactaaagaaggaataactgggaaaagaggcgaaacccacttcagcttgagtattcacccttacccaagctgatactgaaactttcccatcaatggggataggttaacttttagtcaactactctattcactatgtgttattttattgtagagctacacattcatatgtggtggccagggtaattaataaaatgggtatgacttgaaatagttatgaaatagggttcgaaaccatgttacctggcagagagtttgttatctccaaaaggcaaattaggtctattccggttagagttgaggatagggagttgagtgctgatcttgtaaaattgggcatagtatagtttgaccttagactcagaagcgatttactatttaagtaagttgttagtgttgattgcaggaggatgatggtaacttttcatcctaagaacaaaaaaccattcgtggttgtggaattggttcaagtttctcaaatttcaattaacttagtgttgaaagttagagacctattgcgagatagatgtatagaattcctagcagtcgtgttagatactccgctagctgagataatttgacctgttgacactagagtgatacgagaattcttggatgtgttccagaagaaaatctaggattacttcctcagtgaaagatagatgttgttattaattttgcacttagagcagacttggtttgtaagttaccctataaaatagcgccagtagttcttaaggaattaaggttacaactttaagggatgtttgacttagggttaacccaacccagggtgtcgctttggggatctttggagttgtttgttaagaagaaagatgagtcgcttcgtatatacattgattactaagatataaacaaattggtaatcatgaacaagtacccttttgtctaggatcaatgatttgttcaatcagctacagggaaagacaatcttctttaagattagttaaacaaattggtaatcatgaacaagtacccttttgtctaacattagttaagtatctgagaggaggacatcccaaagactgacttccacattatgtatggccattatgaaattctgattatgtcttttggtctgaccaatattgtgatagcttttatggatctaatgaatagagtgtttaaggattgtttgatatatgtattatagtatttattgatgatatctcatgtactgtcaatcagacacggagcatgggcagcatttacaaatggtttcagagtgactacgggaatataaaccttatgccaaattaagaagtgtgaattttggttatcatgagtgtcctttctagggcaaattgttagtaaagataggataatgatcgatccaagaaagattgaactcatcagggattgtccaaggccaaagataatcactgaagttagaagctttctttatttatctagatattatcacaactttgtagaaggtttttataagatcttcattcccttatcagagttaagaagggagaattagcagtttatatggatagataattgtgaaacaagtttccaagagttgaagaaacaat

SEQ ID NO: 164158 - DNA, 2481 bp, Cannabis sativa
ttattaatattgccatttatataagtaattatataatatttttatttactaaaatagtacacacattatgtaatattattagttttagtttatttttttttgcaatgtcgtgatattatttacaaattctaacttagatgaatatatatatattgttattaattaattagttgaaaaactatatatgttaatgttattgagtataattaattttatggccttatttcaaaaaataatattttctattaaaatatctacattttttttatttttaaatataaaataatattataaaattaatatacaatattctgttaactaatggtctattttgttaaagttaacgtaaaaaattaaaaaaataccattaaacaaatattccgttacatagttttatatagaatagatatgtagattattaattataattaaaatatatataataaatattaaatatataaatgttattgaatggaaatatcaatgatgattttattgtttattgaagtcatatgcaaactggtcccattccctaaaggaaaaacataacagtaattatgtaggacagcgaaaaaaattcaaatatagcatctgtcatctaaatgactaaagtaaattagctttcattttgaaaaaaaactatacctaattaatcaatgtcactataaaaattgattttacgttgatgttagatacttttgaattgattttattttagtgaaaggaaaataacatttgcaatattgaaatagcagtatatcactaccaacaaatatgagaaagaatatatgttaaaacaacatattccaatcgccataaaaaatattctataatattcatttcgtgatgatgatgatatattgtattaaaaacggttcatataaaactactacaggagcgagcagaacatgattattattcatgacatgcaaatcatgtaatcacaggcattgttttctagagctttttgagcttttagaggtataattaaataaggggatgatattcataacaataacaaataaaaaagtatgtatgataaacttataccttttttttaatcaaaaaattaaactttattaaatcaaattagctaccaaaatagcttccaaatcagcagcgacaacacccccgcgagaaacccagccaggaatagaactagaagaacgagctaaaaagttagccgcctggttctcggaccgtttaacaaaattaattgaaataggaaacaaaagagaggattgcataagagcaacacaatccgaaattaaaagccccaccggagacaacaaatgcttcttctgttgcagggtttgcaccagcagcagcgaatccgactccatgaccacactagcaggcacacccccctcaacccaccttcccttcacccaactgagcgcctccttcaacgccatagcttcagccaaaaatgggtcgggctgaccataagttttaaccgccagcgcatcaatgaataaaccattatgatcgcgagcaatccacccaataccgagactattgtcatcctcaaagacagcagcatccaattaaccttaatctcaccaaaacaaggtttagcccattgctcacacccgaaagtaatcgggccagaaattggcaacacaactctattttccagctgagcattcttccaagaatcaaggtaagtaattgcagcattcaccaccctctctaccgacaaagccttattatttcaaaccaagtcattacgagcctctcaatacgatccataggttgcaccttacaaatattatcaaaccagctgccaaacacaataacttttcaccccctcctaccgtccctcccagcaccctgtccagaaaactcttagtaaaagcgcagctaaccatgatatgaaaaactgtctcatcctcccgattacacatcagacacaaactgctcatgtggacccttttagaccgtagagacacaagagtaggaagacaattagtaagcctcggccaaagaaaattcttcaccttaggagccaatttcaagttccaaaatatcctccaaaaactcgaattgtcttgagtactccacctaccattgcttacttgtaaggcgcgataagcacttttgacagaataatccccatgcatctccaacacccaaaaccaagcatcctaaaccaaagacggagacaacggaatacaacgaatcaaatcaatatctctctgaacaaataaatcatgaagaacttcctcatcccactcaagagagcccacttttaataaattattgaccttacagtcatggagagccacatgagaagaggtaacatatacggatattccttacaaggtttattcaccatgccacatggagagccacatgagaagatggttgagaaccgatatagaaaaactagctccaacacgccatctcgcacccatcttaaccacagattttgcccctagaacactccgccacacatagcttggattagcacctagctca

SEQ ID NO: 164159 - DNA, 1464 bp, Cannabis sativa
agtagggatatttgcaacgaaatctccttaacatttaaagttgttacacatatgactttaataaaaaaaaaaagtgacgacaaaagtatcttattttacgttgttgcagttatacatttaagttccaactaagctcgttaagtaccaactaagaaacatgtggtaacatattattaaactacgtattaaataaaaaaattcttttataattctctataaaaaaaacgtttatttttttaattaaagaaaaagtgatttagcttttttattcatatttgtatatttttcttaaattaaaaaataggataaataataattatttaatacgtagtccaataatatgtcgtcatgtgtttttgagttagaacttaaaggtacgactgcaacaaaatcgtaagattaagtacttttgcagccactttttttattagggtcttatgtgtaacaattacaaatgttaagaaaatttcgccccaaatatccttaaaaagtattatgtatgagaaaaatatcttacaaaactttaagttgtctccaactcttgactaaatcgggaattcttccggtgaatttgttgctgctaatcttcctaaacatgaccaaaacaaatcccatgattcttaacaatcatattgaaatattgagtgagacataaatcccatgattttgcacttacaaaatttgtaatttggtcagattacttagtgtccaaggcaatgctccattgagactattagaactaagatagctgcacttattcacaacaaagacattctttaacagccattaacataagtaagatgacaattagtgaagaaaattataactaaaaaaaaactgacagtttttccatgttcaccaattttccaaactctctaggaactgctccagaaaacatgttgctctccaaagaccttaaatggaaaaaatatcttaaaatgatcattcatgattaacaaataacatgataagagagaggtttggttatgggaatacaaatcatagagagttgttatgttgcccaaaaatccaggtattggtcctgataaattgttggcactgatgaccctgcattggattgcttccttccattaacacatttgctatgagaattttaagctagcttagactatgaatcaagtgagtaaagaaaaattacaagtgttcaaactttgtagaagcccattcatgaggtattggactggtgaggtagttctgctccaaaatactgtaaacaagtaagaaataatagtgacagatttaagatagtaagtaaaaaaatttacataatacactgaaaatttgaatggaattacaaaaatatgttaacacgcgcggagaaaagttaatttttaaggtttgaacttttttatttacaaatatatgttattcagtaaaagtaataaattgctcgatattagttgtacggctccattgggctcttgataactatgtctccttttg

SEQ ID NO: 164160 - DNA, 1526 bp, Cannabis sativa
aacaatgagaatcaaatcgcaaactagatacacagtgatgaaaagcacgaaatcaacccttcccatgaagggactttttcttcccaggaggtttcagaggaccgaaactaacgggagactaaaaacaactcatgatgatttttttgtgatatttttatttatagaaatatatataaaagcatttgaagtgttcttcactcatttcttctttttaagctactttatatatacccaatatggtaataacgaaaatgaaaattaaacattaaaagtgtcccaatttattttatatttttaaattaatatatataataatgaaaataatagtattttaccttcaaatagacattattattacaaaattttttacttttagtcacaataaaatttataattaaaaataaaaaaattgtgactatgtaacttatatataaaatgtatatagctaaatatattagttacaaaaattataatttattgtaattaaatatatataattacaatatttattataattaaaattaaattaataattaaaattgtcaccctaaatagttttttttgggtagtgaacaaacacaatattatttggaatcttttatagacaaaacatgaacaaatatatttatacatatctaatcatatctttatttatattgccaatatacattgaaccaaatgaggaatatataacacaatcaaaatcaaattacactacatctatatatattctttacaaataatcatgatgatgatcttatatatatagatttccactatatacaaattagagggcatgcaattattttcttcaaagatattctaaatataaatatatatatatatatgcccttgaaatcaagttgacaacaagttgaaactatactcatattatgatgtactaccccttcttcttcttgtatttttgacaccttaatttattatattaattcatatatatagatatatagatataatgatgtatgtatgtgtgtgtttcattttgtgtaatgtttgggcgaaggagattgaaatggactgcaaaatatatatataaaaacaagccatgtgtaaaaacgtggattgtaccctaaatttccactaaagataatacacctcatcaatctatatctatctatatatcttgtaacctttgaatccatttttatttttatttatatttgtatatatgaaaacattagcacaagtcttgccaataattatcggtttgtaataataattgttaaattaaaatataagatttaatatttaattatactaataataatattaataacaatattacacctctgtatatctcgtaaataaataattaaaaaatttacgagtttttatataatttatataaaaatatgattttttttttttaaaaaaaaagttactttaaaaaaaaatcaagaaaatgttgaaaaatatgaaaaaaaaaaagtaggtaaggatatgtactattttctcatatttttgtaattttttctaaattttttcgataaaataactttattgag

SEQ ID NO: 164161 - DNA, 1831 bp, Cannabis sativa
gctttaatgaatataatttctatcagattataacagaacaaggaagaagtgacaactttttatgattctttggcttcagtcatctcgtgttactgacctaataaagcaaatgtaaatgaattttggattcttgtgacataaggaaatgcttaccgcataagatcctgcttcttagttctagcaatttcatctctcatgtctcgaccagtaattaaaccagttttccgctcctctttcatatcttgagcagacacttgccttgtattttttctaggtggagaaagatctgaaacaaagacatatgtgaatggtaagaacaagtttcgacggagcatgcatgctattcattaataaaacctgtgttctatgaaaagaccctaggtactatttatcaagctgttaagtcttctaaacaagtaataataatgtgaagtattttcttagttcaaatctcagttttgcatacaaatgttaacaatgaagaaagaaagaaaagaaatcattcaatttccttaccatcattcctacttctccttgggggtgaaaggtctgaaggcacatgacccttgtcaggttcaggtgactctgtgtgatggcgcttcctccgctgccgagggggtgacaaatccacactttccttaataggttttctatcacgttcaggggaaggtgtgtcatttcttactctacgattacgaggtggagacaagtcctggttatcaggttctggtgatggactatggtggcgtgttcgccggtgccgtggtggtgaaaagtcattatctacttcagaaggcttgagttcaggtgaaggcgtgtcatttctagccgaatgtttacgaggtggagacaaatcagaactcaaattttcattttttggagagagagtaacccaaccacttccatcctctgatatcggattactagcacgaagggctcttaaatgctcaagccttctcattcttttaacctcaatatcttcttcaatttggggcttttcttctcctacagagaagaccaaaaagattattcataactttataaactctatgaattcaaataaatgaataatacatacatcataattcagtcaatcactacctaccagcagaatcattttcatcatcttcttcaacatggactggtttttgccaaaccggatcttcatcaacaactaaaacacctaaggcatctggcttagctttctgctgtttctttttcttcttcttctttttattttcatcttcgttattgctctcatatttttttagatactccttaagagacttcgaccctgaacccgccatttccactcaatccttcatcgactagttaccaattaataacctgtagaagttttgaaccaagattgaacatgctttatttaacagctacaaactcatatccctgtagaatggaaaatgtagaacaactctatacaacaaaacagagagaatcacttgagaaaactcaaacaaccagacaaagagaaacgtaaatacagtacctgttgtgagtgaaacagttgtttatccggcagccagtgagtgaaacggaattcgtaacccgatctccgatctccgatcagtagtgaaggaggttgaagaaggtatttcaaggttacctaatgacagaacccaagaaagtcgaaagagtaacggagagagagccatgacttcggaaggatgaagataatcagacccactttggttttgtatctgggcctgggcctgggcctgggcctgggcttctcgtattgggctaactcaaactacaacatacatgatactttcgtacataggataaaataagggttaatttcacaaatgca

SEQ ID NO: 164162 - DNA, 1171 bp, Cannabis sativa
tcagagttacacaagagacaagtaccattagagatgatatcaaaattgattagtctagttcgagtttgaaggtgttatactcatatttcgagtaattaatataaatgtttaaatgtaccacacgtgtaaaaatccattcaatgaactccttgcaaagaaaagatgagtgaaggttttctcgacaatcatcaaatatgttttagtgattgacaagcaatatgtagtatcagtagcagcatctcacatattgcaagaaagaaggcatgaccaacaaagagaggaagaccaagctattgaatgttctcaactctgtttgcacaagagatacaacttgaaaaggcttatttatgaaaaaacgaattatttatttaaacttaactctttcagcaatcaccgaaaagactcaatctatactagtgatagaaaggaaatagggaattaattgaaagataaatctcagctcaaattgtgctgagtaaatgcattgccttatatagaggaattttacatttagtggccactgaatttaagacagatggcagtgtacaatttgacagtaaataacagaaatatcagcatgagattttgtgcaatgattgcacaaatccctagtacaaagccgttagtgaatattctagaatagggtgagctgtcctctgatgcacaatgctgagatactctgttgcttcagtccacaccagctgctgtggagactcaggtcttaacagtgatttgcgaggaggtcattgaatgtttcagtatacattcatcggttggaatattcatcaagaagcaaagtgttcgattaaaccgactcaatgaaaacaagataacaaccaaaatcttagaaggacggttagtcattttaaataaggattttaaaccgttcccacctactcatagataaataaaacatgaagaatattcaagtttcattatcgttacatagagaaaatcaaaaaactgttatctcatccgtataaatagtcagaacactaatgtaaaataattagtttctagacttaaaaagtttttgccaaacactataagaaaactagcttttgccggtgcattgctgcgccggcaaaagtaccctaactgcgccgacaaagctttgccggcacagttgtgcgccggcaaagattatctgggaagcttggtcggtaaagga

SEQ ID NO: 164163 - DNA, 1295 bp, Cannabis sativa
actaatattagctaaaacaagtacactattctttgattagtggtggaataagttggtgaaaaagctaaaaggtaaaaactctgagttggaataagtgaaatttttctttttgtactgttattctaaagattgcttgcacaccagttaatcaattatacccatgtccttataaagtttgtccaactttatgccattgttttaataaagtagccagcattctacaattatttgagaagcttttttttttatattaatagttatttaaatttaacagctattattaatgttcaaatgctttgcttatattctcgaaatgtgttttcatgttgttcttcaatgagaagtgatatgctgtttcttagctggtaagtaaaactaaagtctttgtggtttgatttattgaaaatgctctagagatctacttttattattcaatcatcacgatgaactagatacgaaaccatatatgcctttctcaataaaaaataaaataataaaaatccactaaaaatattgacttttcagaaataaatgtgtggatgaaaatgattaaataatttaagtttgataagaggacacacatcggatcccggtatagaccacttcacaagatccgactcactcacatgcctaaagcctcaaaacggacaattgaacccatcaattcgtgttcatgcaaaccccacaacggctcgtaacggttataattaaaggtcatttacgtcaattttggacaagtatattatcattagacgacttaataaagtaaactttccaattccaagttcataataatcacaactcacgtcacacactactttaaagtttctgtcgtttacttataaggaaccaaaatttcatttggtttctttttcattttttttttttctttttgcgttgaaaaataaaactgtaaattaaataaacaaaacgcgtcgcatccacgccaacatttacttacagcttccagttttaatttcataaagcggtggaattcaattcaacttttcatgtaataaaataaaaggtgcgtttgcaaagtcaccgtagaattaaatttacagttagtaatactagtgcaaatggatcgggtctgatccgatctgatctaaatcatgtaagaatttgtttctgtccactaaattagatatttatattggatcgtgtaaggatctgtctctaacttatttgagttggatctgatttgacccgattttttttttcaagaattttaattttatatctattttaattttgcatcagtattatttaatacaatattatgtttggtattg

SEQ ID NO: 164164 - DNA, 717 bp, Cannabis sativa
tttttttttttttgatgattttctatatcattgaaaatattgagatgtatcatccttaacctcatgttaaagttgttattgaaaaagtactaaaatataccaaaaatttataccagaaagcacataaaattcaaaaaaatatagattcaacctttttttgttggtcgacagggaaggtgatggtttcgtgtcggtcgacagggatgggttcatggtggaggacggtggacgagggtaatttcaacggtggggagctcgggttttgggtttggttgcgagaggttaaccgaaagagaaagagagagaaataaagttagaatgccaaagctaaaatgaaaaatttgtcaaactaattattttaaatactaaattttttaaaataatctcacttaatttattctatatgattatgatttcacgattataattatcatgtatggtcgcacattataatttatgctcatttttgtaattagttttttaacaaaaaataaagattataaatttctagtctttattattaggagaattaatttgctatcaaattaaaagagaaaagtgatgctttatatgatgaatttttattttaactttatctttttgccataactatttctattgggaattttgattatatatacttaaaaaataaaaaaaaattattattaaaccaaaaacttaaaacctaaaaaaactatacattttttttcaaaaccc

SEQ ID NO: 164165 - DNA, 2955 bp, Cannabis sativa
  modified_base (1678)..(1686): a, c, t, g, unknown or other
ctccatgaccatgcatgcataatattcttcaaccctagcttccttcctatttcattatttattacatcaaaaatgttaaaagatacagttctatacctataatattatttaacctattatattattattcgtgtaatgaaatatcaaatatttattatttaatttgataattatatctatatttacagaatataacaatatgctctctctctctctctatatataccatatgtactatgctctatcaaatctatgagtaatgaaattactgtactattttcaactgataataattacatgatttttctaaattaaaacatactagctagctatttaaagaaaaaaagacaaaacagtgttacttatctttaattgggtgccacatacatgtaaatatatatatatgttggttgttgtgatatactttcatggaatgtattttgtggtacattaaatggatctcagaatacattaaatggatctcagggtaagttaatattttttaactctaattactccttgatcaatcccaactctcagatcaaataactcctcatctaacgactgccgtacattatgaaatacattctatgaatacattttataaaagtacatcacgggacaaaatcatatccacgtacatattatcaaattatatataatatacattgtcagaaattgatatccaaaactaataacaacatgtgtatatatatttggccacgtgattactatacatgatgatcactttataacaaaacgtctttttttttttttcattattattattttttgtagggttataaattaatgaagataaatatcccctgtcgacaatgacgaggctagctaggtcaaaaatttattggggttaataaatataaaaataaaaaaaatatgtattttaatttctaattcaaaaattgggaaacctccggccccttgactccatcattgcctgtaaattaaaatggaaatccaatctaagtatcaagaggaggatacttaagatacttgtgtggagaatattttgacccttcttatatctaaattcaagtaaattgttagaccctagatctaatccaatctaatatttttctcattatctaattaattagtaattagatttataaaatcacttaaaatctaatcaaatttaattcaatttaattattaattggactaaatcagtcttataattagatgttcaattacacaccaaatattatatataaatttaaaaaaatgaaaaaaaattacataaaatctaattgatattgaaaatgatttaaggattaatgaaggagctattaggttttctcctatgaatttaagactatacatgtgtttagaaaaacacaataagtcaagtatgctattttttttagttttaggtgtaattaaattattttttagggagtagttaattaattaaaatgtattagtaaataaggagaaagcctaaaaaatataattaaactattttttaaaaaatatttttattatatataaataatattttaatatatattaattataattgaattgtatcaaattttaagattaaatccaatccaatctaattataattagatatatatttttttttgtaatttcatgaaattggttcggtttggtttaattagatctcttgtcctattattattattattattannnnnnnnnttattattattattatttatcgtagtttttttttttttttttgaggttagatttaattaatattcgtgattgtctattgattattaatattatgtatatattctttaatgtttttttttgtttttaatttttgtgtgattgttttttatttttagataggaaaaattaaaacaccatggttgcatgtactaactggcatttggcaatgttgctgaaacatgtaatttaattgtgttcaacgtgattatattaaagtcaacaaagtcttccttttgcactttataagtacgcgtacgtagctacaattgttgactattttctgtactttttttttcttcttacctattaattaatatttgggttggtattttgtataatattttaagcattatatcataatataacattttaaattataaattttaaataaatgtatgcgtgaatttttgtcattgaaacttataattttttctttttatgtacatattccattctagcttcgacccatgtatatatataagatttaatgctactaaatttgctatacatgctagctgtttaattaattatacaatgttttccatatatataagatttgataccactaaacttgctctatatatatatcatgctagctgttgaatttatacattaatattacaataattatatatatatatgtacagcacgtaatatgagtattgattttgtatatatatactccactaagtgaaatatatatatagtattacaattcaatttggaactttggtatagagcatattatcgggtgaaaacacctattgctaataccaagagatttatttacctgaaagatcgatctaaatattaattaatatttatttgtgtttggacacaggacaggttttttttttttaatatatagaaaagtacattatatatctatgtcgttttcgaagtctacaaaactttaaaccttttgaccgaccacagatttcaaatgatcacccataaccaaagactattaagtaatatatataataaaatgaaaaaatattagaagttaaactagattttaaatttttttaacacttaattataaaaatgaaatttactaaaacccaagttcagttttgctctacatacttctatctaaaaatttcagttaagtaccacattagaatttccatttgtatacaaatatatatatatactagttagaagttacgtacctcggcacgtaaatattagttttatttaaagtttaattctttatttttatttaga

SEQ ID NO: 164166 - DNA, 853 bp, Cannabis sativa
tatggattgaagcaagcttcaaggtagtggtttgctaaattttcaagtgctctaactgaggaaggtttccatcactctaccacagaccactctctattcatcagacacttcaatggaagttttatttttctcttggtttatgtgaatgatggcattctaaatagcaacaatctacatgaatttaaggctctaaagatcaggttacatgctcaattttaactaaaatacttaggaaaattgaagtatttccgaggcctagaagtggctagatcagaggaagggatctttgtttctcaaaggccctatgctttgcaattattagaggatcttggttgttatgactgcaagcctatgaatacaccaatggaagctaacctgaaacttagacaagttgagaaagagaagctagttgatccaaccttgtacagatgaattgtcgggaaacttcaatacctaacaattacaagaccagacatctcttatactcagtttacaaactgagccaattcctatatacacctcgagtcactcccataaatgcatcacaaatggtattgcagtatgtgaaaagtagtcttggctaagggatcttctttgatgcccaattcacaagtgaagtttcatgcttatgcaaactcagactgggtagcttgtcctgatacgaaaagatctacaacaggtttctgtatcttcattgaaacctctatcatctaatggaagagcaagaaacaacacactatatatttcaagatcttctgcagaggcaaaatacaaagcaatgactaacactacttgtgaagttgtttggcttctttccattcttaaagaactgaaggttgagcatgaagggcct

SEQ ID NO: 164167 - DNA, 1022 bp, Cannabis sativa
cctatctttcttaggtacataaagtccaaactttacaactcaccgacgaggacttatacgccgaaaataactactactttcaaagacttgttggaagtcaaaccatgtcgcattcaagcaccaaaagacaagcagtagatttcttttgacattaacataccccttgactgtctcttcttctaattattttttgctaagacagtactcttcctctaattcttttttaagctttctcttttattattctaacttaattactgacgaaactttagactttgattgtaattattacctctattagctgataattggtttattacgtatttattaagtatcaagctaatgattattcagggataacaatgttagaaattttgtttaattttctcatgtgtttgtttaataattaaaagtagatgagaaattgcttttcacgtgcttaccgcccaaatcaaccaccgtttgttgttttagctcttttttctaccagatgctacgtcaagactcaatagtcatttagtcaatactttttcagtttttttttttctcttttttaataaggtcatgaatgtttcaggggttattttttcaattttaatcaaaggtgaatagttgagttttaaatttgacaaatagtgttggataagtctgtagtggtcatagttaatttggagagaaagttgaagaatatttctttttttatacattaattaaatatacctttaaataaaatttaatttaaatatatttctttttattttatgaatattgtaccgaaattagataaaaattaaacacatcaaatgaggtatatagtataatttgatcgttaatttgagattaaatttgagaccaccgatggtctcatgtaatatggaccaccaattttgagtccttgcaaggacggcccatagtgcacctttaggagaaaaaaaataggaaacttacaaaaatattggaatttgggttaacttttataaaaatactgtcacacggaatttttttcaaaaatattgtgtttt

SEQ ID NO: 164168 - DNA, 1878 bp, Cannabis sativa
attcgatttctatcacacccactttatgaaaggaaaatttatgtttcgtggcactcatataatatgttcttgacaaaaaggtaattttttttattattttatgatttagaataaaactatcattcaaatactaatttatatatttttgtttatgtagaatttggatagaagctcgatgtccatctcgatagggcattaattaaaattaatttcttgattaaaaaattgatttttatccataaaactccatggaattcgataggaacttgatggtgttcaatgaatgctcaataacattcttgcaagaggcataatttttaacttataaaacaaatcgttcaaataattatactattttaattattaagtaaaataaaaaactaaaatattaaataaaactaacactacgtggccttgcacataacaatcacctagtatatatatatgtttatatgtgaaagaatgggctgggcctttgaaatttgaaagtgtttattgagataactttgccgagggcttcattttctcagagtcttactcttcagcttttgtcatggaattcagacgagagggaagactagtgtgagaagatcattattgattgatttcaatcaacaaaatattgaagaaaaggtatgcacccttcccatttttagctaaaaaaatatacattaatgattcttgagctagttcgttcgttgaggtatattttctcattttcatgatagcttggtttaagctttgaagatttatttgtgatactaattgaatagttatatttttcttaggtcatgttgagtttctgtaacaaattttgtgaagctaagttagtttccattagaaggtctgaaagatacttaaaatatatttaggattttttgagaaatggtggagcattgttcttgctattcttcaattttttcttcttgatcccaaataaataatggaaaaaatttgaatagtgtataggaagtaagtagtttataattgttgtaatggttgagaactagtggtgaaatgagttcataatgtgtattggtgggtatatatattggatgaatatttttgtgtttagaaaaatagctcttttatttataaaacatgataggaaaaataaaatacaaacaattttatgtgttttgtgggcttggactaggaattttagattgggcatttggtaaaatgttaaagaatagggatatgtatttttgaatgtttgtgtccatccttgaattgtgttcttcatttaggattgttgagataggaaagagtgtagaccccaagctatgtatttatctcaaaatacagaattccaaagggggtttatcttcgtgtagttgattattttctaatagtattgttactttcattgagtagtggaaaggggatatccctcattcttttgtccctagtatggttgttagatcaacacattccaatattgatagtggtcactgataggttgtggtcattacggacatggatggtgattttgatcgagaggttctggatgcctcgtctctcgttcctatcactatcacagaagagtactatggtcaggatgtagatgaccatgatgcgattgggttagcagtggacggggaggaagtctcagtaataggttatgccttagcccaattagtgaatgaggatgatgaaccgcgtttcttaggtaaatctcagagtattttacgcattaatcccgtctctaaattgacggttccactcctagcacaaatgagattggattatggcattcctcgtaatataaaaatgaagctacttaggagggaggaacgaatagactgggatgttcctgattagtgtgtgttggaaattattttaccaggatcttaagtatgttgattaacaccctaa

SEQ ID NO: 164169 - DNA, 1674 bp, Cannabis sativa
tactcattctgtgaaaaactttaattccattaaaagagtttgagagaacttggaagtttgaatatccacactaacgctagttttggttttcttttatagattcaagtgggatcgaacctcaaatgatcattggttggaagtatttcggtcatttcttcgtattgcatatatgttcgatttaattattttgcatttcatatcgttcatacatgcttcatgttttatatataatttacttatagttagtatcaaagcaaatctatatacctttgtcttaatttttgttcaattttttatgtatatatgcatgtatatatatactatataatctatataattttcgttaatggttgatcgtttcatatttttttatcatgttttgttgcatgatataattagaattttttagtttatcaattctaacatgtttcatattgcataatatagttaggattttatacatatttgattatttagaatcataaaaaatatgcttatattctcttaattggttagcatttaaatttatcacttaaacccgacaataataacatgaaaactcatattttctaataaaaaaattatacataataatggtttaatgcatgaaaaatcaattttttggcaaaaataataatatgataaacgatgtttaacgatagttttgtgatgaaatttgattaaaattttgatgatatacaattttatcgcaaaccatcgttaagcatcattaaacataggccaaaagataaattttcatggcatcatttttctttttctaaaaagcattcgtgccaccatccctaatagcatgataaaacatcactttttctcttcaaaattctccatatatatagtacaatttaatttttacatatatattaattggagatggtctaaactctagaggtgcataaattttttactattatattttgaggtgtttttagttttgaattttgagactaatttttatgataaaaagtgtggaaccactattatatgccgatgactacaattagaataatgtgtgtaaccataaatttaggatgtacttcgtttgttgcattaagcatgtacaagtatatataatccatactagccacatatagacagagaaaatatttatatagcaacaaaaatcatataattgtattcgtaccagatttttccgccacttgatcacttactatagggatatacctatatttattcttatataatataaggtattttacactttacatcttatttttaatttaattgttaaaaatgactaggttaagtagagggttacgtatcattttttttatttgtttggttatatttgaatactcttatttatactctttctctctttcttattttttccttatttttcaaactttaaaaataatttctggtcacattgttacttggatgagcctaaaaaaatactattgtgatctactcttcaatgtaaatatttcaagatgtgagaagtatatgtatttttgctatttttaggaaaaaaaactatttaattactaatatagtgattagttactgttttatattttttaaatcttagctaacatttattttagaattttgttaattaaattatcttatattatacgaaaattaattaattttcaaaataataaaaatgtatataaaataattggtatataa

SEQ ID NO: 164170 - DNA, 1102 bp, Cannabis sativa
ttcactgaaaatagattctacaaattagtcagaacatataaaaaagttcataatcatcatgaaaatttgatgtttagcttagcacgacctttaaaccttcctttaatatttatcacaaaataatgttacgatcataaagcacaacatttaatatttacataaacaaaacaaaacaaaacaaacaaacctgttttcttggcaggctcaaataataagtctgaatcttctttgttcagttcttgctcatcaggtgtgtatttaccgctaccaccaccattactactactatcactaatagtaaccttgtttgcactttccatttttctcttcagagaaggaactgatgatttagaagaagaattattataatcctttcttttcgggctctgagagtggttctcttcattgagatcttgatcaccttcttcttctggcctcttgggcagttcttgatgatgatcaatataattagtaactggattataacttatctccactccattttcatcaaatataaccacatggaatgtagattggttttcatcatatttgaaagacaatgtgtaatctttacactctaataggtggtaatgtgttgcaaaatctacccaaccttttttcaaccaagtacgtccatcttcagatttggttaacttgaatttccatactactcctccaccatttggaacttttaataatattgttggattatttgaagtgtccattttcacaccatacttcaacataaactcttttggaatttcctacaaatatcaagaaaaagatgatcaaaatatatactacgattagctttattattagtaaaagtagtacttaaaaagtatcaaaatttaaatattgtgtatgtgtgaatctgactgagaagagtagatattacttacaaacttatttttgaagaaatgctttttagggtcgtcgagttttttgagaaaatggggagcgatcggagaaataatattggtagacattgttgttgttgtttgttaaatgtggacattgaaaaaatggggagcagtaggaaaaaactttgactgatccttggcaatatggctatcacaagccatggttgaacacgtttttt

SEQ ID NO: 164171 - DNA, 1003 bp, Cannabis sativa
tattaaacaccactaatacccattaccaatactcttaaaaataataataaatatgaaactagccatatgcttattgagaatacaaaaactctgaaaaaaaaactcttcaacttaagaagtgactaataattaaaaggcatattaattatgaaatatatatagcctcataagtaataatataatctaatttgtaatgaagttatgtagtagtgacacatttttagtacttttgttggctttcacgtgcttggggacaagaaatgttgatcatgaggtcaatctcaccgaaagaaaaagccctaatttaatgcatatttaatggctttcttagattctgttgattgaaaaacgtatttctattatggcattcctgaagaattgtggtgattgcaacgaatcttgtccacatgaatacacaatctccttgttgtttcattggaaaaaatgagtaattttatatatggtacgatgagatgggtatatatattatatagtattacatttacaacacaagttcgcatataggtttgaggtgagtgggtgaggaagcaatgggccttgttattagggaattgccattcaccacaccttattgtcaacctatttgtttacttgattcaaatttttgtccacccaaaaatagcttcatttccatttcaatcaaaagttgctcaaataacaaagtttgtgctatttcgctttgtctcaacaaattttattcttgctgtgaacacaagtatatatataaatactagaaagcatgcacgtgcaaggcacgttgtacttctatatatatatttatataattagcaatataatataacaaatgcatacattgaggcagttttgcatgataaaaattataatttaaatgggaaccaatcaaatatattaaaaaataataaattattatttgtcattactcttttttagcaattgttgtgcaccacgcatcaactcaatgcaatcgaaacgaaaataccagaaagagaaccactattaa

SEQ ID NO: 164172 - DNA, 1491 bp, Cannabis sativa
aacgaagatttttcatatacatctctaactctaactccccaacaacatcatcttctttgtctgccataagaccttgactactggaatttctctgttccttaacacttttagctttatcgataagattttgacagtttgttctgcatagattacatcttctcgaataggaataacctcatactcaatcacatgcaacaaatttgaagtatacttcatcaacattgacacatgtaacacattatgatcatgctctaactgtgtaagttcaatcgataagggaactccccaactctctcgataacctcaaaaggtccaacatagcttttggatagcttacccttaactttgaatctcgttacaacaagcataggattaactttcaagaagacataatcaccaacatcaaactcaacttcttgtcgatggagattggcataaattttctaacgactctgaacaaccttaagtctctattggattccttaatctactcagtggtactagtaataatctagggtccaatactgacatgctcatctagttcaagccaacacagtcgcgatcttcatggtctccaataaaaggccttgttaggagccatgcccatacttattttgtagctattattatatgtgaattccaccaatgacaagtgttctctcaagctaccacaaaaatctaaaatacaagagcgaaacatgtcttccaaagtttgtatggtcctcttagattttccatccctctgtggatgatgggctgtacccaagtaaagctcaattcccaaggcttgttgcacaaccttcctaaaacttaaagtaaattgaggatctcgattagaagtaatgcctaaaagaactccatgtactcgaactatattttccacataatgttgatctagtctgataagcttgtaatcctttcttatcggaataaaatgagcaaacttaatcaaacgatcaacaatcacccaaacagtgtcatgcttcaagggtgtgaatggaaatctgataacaaagcctattgtaatcttgtcccactttaattttggtataggcaaaggttgaagtaaacttaaaggtctttgatgctcagtcttaactttctaacagaataaacacttagctacaaagctagtcaaatctctctccatatcttcccatcaatattgtctcttcaagccttggtacaaatttgtgcttccgggatgtaaatcaaacttggatctatgtgcctcaataaaaatggactccctaagatcaaagatgtctattaaactgatattccttgatggtataagtgaccttcaacattaattgtccacccataaaatttcttaccatcatggattcggaccaaatatgtcttagctttttatcttgacactggtgttgtttaacttgttgaagtagcacttctgaagcactactacaaattacactattcacgtcagtcaacgctactattcatagggttgaccgacgtgaatagtgt

SEQ ID NO: 164173 - DNA, 705 bp, Cannabis sativa
aaagtaaaaatttagtcaaataaagtcattatatcaattactaggactatatattttataagaatagtaggtaactatagcttatataattagtcactttctcatctttctttaatttcacctagattaacttattttaaccatgatttatatatagattatttttcacttattaattcttcttttgtacaatttttttttgttttgtttttgggtttgtgttctttttgtcacaaaatttctatgagagaacacatcattatatatttttacattttcttctttttacttcagttacatctgtataggtaaaattatatatttgttctttttaatttgattgaaaaaaaaaaaagatttaaagtaatattttttttgtttaaaacctttgcttggttgatatatagattcttctttttcttttcttaacaaaatataagggtgttcatagaaaccaaaattaattatcaaaccaaccatactataatcaaattttcagttccacgttattactcaatttgattgtcagtttcggttacaattttttgacatgatgatcaatttctttttgaaataaaaaaatagttaaactaaaaaattgctaaaaatataaaaaaccgtacaattagggggcgtttggtacgaggtgttcaaaataatttgattatagggaatattatgaaggagaatatgattatagggaaa

SEQ ID NO: 164174 - DNA, 795 bp, Cannabis sativa
tctctctctctctctctcactttagtacttaattttcttcacaattggattttgtggcgtgtgaaaactgccagcctgtatgaatccgacgtcgtttttttttctttcactttcttattcaactagaaatagacaccacatgttaggatctacaggggataagatattgtggttacgatttatcacccgtggctgctggtgtacgttttcttgtctcgttatatcttcgatgaaatccacgtaatcctctaaaacaactcagtcattagatcggacggctatcatttattgctccggttgttagatgcacccacgttagtaatagcctttgtattttgtagagatattttttgaggggtcacgatcgaagaaagaaaacgttagtagctcacttatagatagtttggtgacaagacattaatgccgtaagtgtcctcttgctgaaggtacgtaaatgccacaattgaaagatttttgtacatatataatataatgttattttaggaacatttactacttgtttgaaattattatatgaaaataataaagaaaacaatgaaccatatacaatctatgaaatgccaaatatataaatatatattaaatatgcaaaccaaaaaatagtattaactcccgtcactacaaaattttttacttttagtcacaacaaaacttgtgactaaatataaattattattcatatgttgtaactgaaaggttcgaggctaaaagtattagtcacaaaaattacaattttttgtgactaaatgtatttttagtcacaatacttgttgt

SEQ ID NO: 164175 - DNA, 1592 bp, Cannabis sativa
ccagattttgtagctttctttgcttcatccatgacccgacgtagagttaactgatttgcaatttcaaaatagcgaaaaaaatatttagattacaaaaagagaaagcgtagcaatcaaaatgtttgtagcgtatgcataccgagtaacttgcggttaggatacaatttgcgatttgccatgtatagcctactccgtcaaaagaaaggtccgtgacaccaccagtgatagcagaaataatctgcaatacatcgaaaaaatagttacacgaacaacaaaatttgtgaactcataacaaagtttattagataatttgtcatgaaaaaaaatcaatatctatgtaactctagtttcaattaccataaaaaacattgcagtccagactttctgattctgatgcttccgaaatatatacaattctccaatggctgttaaaatattcgtcatgttcttcagaattgtcaccattgcaatatttatgtatttcaaactgccacgaaaaacggtagatcaaattatatttgaagaattttttactaattttgtgttttttttcttaattagatcacttccattggatgaacaaaacaaaagaaagtaattaagtctatacaattttccaatcttacctatacattcctgatacaagcataccaacaaagattacattgacaggaatccaaaccctaatcaacctgggattaagcttttccaccgaaaccgctcctgatagccccaatagaataacaactaaagaactgatcagattctgcacgataacatgcatcgaaaggttcaataccagcctaaactttgtgcgagaactcgctattactttaaacaattttaatgaaaagtacatagaaaagcatagagtgacatacttgataaaacatcaatgatataccggcattgaagttataacccgatagaacaactttattcagcaatatcatgctgcaagaagaaatgcagtaagctatcccggacaacaagggtcctgatttcttcaccattccatgttcacgcttttcatccccaccaacagaaactttgagatcatctaccgctgctcgattattccctctaaagaatctggttacaaaacaatcttaaatgcatgaatgaaaaactcaaccagcatagtgacaggacattaattttatatatttctgacattttttaagattaacaaaagaaaaagcataagaatcaaaatgtttttaaagtataactcggctaaatgcagtaatatgagactataaggtatactacagttatagtatatttatggctaattaagatttttgcttcccgaattttaacattaccaaatcatgtcgcctaaactttgaaggccgttaaaaatcatccccgaactattgagattgatggattcaagaatttttgtctaattttagttaggaaagtttaacatgaaagttggcataatttggtaatgtcaaagttcgaggagcggatgcttcgatagatatcaaagtctggagaatatgatttagtacataaacaatcgccaaattagtaaaattgaataaaattagacaaaagtcttcttaaatccaacaatctcaata

SEQ ID NO: 164176 - DNA, 855 bp, Cannabis sativa
taatagattgtatgcacaatagtcaaaagttggaaaatttggcagactcttaagccgcccactcaattctgctgtgtgtatttatgatagtatataaagaagggaaagaagcatttatattggagaaagggactgagcactcggctaccggttgttttcttcttggttagcaaaaggcttaccttccctatgctacattgagtgatatctttttattttgagaaatgctaatttgcagtgaaatatgctaaaaagcaatatttgaccactacctagcacatcaacttgagtgatgctaagctatcttgtaatattttcggacccccttcccaagggaaatggttggtgcatctctcttgaggagacgcatttttattgtaaagatattttaaccgtcatcttaaattttgaaggtggttgaagtgaaatatccttctatttttatgggtttgtaactacttttgaactttacgcaatatttgaacaacattggaagaatatcgaatgtgttggtcacagtgaggacactcaggatatggcctaccatttgccctaccttgtcatggtgtgggtactcacctcgggatggtacccttgaggcctctctcttttgctcctcatatagtgtttaatgcttagcagtaggtagtcttcatactaagaagacgtattgcagcaatcatgtgatacctaaactatgagagtgcaatttgaaattcttatagcaataggaatatcatttttttaattaaaaaggtaacatgtaacgtccccgcttcaagtctcaattggacccttacacccacagaataatggctcttatacacgagtacgtcactctggctgcctcatgga

SEQ ID NO: 164177 - DNA, 1621 bp, Cannabis sativa
  modified_base (473)..(474): a, c, t, g, unknown or other
  modified_base (1275)..(1280): a, c, t, g, unknown or other
  modified_base (1588)..(1589): a, c, t, g, unknown or other
gggggtttttgtagtagtgtttcttatagatattttttaaaattatagataaaaatttatttaaaattatttaatatgattttgttgttcaatttgtcagattactagtcatttgtatatactaattttttgtttttgcagtgagtatataatacttttttggcatatgattaatttgaaacatgattctcatgtaggctgtagccaaagaatgtaagatagcaaaaaaatgccaaccacaaccacttaacaatgatgtatgagtgacaatagatgcccctttgtgtggtctcgaacagttggagattgaacaaaggaaaaggtaggtttttgtaaaacctaacttatactaaaagctgtgaaggagaaattttcaaaaaagaaaaaaaaaaaagataaagctgtgaaggagaaaaaaaataaattattatctgcatatataaattataacagattattattattattattannattattattattattatgtgatactgcatattaaatttggaaatagaatctgtgtgctcctaactgctgctcatctataaatgtttgtagaaataaaaacaattatttcgtttgaaaatgaattatgaggtggggaggggaagataataattaagaggttgatattgacaaataacaaccaatactaacagtcgtacaagcattcttagaagtgtgggaagccttgagcaagattaaaaataattttgggaaggaagttgtagttgaaattgataatcttacagtcgtgcaagtattaagaaactctattcctataatttcttaccttaggagtattattttaaattgtaagatattattagttgagttgtgtaataattttgttatttttattaaacgatctgcaaataatattatttatggcttgagtattttatttaattgtttatcatgtaatcagaagttatatatttcttcttattttaattatgtaatctctgtagaatgcctttaataaaaacctaagaatatttttgtttttaattgaaaaaacaaccaatactaacaagcaaagacgtaaagattttaacatgtgtcatgacgactaaccaattttaacatgtgtcatgacgactagccattttttttttattttaattataattttgctgttatttttttttgaatgtttaataacaatttttgccttgatctaatattttattaaaaccatattcagattattatacttccttaaaagttttttcaagttacttctctcctattattattattattatnnnnnntattattattattattatttccacgtactccttaaaattgtcatttacaagaaaatattaaattgccgaccgaactattaaaggtagacaaaatttttttatttttcaaaaataaaaagaattaaaaaaaaaattgtgcaaaaattctccccgtgctgaaatttataagttgtagattaatattaggggcggaagtctatggctaataatattaaacaatatctaaaatactttacttttaattattagcagccaattacatcagcactaataatctatatattaggatgactattcaatggttacanntttattgtaaccatatagttacatttttcttt

SEQ ID NO: 164178 - DNA, 1388 bp, Cannabis sativa
acaggaacaacaaccaattcaataccattttcaagctaaccaaactcaacctgccagtccctctcaattcccgcaacacaacccacaagccaatttcaacttccaaaatgtgccaaatcagcctgggaggactttctcacctcaaagcccacaacctcagtataatcagatctctcaagcccaatatcagcatcagatgcccccatacccatatcagcagcaacccaacccaatgtaccaaaatggggcccatcagcctcaagcctacccacaacacccaccaccaccattccaaaataatatgggcccaggcccaccaacagtgacctctcaacagccacaaccagctagccaaactgctccgtcgccgctgaacttccaccaagtgaacgggggaggaggagcaggttttggtggtgggatacaggaaaattacccaaatggagcggttgctcaactaaatggggcagggaaagggttcccaatgcataatcaattccaaactccacagccttcgtatggacaacaggggggttggagtactggcttgtttgactgcatggatgacccaatgaacggtaccattcttacaaatatttttttgctatatttttttatgtataatatttttccaaaagaataatgtatataaatttatagcataaaagaagtgtattaatacaactctctctttccccccaaaaaaaaaaaaaaaaaatacaactcttatctctttcaagaaaaaaatttcagtccttttttaaagaaatcattttttttttaaaattcttttaaatgtcaaaataaataaaagtagatttaaaaaggtaaattgtaaattttttctaaatttttataatttgtttttctacaagtattatgtatatattttgtaaagaattaacatatattccatctacatgtattttctaaaatatgaaaaactatttttaaaaatgaagttgaattataaacaatacattatgattgtgcatcctatccaattttttttttttttccctcatccaattcaagtaattgaattcggaaaatcatgatccgattcaatctaattagatttcaatatccaatcaaatcaaattactaattggattagatcgaatttttaattggatatctaattacacacttgaattttaatattaacttaaaaataagaagaaaatacgtaaaaactaaatatcacattttatttaagtttagtactccaaaaagataccatcattacaagtgtaatgcaactaaaaatttcaaatagttaaaacaataatattactaagtaataaaaatagaacaaaatattataaaaataaatacaaccaagtgttacaaattcaacacataaaaaatctaataaaaatataatt

SEQ ID NO: 164179 - DNA, 1163 bp, Cannabis sativa
ttttttttttttttgtaatggaaaatagtagttccatatttcagaaaccactatttacaatgaacctaagcaagtgtgtgatttttatgacgtgaggataggcacatatacctacaatggtactttggtttgcacaaataaactaactaaagtttgtgtttagtaatatttttttaatcgatttgctttcttatttagaaaaataaaaatattttctaaaaatatattttataaaattatttttattttttaattttttaattgataattaaaattttgaaaacaaaaaaaggtcactttcaatttttttaaataatttttttttaattaatattttggactccgacccaatctagaccatgggaccttgacctagactcttaccccgacctagacccaaatccagatccaaaccacgaacccaacctcgacctcgacctggaccccaaactcgaactaataactctgacccaaaccctagccccagactcggactgagaccccaatcttggacctggccccggccccgaccccgaccctgaattggaacctggacccaaacgccggaccagaaacccgatcccgacccagatcccaaaccctgaacctgatcctcagacccttgactcggcttgtagactcggacctgaattccgactgaaacttggacccgagaccctgaacccggactagcccccgaacttagacccgagcatgacttaataaagttaaaaaatgaaaataaattttataaaatacacttttgttttctatatttaaaatcgaaaataaaagtgattataaaatacatttttatttttaaaaaataagattttaaaaataaatgtaattaaaaattttaaaaataaaattattatcaaactcaacttaaataaatgagaagactttagttagaaaagaacacaatgtgatggatgaaaaattatttgggaggggggagacacggggtccctgtggtgacatgcatattttggttgagcgtcttttttaactaaacaataatcacatgatataatttgaacggatcagaaaaataatcacatgacatagattggaccacaaactacttttcaaatcttttgtatgcccgtaactaatttaattaattgtgtattaattattatttttactatttttttttt

SEQ ID NO: 164180 - DNA, 755 bp, Cannabis sativa
tttttttttttttttaatttcttgggggtcccagatggatcctcctccgggatagcttccaaggcctctcttgaaataatctctgaaacgacttctggatagcaaccaactgaagtttccctcgaggaactccctcctcagttccgtcagtggtaattccttcaaaaggtattacggcagagttgtttttgatctccaccgtgtgaaggtggaactcttcctcagatccatcactggcgaaagaagaaaagaaaagtaccaaacaattaaatacccactatcacttatcatcgtggttaaatactataaatcaacttggacaatattattttatcatggaacaaagagttacaccttatttagctttcactataatattttattttatattaaataacattattatttttttagcaaacattggaggttgatcatagctatatatgatattgggaacaattgtattcctaaaccgcttaagagactacccccgccaaaaattgtttcaatagtagaaatataggtttagaactttaagctaatttttttaaataatgattactaaatttcagtagcttcactcataataacttcaatagtgcatacaagaatattagctcaaatactattgtatgtgtcacaaagggaccatagatacatagttttcgtgatatccttctatattaaactcttattttagtcataaaacaaaaagtaagtgcatgtatatgttggaagttattttaccaggaact

SEQ ID NO: 164181 - DNA, 2367 bp, Cannabis sativa
gtgaaagtattttagcaattaattcctttaaaactgaaaatttagtaaatttgtagtaaatccgtctcatgtaaaataatttctagctttgtcacaactacttttaaactcatcgttacccatttgatttgattacgttgacgaactcttcttcgtaatcttcccatgtaaaaattcaaaaagcaataaataaatgttcaccttgtcagtttactttttctttttagggctctggtgttggggaaaacatgtataatattgtgtttttggtccttatttatgcactgattgaagttcaagtacaagtcttttgtatgtaaaattaattgttactatataaataaataaacatgattgcatctgttttttcttttataagttgtgtaaaaacatattggctattgtgacattatttttaaattatcttcttgtatatttagtaatttttttttttgaggaaatatttatttaaatgtgttgatctatcaattataaaaaatgacattttttaatatcttcttctctgtgatgaaagatttggaggagcggatgaacaatttagcaattaacccaaaagaagaagacacattcgcagagcgagccgaatcctactacagaaaacagcctcaactgctggccttactccaagacttgtacaacgcttaccttactttgtccgatcgctacacgcaatcatctatctccaaaagccaccaccaccaccgcaggcactcttcctcacaagtttccaccacaattgacaacgaatacttctttgaccaacatgagaattgcggcactaccaccactactatgaccgatcaagaagactattctgacgttgagagctctctttcctatgacaaaaccatgttcggaagctccagtaatagcaatactgcctacaaacatgaggacgaggccattgttgtctccgagcttgtcataaagaacgtggagttggacatattgttggacgagctcggacagtctgagagacggtgcaacgagtcttcgaggaagattgagctccagaagagcctgcttgaggtgctggaatccgagaggctgatattgctgaatgagaatgcaaggttggggtatagagtggctgcattgatggaggagaatagagggttggcttcggaatctatttttgcgaagaggaaggcagcggagctggctagatgcttggtgatgatgagagaggatcaaagggtttctatgctgagtaggaagattgaggatttgcaaggacagatatatgggttggagaagaggaacaaggagtattatgaacagttatcagtatccaagagagattgtcagttggagagtctttgtcaacaagattatgatcaagaagaaagcattgacaagaagaagaagaggaataagaatgaggtttttgttgagggttgttttcaaatgaagagactgaacccaaagctgatgatgatgaagaaaactagagatcaacaaagtggtggtaataaagaaaagaaatggggttggaatttgtggggaaaggttaagagcaaggacatgtttccatgtggggtcaaccctagttctgcttcaggatgatgatgataagcttttgactagttgtgatatcacattatatctttcttggcgatcgtacgtagttatgcatttagattggtagattgaaacatgtcgtatggtcaagttccaaattgctctttacggcatatatataggaagtgcaactacaatcttatatatatgttatgtacctaatcttgaaaccttgcagtaaatataatatatatatatatattttgataagcacttcgaagagcttcttactctataattttaaagtataaataactaattttatttttttatcgttaatttaagtaaaaaatttggtggtataatattttctgttaggcttttgggactataggtacctttctgtcatgtcactatctacttgttacctatttattggtcatgtcatttaatttttaatctaaattaaaatttaaataagtcttttaaaaaatcatttaaatattttaatataaataataattataaaataaatatatttcttttttttttcggatgtgctactttttctcctattatcttcaccaattatttttttcctctctccttcaacctttgtccagaccaaaaggaacattattggttgccggcaagcaaaatgaaagccctcacgagactcatcgcacccataaacccctcgagttgctcctttgggttgagtttgttgaatttttttttacaaaaatcaattcttggatattcatatagggacacaattttgtcccgtaatatactttcacagaatgtattctgtgatacattaga

SEQ ID NO: 164182 - DNA, 565 bp, Cannabis sativa
aaaaaaaaaaaaaaaaagaggctgcttctactgtttggcggttcccacccaaaaaagatcagagtggggtagctattatgggatttggccaagtgcttagcttagcttagcttattagctctaccggtcaaagtatgtaagtgttgtggttttgatttgttaattaagtgtgaaacgaataatgaaaaattaactaagttatatatatggggttttaggaaacttgtttaattattagatttaaaattcattttgggggttctattaaattatactttaaacatcattaattctatttacttattttttcttatttgtaatatatattttgggactaatgaggtgggcaagcaaccaaattcgggaacatgcttgttgaattgtataaaagaaagagaaccaccaaagccaaagattacttttcaaaagacttccagaaaaccaaaaatcaaatcttaagtaattgaacataaaataactttattgatttatttttatattttgaaattgggaaatggcaaaataattccatgttgccttattttttattatttttttaataatt

SEQ ID NO: 164183 - DNA, 1985 bp, Cannabis sativa
tatatatatatatataggttaataggtggggtggtactactcactcatatgtttgtaccgtacaaattaattgtaattagaaaggaggaatatagttgaaaaggttaggaaatggccaagtaaatgctaacatatacttttattattattggaaaggaacgtaaacaaggcaagatcaagcaatgttgcttatatgatcattatttattattagtatagctatagtctatagagagggaccaaccttaaatctatccaataaattgtgagacatacagtactatttgccgacaaattaattgaaagaatttgtacattattcttttaacagggtcattatagtaacagggaagacaaagtagacttaaagttggggcactaagactgagtagccgatttatacatatatatgaatcatacaccttgggacctaactataactaaaagccaagaatgtagtcagactttacaactttgacaaaattatatttatatactgattttaattaaaatatataaaaaaaataaggaacataatgatgccataatattttagctatagtttactaaaaaagaaaaaaaaaattgttaaaatatattatcaatgtcgaatatcatctttagtatcatatcattattgatgtaattaagtatcaaatcttatataattttaaaaaataaaatataaaaaaaatattgctaactaatcatagagtatcacctacaaaatatattatgcactactaatatctattagtaatattatttacaaaagtatatttatagtgccattttaatttgacaaaagttgtagtggtgactcagtttgtttattttttttaaaaaaaaaaaaatagttgtgctataactatatttactaaattgcaaaaaattaatttttaaaaaaatttataaagaaactacacttaaaaacttgaaaactaaagctgataaaacttaaattttaaaaagggttgttatggttatggactttgattaaaaaattctaaaaaaaaattatttgtactaaaatatatttacttatttaaaaataaaagtatttaaaataaattatattataataagtcaataacatttaaatctttgatttttttattttatttaaaaaaatatttatatttattggatatataatttcttatgttatcaaaccacataaattagataaattagatgttttctattttttttataacagattagggtttcttttatacttatattttttttttcttaaatgtgacaaaaaataatttgaaaatacaaatgcataaaaatttatattttggaagaaaaactaataaataatgatacaaaaataaaaattctataatttttatatatttgtaattgtaataaattaatttataatataattatcattataaatagaatcttaacaattcacaacaaatatataatttatcaaatatttagtgcaatttctctttacagttcatgttgcatctacttttttctcacagtacaattacaactaattttttataatataactgtcccaaactagtcctagcaagtctaaaactcaaattccctagaaagaaagataaagaagattaagaagaagaagaaagtaagataaaactaaataacatcatcgactttggtaaggtaaaagaaaagtcaattgagattgagtttgagtattgacatatataactatgtacaaattgacatgatgacatgtaaaattttgtttaattattgttaggatattaatttaagtcccatataagaagagtaggcaaaagttatcttatatatgctctactaattctcttagtatgtagatttttaggaaagtgctcaaaaatattatattaatgtgagaattaaagtgaggtagcggcccaatatagtagaaaaacaggacccaacaagtgatatttatagggaaacttacaaaaatactgtaattgggattaacttttacaaaaatactg

SEQ ID NO: 164184 - DNA, 2853 bp, Cannabis sativa
atgttaaataaagtctctaaagtaaactaaaatatttttatcaagaatgatttgagaaaatggtttattttatagagttgttatcatcattcaatttactatctctaatagaatcgcttctaggtcatataaaagtaacttatcccaaaattattttattacaatatgaagtttattaattacgactactacatcaagattttactattgtattttacatggaacaagcagccaatgcaaattccagcacattaagtaaacaccatctacataccaatattccaatgtttacaaaagtacctcattttccataatataacaagaaacacaaaacactagaatttcataccacactcagccttatccataagcccaacaccaaaactaggcccaggcatgtcattgagccaatgcaaatcctcaaattggcaacgaggcctatctatgggccactccacattaacaggccttagggatttatggacccaaaaaggagttccatcttcataagaattatgagtcaatctccttaaatcagaaccgtccaatttaacagtgaatatctcaccgtagggttggtagtgatgtgtgttcgagattggctcagctgatatacccgcgtagtctgttgtaaaaactatgctcttcccatcagggctgaactccgggtggttaacccgaccacccgacccgcttttaatcaactttctcaacccggttccattcgggtggatcaaatacagctcgaagctaccgccaccgggattatgccgatccgaagcgaacgcgatcaactccccatctggagaccaactgcacatggtgtcactccatggaccctccgttaacctttggagcccacccttctctccatcctcagcgtccattatgtataggttcttgtaaccagttttacctgaccggaatacaatacgtttcccgtcaggcgacggtgaagggaaagcgttgtttaaaccgtttgttgtcagtttctttacgattacatgatctgggttctcgatgtttatggatattatatcgacctctgcacttaccggggcaaattctggtccggcaccggtgtatatgactccgttacgaactgggtcccagacggtcgagaaagcatttccgttatagacttttctccggtttgaaccgtctaggttcacggcgtatacgcctgggaattcaacgaaagcgattacgtcatttttcggtgagactgaagggaaggagccgtcgattctgaagagagagatgtcggagacggggctgtgaacgttttcgaggaatagtttggagttttttcttccgtttccgtctcccctgcacttgtggtacccgacccgggtcgaatcgggcgagatgaacgggtttagatggtgagactgcggcgagaccaaccgagtcagctccttgaactcgttcttcttcaggtcatatagctctatatggcgaaaactcgaagtgggtcttcttgtagcaacggctatgaagttcttgttccccggtgaagtagctggtgtgaacgcgtggagaccaggtggggtgactcgctcaatcaccaccgagtcaacagaaatcttaccgttgcttggtaaaatagctctgtaaatactccaccactgatcttcacctcttcggtgaaagtataaagtcgattcatctacccaacttggccatccaccgtgttcaacaatcttgactcgttgagttccatcccgagtcaagaaaatataaatatccgtactaagctcctcaacttcaccatcccatccctttgctccgtacgaagccaccgccgtcctaatcccggaaggtgacacggcggggctaaaatcagcaacaccatagggggttaacctccgagtcacgcctgatttcaattcagttgagtacactgcagcccaactcgttctgggctcacctgtgttctcatgagttgatacataaatcacatgattacctatcaaattaggcttatctttcatagaaatcttgtcactaaccagctttttacccaagataggaacttgaacacgatcgaaaacttcgagggccgaccttcttcttctggcgttttcagaattaggatcatcagaaattacaacatcgtagtaaagattcgacaccccatctcgctccgtgacataaacgacctgcaaaggaggtgggtcgaccccaaaaatggtctgtaccagagtttggttgggtaagagagatagaagcgaggcagtcgaggaaggagaaggaaagtgaccgttgaaattaacggattctccatcagtgatctgaatttcgtcgaacaaggtcggtgggtggtgctcctcgttaatcgggaggctgaaaatatcaaaggcgtagtctaatcggccgagggtagtgaagatgatgctgctcccagcaccaccgtgttcggccttagcacagagaagtgccaccagaaaatggaagagaagaagattggatttcattttggtggagagtgagtgtggagttgagtgaagtgagggagccagccaactcacgggttaactaaaacaaaggataaggggccgacctccaccaacaaacacgttggagtatttgattggttggtagttatgggtgggaccactttcttatatgtgaggctggtggtcagtttatatcctcggatagacttgagcttttgctacgagtcttttttttttttttaataaaaaaaaataaaataaaactatatatatatatatatggtgttaatattttttaagagttaggccggtatttttgtaacttttagataaatatggcaaatctaagggatatcttttttttttttgagaaatttcactgatattataaatt

SEQ ID NO: 164185 - DNA, 2114 bp, Cannabis sativa
ggggaggggggaatatcgaccatttgctcgatttttatcggaccaaggtattcactttcaacacccgtgtcctcgaacaagtgagcaaaatggacgggctgaacgtaaacataggcacatcacagaaaccggtttaactttcttagctcatgccggtcttggaatggaatattggtggcacgcaatggcatctgctatcttcaccatcaacagacttcccacactagttttaaaatacagcagcccctatgaatgtctatttggtaaggctcctgactacaacatcctgaagccatttggctgtagttgttatcctcatttacgtacgtacaatgctcacaaacttgagcaaagatttgaagaatgcatatttctggggtattcaactcaacacaaaggttatatttgtgagcatcctaatggcaaggtcttcatctctcgacatgttgtcttcaatgaggtgcatttccctgttgtacaatcggctacaacccaacaccaggtacctcactctagtccttttccctcttccacttttcaaacttttgaccataatactagacctggaactaatactattaatgtacctgtgacaatgactacacctcccataccttctgagtcatgtcctgtcaacaaccccactatctccccacctaacccgacaccattaaatcctatagcacaatcacctacccttgatatacctccacctgactctacacaaaataactaattaatccatcctcccaatatcccatctcctacaaatgaccctgtacctacctcagaaccaaacttacctcccctcttacctacagcccttaatattgcaggtcacaatacctctgggaggactcatgctatgcgtaccagatcactcaatggtatattcaaaccgaaagctcacttggccactaaatatccactcaatgaagctttaatcccttctgaaccagctttcacgactgctgctcttcaacatcctcagtggttaaagtctatgcaacatgaagttactgcccttaaaaatgctggtacttggtccttagtcccttactctcttggtatggtagttattggaaataaatggttacataaagttaagctaaatgccgatggaaagggatatctccaaacgccatggattgactatgaagagacattctcacccgtggttaagccaactacagtccgaattgttcttagcatggctgtgtctttaaattggctggttaaacaattagacatcagcaatgcgtttctgaatggcagcctcaaagaagttgtgtacatgcaacaatccgagggatttgtggatgaatcaaaacctcatcatgtttgtcaactacataaggctctctatggccttaaacaagctccaagagcttggaatcagaccttgaaagatactttgcttgaatggggattctcagcctctaaatccgatacatctttatacacctatggtactggtaacaacttgctcatcttattggtctatgttgatgatttccttgtcacaggtcctaacactatgctcatcaacaagttcatctcagatcttcataagtctttttctttaaaagacttgagaccggttcattacttcctatgtgttgaaatacaccgaaatgctagtggcatgtacctctcccaaacaaaatacattacggatttgcttgtcaaactccatatggaaggtgcaaaaccaagtccaaatccctccagctcaagtgttaaactatctctcaaagaaggagaaccctttgctgatataactctgtatagaagcacattgggtgctctacaatacctcaccttgactagacctgatgtggcttttataataaataagctaagccaattcattcatgctcccacttctactcactgggaggcatgcaaaaagcttatgagatatctcaagggaaccatttcttatggtcttcacatcacccgtgcctcttctttaacacttgagggttactctgatgctgactaggcatcgtgcttagatgatagaaagagtactgggggctatgcaatattttttggaggaaacttggtctcttggtctgccaagaaacaaaatgtggttgctcgatctagtt

SEQ ID NO: 164186 - DNA, 1916 bp, Cannabis sativa
acaaggctatccatctccaccataatgttagagaagtttgagttctttatccaactaagaacctctttcactccaagagcctcggcaaaaccttgatccacacaccgatgccatgaacccgatctagtttgaaggacatagcctttagcatctcgaaggacccaaccgaaaccaaacctgtgtttgtcacgaaaagttgtagcgtcaacattaatcttgtaataatcaacatgaggagcgcaccattgctcaccccttcttcaacctcaaccgagtaagaaaggggtgaaaagtttttctcttgagcaaataaccactgttcaagattatttcttgctaaagccacaacgttcttcaccgaaccagatttttcattccaaactttattattactatcttgccaaatagcccaacaaagcatggcacccatttgcttttctctgctgttccagcgttggaactgttgctgaaaccagtcaccaaaggacagaggtctgatgctgtccttaaacagaccagagaaccgccaacacgcagcagcaaaattgcagccaacaaacaatgcagtggacgatggattctgcttctcgattgcatctgggacaagacgagtcaatgtggacatgttgatggataagttgcacccgagtgggaaggcaattagacaatgttctccataacatttccttcactttcgggggtatctttaagctccaaacatctcgccaaggacccaaactgctagaggaaacaggagcagacttttcctgaattaaagtgtatgccgacttcactgagtagctaccagaatttccttgctccaataccatgtatctacaaagttggaaggagaaataggaatagagagtatcaaatccttaactctattattaaacaagtcagtgataacctcaatatcccaatttttaccatccataatcaataagcacttaacatctttgtcacaaaaggaaggatggaatgatgtgatgaaaggattttcaatgtctggaagcaacggatctcaattccgcattcacaaaggagcctcgtggaaagtatttggctttgaaaagtttgccaacaagagagtttggacgagtataaagcatccaagcttttttgccaaggagagcaatattaaagtcatgtaaatgccaaaaacccatacctccctaatctttagatgcacacattcggtcccaactcatcagtggatgccagatttctgcttagacgatgccttccaccaaaatttgcacattattcactctaagtcttcacaaataccttttgggattaagaacacactcatagcatagtttggaagggattgatctacagactttataagaacctctttccctgcacgagaaaaaaacttgctatcccaactctctactctctttctcattttatctttgagaaaacccaacacaacatttatatatatatatatattttcgaaaataagcgtattcatatattaatcaaataaacagttagacctcgtggtcattacaaaatagattctccggtaaagaggagatcagaatagagcagtacaattggtgggtaaaagcccacttagccacattatgggcaacattgttacaagtcctactaatattagaaaaattacaactaataaaataatgagatgacttcatacaaaaagagacatagttctcaagagcccaatggagcaccttttcattgagcgcattgatagcgatcatcgagtcactctccacaataacatacttataccataaatctatagccaacgaaatagccaagcagcaagccgcaacttctccacataaagcatccggaaaatccaaccgggtcgtgtgaatctgaaccaccctgcccagatgatttcttgctacaacagctgtgcacatactctctaa

SEQ ID NO: 164187 - DNA, 2605 bp, Cannabis sativa
ctggggcaggggcaggggtcgaggttggggtccaggtcctggtctggggttcggggttggggttcgggctagggtcgaggttcgagtctgaggtccaagttcgagtctagcatcgtggtctcagtctgagccgggattgggattcgggtctagggtccaagtgtcaaggtctaaattagggtcgaagtctaaaatattaattgataaaaaaaagaacttgtttgaaaaaattttgaaagtgacatttttcttattttcaaaaattttaaaattttgattcccaattaaaatattaatgaaagtaccttgagagatgacttcaatggtaaagtcatgaagcctgtgttggttttgaagcaatgagatataaaaaagacatttcagaaaaactacaatcaaggataaaatagttgagagctgaattggagaaatgcgaaaagaaatttgagatgtttgagaaggagacatatgagagcttaaatgaaaacacaaatgaatttattaaggaagctctataactattataaatagatgcttcacactgtctttttatacttaattgtgtgtttgtgtgtaataacagaagctcttccttcttctgatgacattgaattatatatgtacaatatatatttgtagtgttaattaatgaaaagcatgaatatagtcatgaaagtgaaagttcttgtaaacaaagtgattcagccattttgaggctgcaaagcaaagtattgagagtgagaccattgtggctctcaaagcaactgatgcagtggctagcttattggtcacacccagaagaccaatcaaaacaagagaggtgatactgagcacaactttaaccacattcagagctttgtatgctgcactgcaactggggcaattcaccacatgggaccagtacctattcaaaatcaaaacgtttgaatatagccaatatagcctgaatttcaacactcgatcggtcctactatactctatgagcttaaattgttacctgtccataagctgttctctggaaggagatggaggaagtgcaccactgaatttgcctctccaatcaacttgaccgccgccatacttgtttaaccaatttctgaaaccaaccacaagagcatctgattttgttggcacataacatgctcggctccattcacccgaagcatgctctaatatccttcgctcctgtatttattaagcaattaaacacttgttgtgtatgtgaggcttaatcagtagcgaattgagagaaataaagtcacctcaacatggagaatgtataaatctgaatccaaaatcaagttctgtccaatatggaatatccatcttggaaaaatcttatctaaccaatgactgaaattccttgggatagcccatatcaatctacttttgcctggactaactggaacccccatgaaaactaatcccattttcctttcctaccaaaataaagaaactttagatcaatcaaacaatataagcacaacataccataatgtttatgtgattacctttttgggtgtagctttgttacttttatctggtaaaacagcagcatgaccataaaatatacatggtgctatgaattcactattaccagcccaatcttgctttgcgaaaaaaccatttttgtccaacttattcactctcatgtcaagaggtctgcctccctctctatccatcttctctgtcaaaaccaaagtatgaaacacgaaattaaagaaaaaaaaaattacaacaaaacatttgatgttcttatttactttcgggctgtcgagttgcaagaattccatagtgtgcatatggaacatgtgaagggtccataaggttctccagcaagatttcatatctgaaaatgcaaagtagaaatcaatggaaaaggaagataattcttcaatcatagttgtaagagtgtttatttgcatacccgaaaggaaaatctctatttcccattgaggatatatatgatggatcattgagttctggaatatatgggggacttttctttacaagaatatctttgtattgaggatcagtgttaggccaaaaccagaggatatcattcatcactgtacttggataggcagctacacatgctttcttggatgtttgaatctgcataatagattccaacaatgctaattacagctatagagaaacacttcattccagctttaatagacaatttctctctcaattatcaacaaaggatttgtagtcatcagagggagaaaagttattaacttttggctttattcttgtttggaatttggttaattagctccaaattccaatacattaatggaacagaaatctaatgatttaaaaaggtaattcctatttgccagtgtcctaatcaggtaaatggtataacagtctctttcttatgattagaaatttcttgttttgaagagagaaacaacttgaaaaagtagacaaaatcattagcaaactcagcatatcaagaaatttgatcatgtaaagagttagtaccggagggccacctgggggtgcttgagggatgaacttgcaatcaccagagccattaaagcaccaaccatggtagacacactgcaatctcccccattgatcaatccttccttct

SEQ ID NO: 164188 - DNA, 1542 bp, Cannabis sativa
  modified_base (1497)..(1501): a, c, t, g, unknown or other
ttactggcaaagttgttttgggaaattctccaaaagaaagacaagctatgggtcagagcccttagcgcaaaatactgctctaatttggatgcttggtcggtggaaaaacatgattcagactcgaaattttggaagaacttactgcaagctagggaacgatgtgtgactgatgcttgtttcgtagttgctaatggtgagattgacctttggacaaagccatggatcccttggaaaacaatacaacaactgaaagatggattttactgtaaccgtacatgccttcaacaaggtgagaaacctattcaatgatggaacttgaacttggaatgagtccctgatacgggcatgttttgaccaagaaattgctgaatcaatccttcgcatcaagctgctatcagaaggagaagacattttattctggaaaccggagaaattaggacacttttctgtgaaaagtgcgtattggctacaccaagagaaaagattctcagcccctacacctatctggaaaaaaactttggaaacagaagatgcatccaagattaactttgtttatgtggaaaatcttgaccgactgtctactgacccttgcaaaattgagctttctcaatctttctgatagatcgtgcgtcttctgtggtgaatttgaagatacttatcacctggttgctaaatgtagcataaccagaggtttatggttcaaaagcatctggggtctgaggctagactccttccattggagaaatgtgatggactttggtgcctagtggactgaattgggagatatggacctcaaaatcttcgctgtctgcatctatgaagtcctttggttctggcgcaatactatcagaaacaacaacaaacagtggagtatagaggagattttcaaagattgtactaaacgtgcagtcgagttctctactactccttctgacgtggaggaaaatgacaaggaacctatgattatgaacccctccacaggcacaattgattatcatgtgttccaggtagatgcttcggttgcagacggctttgctggaatagcagcagtctacaaaggagatttaaatgacacagaagactttcttgccgttgatcacttgagagtggaaaatgtcttacagggggagcttgctacaatctctctgactctatcaactgcaaaacaacttggtctggaccgtgtggctatccaatcagattgcaagactgcggttacaagtctaaactcaaactcaatgtcgatccaatggcattcctatcctatgtttttcgaatgtttgttgaaaaagaaacaatttacagatgttatgtttatttctatcagtaggtctttcaatatttttgcggactctcttgctaactgggcccgagttcaaaggaaacagttacaaggatctttaagggaagtggcccccttttgtggtcactagttttcttctttgtcttaatgcatcttaattatcaaaaaaaaaattaaatacaagaaaaatacannnnntttatctagaaataatatctaaaaactaagagtgtttttct

SEQ ID NO: 164189 - DNA, 2390 bp, Cannabis sativa
gcttgaatcgtccgacaatgccttccaagcccatttcataagaaaggcttggttagtagcctccgtggttctgaagccgagacctccgtgagattttggtttgcaaagggtctcccaagcaacacaatgaaggactcgcttttcttcggtatcgccccaccagaaatctcgaagggctttgtcaattttgtttgccgtggtggatgggataacatctgaggatgcaacgtaattggatagagtggagcctactgatttgatgaggcaagctctacctgcgctagacagaagcttggccttccaacccttaattcgctgtagaacccgatccaccaagtggttataattacttgttcttcttgaagtattgaacaaaggcaatcctaagtaagttgttttgtcagtcatttgcttcatgcccaagatttctgtgatggtttggatgcgcccccgagggactccgcaagagaagtgaaccgaagacttgtgcaggttgatcgattgtccagaccattcacaataagtggccaagcactccttgaaggctttagcttccttgatagaagcttgcccaaaaagcataatgtcatcggaaaacataaggtgatggatagtcgttccttgtctacccacctttattcctttaattaagcctttcttttctttgtccaacaggaggcgggtaagtgtttcagctgaacagagacggggagagaggatctccttgtcggagacctcgttccggtttgactttgccagctatggaaccattaagaaggaccttaatttcatgcaccgaaatgcaggctcggatccatccgaggaatggattggtgaatcccatatttgagagaacgagcataatgaagtcccagtccattttgtcataggctttctctaaatctaacttgattatcatacaacctcggttaccttttctcttcttcattgaatggactatttctctagcaatcatggagttttcagcaatgtttctgcctctgatgaaagccgcttggttgggggctacaattcttggaataatgtggcgaagtctcgaggcaaggattttcgatatgatcttgtaggagactttacaaagagcgattggtcgataatctttggtggaagttggagcttcgttcttcggaattaggacaagggaggtatcattaatgtatcctggcagttccaagtgtgtgaagaaatggatcaccatttcaaaaacatcctccctaaccgtattccaatgatgcgagtaaaaactcgggggaagcccgtccggccccggggccttatcctttcccattgctgagatcgctgcagtgatttcttcggggttgggtatggagttgaagaacaggttgtccgcatcattgagatcttgtgtagggaatacttcattaagacaaggcatccgggcagggacttgcttcgagaaaaggtctttatagtagtttatgaagcaattagcaatttcagattggtcccttatccatccaccatcattcgggttcctgagacattgaatatagtttctacttcttctgacaatggtagatgccatgaagaacttggagcacatgtctccctcggagagccattgaactcgggatttttggcgccaatggatttcatctctgagtagcgcttcagttaagttcttctttgcggtgtcaatgagggatgtatggtcaggaaacttggtctccaaatccttgagctcgcgagttgctttgtcgatttgctgttttacgtctttgaattgggttttgttccattgcttcagctttcgaccagtattcttggtcttacggtggaaattgatcattgggttggaatgtaatcttttcttccaagcttccttgacaacccagaaacatcgagggtcccgagcccacatgttttcatacttgaataaacgccctttgcacatgactccgccgttggtatcgaggatgatgggtctgtggtctgagacagaggaggatagatgtttaactatagcagcagggaataggatacgccagacagaggaggatagatgtataaaattttaattatatacaagcttgtaagaatatatacattatattttaataatcacatgatttaaaattaacggttaaaaaagtttctcctaccggtaagaaatttatgctaagtcccactatagttttgcctatatatatagagcaagactatagtaggactcaacaaaagttctccactggtaggatactttttcaaccatcgattttaaatcgtgtgattattattgtttaatatatatatttttatcatacacttaatgtatacaataaaaattttatactttttataataatatttatttttaaaaataaaaaatattattacttaaaaacaaa

SEQ ID NO: 164190 - DNA, 1345 bp, Cannabis sativa
  modified_base (1273)..(1276): a, c, t, g, unknown or other
catactattttattttggaaaaaagtagtgagaaggaaattattatactaattttcgtttttttacatgtgttttcatgtttcaaattgtttacaaaaataatgttttctatataaccttatagaaaataatatatatcattttctaaactttctcatctcatttatttttcaattaagatttctcatctcatgtttaatatctttatttatgcttttttttttttttatctccctcaaaatgattatttagatatatgtgagaactatctgctttaatactatccaaattcaaaacaaacattagttgtttacaataccaataataaattagttagagagtactctcatcgatttctatttttaatcttctaaagctatagtactcaatcaaaaggttatcgagtctataacttaaaaacaaacaagttaataatcagtcgaaacgtaaaatttgacaaaaatgttgcatacaacagagagacacaagaagttgaatgaaaaacagtcattattcctctacagccaagataagaaactaatcaaaatgaagttccaactcagccaaccacaaaggaaccgacacaagtcatagaattcctgccagactcaccaataaggcgaacaagactgcttgctgagatctatgagacatgcaacctagtgcttatggagctaaagagttttgaaatggctcaaaagcaagaagtatggagaaaagtcatgaatgaagagataaagatgattgaaaagaatgagacttgagagcttgtagattgaccacaagacaaagacactataagagttaagtgtgtctacaagataaagctaaacgcagatggctctatccaaaagtacagagcaaggttagttgcgaaaggatactcacaacaataaggagtcgactacaacgaaacatttggtccagttgctcaccttcgacacaacaagggcattgatatagctccagccacataaaaaaaaatagaagaatttttaactcgatgttaagtcggcatttcttaatggctacctcgaagaaaaaatatatgtggaataacctaaacgattcgtggtgcaatgacaagaatataaagttctcaagttgaaaaaggccttgtatggcttaaagcaagctccgcgagcctggtacattagaatcgacctctacttcactgaacaaggattcagtatgagcaaaaatgagccaacacactatatcagaacttaagctacgaatgatacactgattgtctctttatacgttgatgatnnnntctacacatgcaataatgagaagatgataaagaagtttaaagaagacatgatgaaaaattttgagatga

SEQ ID NO: 164191 - DNA, 990 bp, Cannabis sativa
tggacacaattgaatagtattagcgagtctcacctaaataatatgtgaaaacttaatataatattttataaaatagactaacctcatacacctcactccattctaccctcgaaatcaaatattttagtagtttaaatttcttaccaaaatatttcttgtatatgcattgggtaattagagcagaaccatggaagccgtcgttgtgctcgcatagaaattctttcggcgtttgttgataaagataatgagccatttgaatttggccataaataacagctagcacaactggactatagctcataatttgtttctcatccatatcatcatcactttcacttccaataatttttttcctcttaaatctacttatttctttagggtgactttcaatcttgactattttagagcaaaatgtaagtaagtccttttgtttattaaccaaacattgtgcaatttcaatgtttccaatctcaacagctgcatgaagaactgttaaatcatctttccttttgattttgagttcttcatcactcattatatttaccaattctttcacaatatgtaattgtccagcactgattgctacatggagagcattctttcccgaacccggcattgtcactttcatcgcattgttcttctccttcatgttttctttaatgaactcttcaaccttgttccatttaccagcaatcacatcgttgaagaatggcctatacttaagttgctcatcatcgtctcttccactactactactatactcactatcacttgtacctagtgagggttaccaacatataaaagacataaaagaatcaatcaaatacgatcaattaattgtctctttaagaaatactagttagtaattaatttttttacaataattagcatctagactttttacactactaaattgtgtgcttcataaattatgctgcttatcgaaatataatttttacattaacatgatttatccatcacattctattt

SEQ ID NO: 164192 - DNA, 1542 bp, Cannabis sativa
cactctattctctctctcgcctgcgccattctcaaaccagcaccacaacggagcactggtatgagaatactcattgcaaggtatcgtcgtcgtcttcttcttgttcttcttcttcttcttcttcgtcatcgtcgtcgtcgtcgatggaacatctcctttcgccgctatcgtcttcttcttgttcttcaacctcatttatttacttcttcttctttgcagatttggtctgtgcgagtgtaagaacttgttcgtgtgcgttcggacctcactggtgtttctgtatgtctttttcttctcactcacttgcattttattttttcttgctactgatttttttacgctcatttggtattggttcaaaattttgcttcagcgttatggcttaattgttaggcatttggactttgattgtgggaaaatgcaataagatttcaaaaaattcagtaaaacgttatggcttgatctttagacacatggtcccaccacgttagaagtttgtcccctacgtcagacatgttagtgcgcacactaccaaaaggagcatactttttgtccaacgccatatcctctaatatatattgtacatgatgtttgcgcatgacacctgtcactatcaaaatgattcccacacgtacaaacgaccattatctcataaagtggccattacctaaccgacccaaagtcaatataaattgtattctgtcctatcagtgggcttagtttacacatttaaaccctaacgggtttatccataaatctgattcaagcctgtaaatagggcattgcccacaaagggttcgaaaatcatttcacaattcaaaggctaaaaagtagggttgaactttggcaaagaacactcttgtgtaataatactctaaagcttttcaaacttaataatactgactcgtggactcaggctcattaacacctgatcaaccacgtaaaaatttttgttgcattatcttcaatttgttcttctttaaacttaatttatttgttaattggttttcgaaaattttttgtaaacaaaataaaattaatacatatattttaaattaaaatacttggcacgataaagtagtcctattaactccttggttgtgcctaaaaataaaactggttagggatttatggtttgaagttgggcacgacactctagcttctagaatgccatattattgtgctaaaagaaatacattctggcatgccgtcaatttttatatctattaacctttttttggcacgacaaaataagcatgatctgtcgtggtgccaactgtttcttgggcacgaaatttttttcttgtagtgccagttttcactaataaatcgagaattttgtaaaagttttaatctaaatataacttactctagattaagatttcatcttcaatttttctttcttttccgagtgaggaaaattccaatcaatatatagatatatattatagggatataattttgtcccgttattgtactttcacgaattgtaatccgtgatgtacgacagccgtcagatgagggagttatttgatctgacgg

SEQ ID NO: 164193 - DNA, 1084 bp, Cannabis sativa
  modified_base (1047)..(1050): a, c, t, g, unknown or other
ttgttaagtttggattcgatttccattttgatatgaggggttttttttttttttttttcaaacgtgtagctagtatacactataatgatgtatatgtggtcactagtgtttgtgacctggctcatatacatccttacgagacaataaattattattttcgaaatcatgagatttatataatttccttatcgtaaattattggagacttaattattatgcacacattaaagaaaaagaaaaaaaaagtcctattaacacacactgatgtcattattcagaactctttgcccccaccatcaaaaccccctttttgacctcagaacttctttatttattgatctccttttcaggggtcacgccctaacaataaaaactaaaaagcaaacgaaaaagaaaggcaagaaagataacaataatgtgtttataattaagtttattttgtttctatctagctatctatagctttgttaagatattattataatatttttattattatcatgcaagcaatggggttccgatagttttttaaaaaaaagtattaagtggtactttaaaatgccaaatatgttattattaatgtaacttaatattaaattttacatattttaatttacatttaacattaaattatatatattttaattaaataaataatataaaaaaccactaaaaaaaaatattataatactctatatttgtatgatattagacacaaattacaccgcaatttaagaaaagtactatgcgtgttgggttgataactagtgataatgatcaagctatatatgcacacatatatatagctctagagccaataatagcgaggcaacaaagtgaatcacaaagcagtcatagaaaattacagtaccactggcatgcatatacattatctaaatatataagtatatttagcttttaaagcatgattttgatgagttcagttgtttattgaattattatttaattattatattatatacatatatagaaaactttttaacgtgtgtattaacatgaatgattactaaataaatttaactatannnnttaattttaaaaatatcaaactatcgaattttga

SEQ ID NO: 164194 - DNA, 2798 bp, Cannabis sativa
  modified_base (2756)..(2763): a, c, t, g, unknown or other
tataattttttgaactcaaaacctgcgaacccaaaactcgatcaactcacctgatgttaaaccatattattaaccctaataaatattattacttattgattattcctttgctctcttaaagtacttttttttcttaataattttttcttttacttcaaaataaataatcatttttattgaaatgatatttccatatttttaaaatacaacttaataaatagaatgaaatttttcttctttccattctattaattactccaaccaaacgcaatcttaattccattaagggaatttttcataaatataagataaaaaatttaagtatatttttatatgacataaaataaataatacaaaaatgtacggagttaaaaagtaaataaagtttaaaatatgagaaaccaaagaaaatatcataaataaagttgataaaatttttaataacaaatattgttagaaaactcgttgaacagacgcaggctccagaaaattcaccgaattctcgccaaaaaaactatcaaaaaagttactggagttgtcatcatcgttggaaaagttattgtcgtttcatttgtcaccgaagttagatatttctaacataaattaaaataaaattagtttcacaacaaaataagtaaaaacaaataacacataataactcaaaaaccggttataattaaaaaacaaagagaaaatcagttcttaaaactctaaaacataaccggttatctacccacctataccacaacaaatattgcattttcagtgtttaaatgatgcaacagagccatcatacctgctccactttttttcttcttcgttgtccagaatgtggctctcaggatatatctttttatacagactatcaattatatctgcaaagataaaagaaaaataaactagactgaacaatttccacactaatgataggaatttttcacacaagtactattatttttctaaagcataaaaaaaaaagaaaaattgaagacaaggattccgtatatagtatcttgattataaaaagacataattgttctaataaaaaacagtactataagaatccagcaacgaaaaccaaattgcaaatacagacatgaaaagaactgaaaagaaaacgaataggaagaagtgaaatccaaaagcgaactcagtgattcgatagtagcagtgaagaggaatccgattatcgacctctacttttcgagctagagttgacgttgatcttcatcatcttctcccacagtgaatgacagagctctgatggatttcctagcaaagtgatcaaaatatcgttaaaggatctaaggcaaaatcaaatttttcggcctttattataatttaactattatcaaaatgataattctaatgggttagtgtaatgataattatactgttttaatgtaattcttcgtaactatacattaaatatttaaaaaaaaaaaacagaaaagtaaaggttgtaattgatcctttaatctcttatttagagtaagacaatttatcactacaccaaataatttttgttatattttctttttattaaatattttatttatatattatttttttttcttcacaattttgagactctaagcgttcggagaatcgagacacacgcctagctcgcctacccttaagattggctctgagtgtatgtcaaaggaaacgagattgggacagagcttggtcgacagtcagatgatggtaggtgctaaccggcgatgagacagatggttgaaggcaatataattttgggtttatagtccaaaatataagaatgttaaaatatattataaaaatgtgacagaaataaaaccacaaaaaaataaatatagttaaaagttcataatctaaataaattaaaaaaatatgtcataaatttataaaccattaacattttaccattgtgtgtaatttttactttctttaatttaagtttttataacatgctcattattttcttgtttgacccttttaatcttctgaggtacaaaaagtagtttccaattttccatattgattccaaattccctaacattgtctaaattaagaaagaattcacatttttagaaaaattattaacacaaaatctccaaataaatttttgttttatatatttgaccacaaatagtaataagaagttgcactttcgttcacatttatcactcttgtttgtttttctttattttataaagaaaacattacacaatctccatctccacttccctcttccaattttatttattcttcctattccattgtttttgtaccaatcattgatcattatttcttctaaattttcattaaaaaaaataaagtatgaaggtagaaagatttaaatattatgtgtactctgttttctttataaaataaataaaaacaagaaaaaaaaaattaaaaaaaacaagaagaagatgaaaagacaatacttagtattaacagagaagtaaacttagttaaacatgatctcattaaattaaatgatgtgtcaattatgcattcaaaaaaaataatgtgtcaattattaattggttgggacagagttaagataaaaaaaaaaggagacaacagatttttattcattcatgatatttaaaaatataaagatttttttttcatatatggaaacaaaatttaattaggattgagtttcacaaaaaaagataaataaattaaaaggttcaattatcttgagattatttcgatgacgttttctgaataataagtgaatctattagttttttttttttttnnnnnnnnttttttctcgtttttgtgtttattttttttttttt

SEQ ID NO: 164195 - DNA, 1246 bp, Cannabis sativa
atttatattctacacgatccatggctgcctttgggaagttttagtattcttaatcgggttgcccctggtctagacaatgccatggttagtagcttgtttgaagtcagaagaagaacttgggatgtagagttggtcacaaatttattccctccttatgaagcggatgttataattggtattcttcttagttcttctactattgtagattcttggtattggattcatgagaagagcggtcattatattgtacgtagtgtgtatcaaaggctacaattccaaaaaaaggcatatccaatggatgccaattttggtttttagaaatcgttatggcagcttaaagaaacactgaaggttatggagtttgtgtagaggttggtggttggttgccttccatcgagggtgagtataagtacaaaacatgtcccttttcaagtagtttgtccaatttatgagatgtttgcgaaatctaacgttcattgtcctatctcttgtgatttttcttgggagtgttggaaaagggtaggtgtggagagggtaggaagggatgtaaggtcggttcggggttggttggaagtggtagtaaattttttttatggggataagatgagtcgtgtgcttgtggtgtgttaacaatctggacggtgcgaaatgagcgaattcggtgaaataaaaagcgaacaatagaagatgtggttgcatatgctgttaaaaattcttgatcaatggttgaaagcggaaggaagaggaaacattcctctactgtgtccttcacctgaagaggatggaaaagagctctggtctaaacccatttcaagcattaagattaacgtagatggaactttatttgatggggaagggaggtacggagtttgatttgttgtccatgatgtattggattgtttagttgcaactcatttgaggtgtttttatgggaaagtcactccgaaagtagctgagatggtggacctcaaagaactgttgagttagctgaaaacatatcctagtacgcttgtaacaccctaaataattaggcacgctacccaagatacttatgaaaccctaatcccctaaacgagattactaaaaaaataagcgcagaaattaaatttttattaataaacggaaagaaaataacttgtaataatttgaaccttataatttaaaagttacaaaagttgggatcccaaaagtaattacaaaacactattacaagttcgtttcctctagtcgacctaagcggcaaaat

SEQ ID NO: 164196 - DNA, 996 bp, Cannabis sativa
ttagcatacaatcacaatgtatttatactgtacacccgcaaacgtgacaacccgggttcgggtttgggccccagtttagtagacaatgggcccacatgaagcccacttgttgttaccggtcaccttcaacccattagtctgtcaccatcggaaccgttttccaatgcaaagaaacgtcccctgtttcttctacgtcattcatttccgatcttatataacctgcggtgcaggttagctaagctcagtctgaaaaggaaagttgagttgtgaccaaaacgacggcgtctttagcggctgacgtagtctttttcttgcgccacgtatcccggatcgtgtctgctttcgaacctcctaaatatttgattatgttattcgaggacttgtttgtcattaggttctaatatttaattaatgaattaattaacatcttttattagtgtaataatttgtttcttttcagctgattaatttgcgtttttatattcgattaattaattaacaagtcatttaatttagggtaaaagacaacaaaattactcgaaatattcttgttgattgttcgatccgcttaatcttttacataatgtttttgtatatgatcaaattgtattattctgtttcattccttattttattgtatatttaaaaaaaaaaaaaaacatttatatgaaaaagaaagtacaattttcttgtcatgacatggatcaatagtaactgtaaacatttgccttggacccttttccagtactcctttttccttttccagtgtatttttttagatcccatgttgtttatattatttacttgttataaatggttgtatatatattacactgctttgactgtttcacatcctatacctaataaaaggaccatgtaattgaaaataatttgactttgaaagagtaaattttttttagcgtagggaaatagtattttataattgggtaattagtaatttttctccttaaactttgacacgtagtaaatcgtgtc

SEQ ID NO: 164197 - DNA, 2865 bp, Cannabis sativa
caattgcagcaactgtaggctaaggaaaaaaaagaaacagaaaatatacttcaactgatagtaataccagagatatgtttcgccacattttgaattaacctcctcaaaaaaagtaaaaaattataaagctaataggaagaaaacttcagttgattctacatatatacagtttcataatacaaaaatagtgtgcatataaaacctttatgggcttacctgtaatccagcacaacctactattcctgtaaccactgtgactgcatctgggtgccgggcaacctaaacacagaaatattaatgttcaacttttctgatggaaaggaattaataataaaaaaattttagaagaagagatatattttatcatcagacagtaagttaaagacaaggtcacctcaattactccttgttccccaggaataatttcgggcatttcttccacatcagctaaggcctctttcagttcaccaattaatgattcatttctaatagcaactatttgaggcttgaatctcttcacctgtcaaaatgataaaactaatgtatgaatggaaagcttttgaacttttaaacctttatataaaaacgatcatagttatgatctgtgattttataaagtgaactagttcaggttaacagaatacctggtctgcaagaagtgtcacattcgaaccagctgcaagtcccactattctgaatttatctggattctctgccacaatgtccagtgtctgaaaatcaacatactctagttacaagggaagtatgaagagagaataataagaaggcaagaaaccatgtattgttatttttttttcatgagtgtagcgtaatggtattacaatcaactaataacttaagggtcttgggttcgaacccatgccctctctctttatcccatccctccctcaccactaagctagccttaaaatagctagctctgactgaagtcgagatcttagtttccaaagttacagaaacctggctaagaaaagttgtttcatttgtcgcttacaaagtatttacacaagtaactctgtaatatgattgggggaaggaaatgacccacctttttatttacaacttgaaaatctttacaaattgttttggtgattactttttcaacatagacaaaattctctctttttctttccttaatcttttggttttattttgtacctgagttcctatagagccagtagagccaataatagatataggctttgggacattccaattacaaagatcttgctctggaatagctcttcctggccaagctggaggaggttgctgcaacgaacaatgaactcttcttctaagtggtactctgcaatcctttctatgcaaagtaattccacctaaagaaaacgaataaaacaatatcataaactcaagctttcacagtctcaatacacagatctctgggagcagcataaacaaaaagtgacaatcttaaggtatcaaatacatcagaacaccataaataataccctcattggagttgaaacccaaaattatgctggtaataatcaattagttataggcatcttccataagcattttatgaatgactctcaattacgtgtttaaagcaacataagaattaaaatctatactaaacacagtataatttgttaggacaagaattctttagcataagcaagaagtgatatctctaaactaacaaaaacacaaaagttgacctttttactatttctcagtcatatttcaaaagacattaacaaaaccactcaacccaattgagctgagctcataacttaaagcttccccactaaaaaaactcctttgattttatgtaatctccctcccactttctgggtaaccaaacggagaatatcaagattggaagtaaaacctggacacagcttagggaagcgggtggacttggtggagtccaaaaaggatagagccttcacttcagctggggataacaagttcagagccattcaaactgtacccgtcaaaagatttctcctttttaaccgttttggttctcacagagaaaactgaaaatacccaacttttatttcaatctggggtgtctttgaattgcacaaagacttgattatgttctttaagttatctttttatacccaaaaagggaaaatatctctaacaacctattttattggtgctctgtgtgggtttgaaacggtggaattctggcaaaataatgtatggcgggggctacactgtcattaacgacgaaaccgaagagatgacaggcctcgaaactaacaaacccataatacaatggttttcaatacgacatgtcgtttatgttgtttattttggaaaaaaatatgtaattttgttgtgttgagaatcatggggttccaccaatgagtggagtagcccatgtgactcaattctctaccatttattctatgtggaaaaatgttcacaacatgttgtcatcacaacatctttaatggagaactataaatatggtatattgtcatttttttaaaacattttgttaaattttaactccaataataatataaattataaaagatagcatcacgtaaattttagcccacaataaatattacattttctaattacctttttaccatatattaatactatccattaattttcaaattttatttataagatattaaaataatataaataaaattaattatttatatatttttaatgaatattaatcataatattatattttatatagctaatttctatcttgtgcattggagcacaaatatgataattagaccaaatataattttatagtatattttaaagggattatttcacaaaaacataaaaataacaaaaaaattacaaatatacggttttacggaattttaaatattt

SEQ ID NO: 164198 - DNA, 1568 bp, Cannabis sativa
  modified_base (1504)..(1530): a, c, t, g, unknown or other
tgaccaacatgaactttgtgcatcctgacaatcgagatttagatgattttattttcattcatattgatgattaaggaactagtgataatgatgataaaattaatgtaacctttaaagatgatgatgatgatgacgacgacttgtagactttaaaatattgtaatatcttaacccaccattaattatatcaaatacatatttttttgttagttaattgattataattgtaattacttattttattattaaatatatgtttcttctatgtgtagaatgtatggcgcgtatgcaagaagcaataagaaaaaaggagtttgagtagcgcataaggggaaaaatattgaagatgcacttgcccagatgcatgtgcggtagaaattaaaatttcgatggcttatggagaatggggtccaaatagatgactatggaaataagtttaaaaatatggtcaaactctttgttcgcaacaccattcccatgaataagttaacttggaagatcgttgatatagcagacattcagactatcttggacagactagcgataacatttaatttttattgtaatacttcaaaaaaaattattgtacaaataaaaatatatagcactttaatatttatcttttctgtagtataaatttgaatccccactttacaatcctaaattcgtggactacactttgttagcaatgtctaaagggctacgcgactggtgatcggacgcaaaaatgcgtggaaggataatattgccaaactgggagagacagaggcgaataggagacctccaaagggggtgacataggaggtgtgagcagagccaagaaaaatgcaaaaaaattgaaataatatgaagattccaggtggatagggctccaaggccattgttgggcacattgtcaacaaggtatattattataaatattattttctccaaattgatataagttctaaataatatattactaatttaagttttttaaacaaaaaaaataggttgatcctatgacaggagaactttccactgtcgtggataattttgagaagttccaccataagaacaatatttggcacaatgaatacacgcaaaaattgtaagtaattttatatctttaattttatcgttctatatttaatttctattcaattttaacagtttattaatattttttgtaggcccgaatggttgagagatgcaaaatgaaacctctgtcgagtaatttttgttgtcaatacgacgtagatctcacttagtttcctgtaaatctgtctattacgacataggtgttagtgagcagtcacgccacttaagaggcattggccctttgcctagacttagggcaagggccaaaaaagtaattcccagggcaggtcgctccggaaaggttacagtcagatcccaagaagagtaggaagaacataataattatcaacaataaatgatgcagactcagaatcagtatttaaatacattgttggattgtgtgttaccaggatctagatttacnnnnnnnnnnnnnnnnnnnnnnnnnnnatatgaatttttaaaacaatgtaatttaaacacatata

SEQ ID NO: 164199 - DNA, 1245 bp, Cannabis sativa
catgtagctttcgtcatatctattatagcaatgagttgctgaatgcccatatttaccacagacttgacatgttggtttagaattttcgcctccacttctgcctcgaccacgaccattatagttgcctctgttactaggtgtgaagcctcttctaccatagttttgattcgagttgtatcctctgccacgaccattgttcctgctgccttgattctgtttatgagactaaatgggcagatggtggagtagagcttgaagacccttgtgtttttacagatccaattcctccaagcctctcaagtttgctgtcaaaacttaggagggtttcctgaagttcctgccatgttactggtgtaagattgtttttagcttcaatcaatgcaacaattgtgatgtattcgacatcaagtccactaagaacatttgacactagatgtgattcagggtaaggatccccagccaaagctaactgatctgaccatgatctcttttgtctgagataatcggccattgtagttgacccctttcgtgtggtttgaagcatagttcgaagatcatccatctttgcctgtgaatgagctccataaagattctcaagcgatgtccacagtgatcttgctgaagtgcatcccatgacttcagtagctatggcctttgtcattgagccatagatccatcccatgagcagttgatcacaaacaacccattgctcatagtctgggtttgttcgaacaccaaaaccaggttggccatctcctgttgcaactcctgctggattgaactctgctggagcattcctcataccatttatgaagccatctaacctgtggcctctgattattgtggaaaccatagttttccacaagacatagttattacgatcaagttttaatgcaaagggctgggatagagtgttactgattggtgcacttgtgaaaccactagatccattttgaaacccagaaaagtgaggtccattaaggtctagtggggagctggtttgatgcaaatcttgtctaccatttgttccctaatttccagcattagctggtacctgctgctccctctctacaactccaaaagtaggtaaggtttttgaatagtgactggtcccgtcggacatgactgcgtgagcaatttgaggctctgaaaccaagtaaagatggtgacctttttactagaaaggtgaaaactcagctcaaagaatgctgaggtactattactcattaaatagccaatattctg

SEQ ID NO: 164200 - DNA, 1015 bp, Cannabis sativa
  modified_base (835)..(838): a, c, t, g, unknown or other
atctaacttgacatttcttcaaatattgtttccacttcccaaccttcttctacttctgattcttctcctccatctcagagtattagatcgtttattcacgtagtttcaatctcgttcctcaaagtaatcattaccgtctaaaaattctcttgatcctttggtcttaatttttttagttttcccacataggtcgtaactattgaaactagatccaccaccttcataagttgtgactggttcttgagtggagcttcttctcattattagcaagcatgttaaacttcgatccaaaatgaatctttaggctccaatcatcagccccataaagtttcatcccaaaacttccacaaagggaagtttttaactactctcttctatttttggaatatgtgttcaataagcaaaaattgaactaggtttcgaattttaaattagcatcccatactgtttaaacaatcctagaaggctcataatcctccggcagccccggtcacttccgatgaactcccaatattcataggctgataattgggacatcaatcaatctcgatacccacacccgcctgtttagtcattaattgcccttcgtggccatcttcttcggcaatcaaagtcacttccaatgaactccagtcatcaataggtgtttgccatacctcctcttttccccccggttcgttcaaaacaaccgtttgtgcctctattacaatccccgtcctcaacatctcttctaccattttctcttctcctaagtctttaacttatctcttctttttttttttttttgaaaaagagaagagaccctccccgttatatattaaaagcctcgcttgtnnnngaggaaaaccatggttacagttaataacaaaacagaaattctagggcaagagcactctccccctctgccccagaagaggaaaaaaactaaacaaaaccacctactgcccctatacaattttttccattctctacataaatctagaaaagatagatcctcaaaatatttggttctaaa

SEQ ID NO: 164201 - DNA, 1276 bp, Cannabis sativa
tgggggggggggatctttaatatctagacagttttctaccaacttttaaagcatgagggagtggaagaagagggagaaggtgagtaggaagaggacttagccaggtgaaaatacctgaggaatgatgcccccaaatgagactatcagcagaaaaaagatcaattaagacttgaaggatagcatccacaacatctggaggaaagaaaagattaagtttagtgatatcccaacatccactctcattaataaaaaaaaagacacaataagggcatgagagggaagaccattcagaaaattgaaggatttcaaatgagggatcaatttgaattgactgcaaaaacagatttaccattgcccacttttcaaaaaaggcccttgagaagcagatcccttccccaaagaagactcctccaagtggccaaggagtagcggccttttgaagcagcgaggaagtcatttcgtttcaagtattcagtctttaaagtatagacaagggagaagagggattggacataactctttaagcctattttgcaagcatggcttgattatgatggtgaataaatctaaaccccagacccccaaagaacttaaaatcacaaaactttaaccacccttccaatgaatttttcctttcttgttagctgcccccaccagaagctagccataaggctctcaagacttttacaagtggccacaagtagtttgaaacatgacatggcatatgaaggaacatcctgaaccacaatcttaattagggtttctttaccagttttaaagaaaaatttgccattccactaaccccagttttcttcttctccttctctaatgtgttataatgctaacaattagtatacacaaacttatttataatcattagatttatcatctaaggctgcattcctatggtagagacaaagcaataatttctaccatagacatattctatatataaatacacatgatcacaaattcatctattttatcttttgaaaataatatatgaagaagatggtattaaaagatcaaatcagggaacaatacctcttaaatcttatcaagtgttatatatcaatcggcggagcaaagccggtaagactccgacttgactcgccaaagcaggacattggagcaaaactatatctttcgagccacgagtgatttaactattgggctacttagggggcgtttggtatgagatgttcaaaataatttgattatagggaatattatgaaggagaatatgattataggaaaatgtgtaaactgtgtttgg

SEQ ID NO: 164202 - DNA, 1208 bp, Cannabis sativa
ttaactaaatttcttagtgttgtttccacactataagccttagccatcatgggagagataccaaagggatacgcaataaagtacaagtccatcaaaacaagcatgtctctaaaaaaatgatcagaagtacgatgggtacaaaggtccaagtagtggagacatccctattgtcccactcggggtacaaactaacactcgacaaccacttctccactatctgtttgacacactgatcttcatggtacaaaaggaattttgtacacatacttttggaaccacttgaatttgagaaccattagagctcaactataaaagctttatttgaatacttgtaagggggttggaaaattattacttctataagagagcatagatattcaatacaacattatatttatccattgatgttctgagtttctcttaagcttttcatttttatccttttgcatttgattttctaactaaagtttagttgacaagttcttaccgtcaacagtttccaatagtcattttttagttttttgttctaattcacctttttaaaaagggtaattagtggcaaaaattccttattttttaatttttatacacttgacccttaaatttttttagtagtaatactattcccttaagtttatatttatttgtaaacttgaggtgccaattaaattttattgttaaatgtcaaataagattgtcactgtgagcaccatatacacttgatactaaaactttgaatctaataaaaacaagtcacatgtacatatctatacatagtgacaatccaactagtaattacggtgaaatttaactagcgcctcaaatttgctaagagtaataaacttaaaagatattgtgactaaaaaataaaatcaaaaaattaagtggataaaattaaaagataaaaaaatttagccatgaattatcttttaaaaattataagaaccaatcagcttaattttttttttccgatagaatctcgttcggaatgacaaaacagaaaattaggtttttggataaaacaaaaatttgtatgtataataatttgccacgttcaaatgtgcgttctgttttgtgtaatggatacatgacaaagggaaagcaaaagtttggtagatagatagatagatctctgttaataatgaccggtcacctatcacttattgacgtctggccattatttttaatgttatataaatatggttgat

SEQ ID NO: 164203 - DNA, 594 bp, Cannabis sativa
tgctagttagggtgttacagctgcgaaccttaatagtaactaggcaccttaatttggaggacccccccaaaaataaaaatcccaatttgggagttcaaattaacaataatataccagcagttgtgagagagtttgaccatctcggagataaaacatcaaacccaactaatgataaaggaaaagtcatagcaggtgatcccaaaagaagggccattcctgcaaggcctacacaagcaaatcccaaaagaaggcccattcctgcaaggcctacacaagacaatcccaacctttggaaaggaagggctgaccaaaccctagggctaggtcacctgaacaatccacaaaggaggatcccacatggcaataaaacctgtgcttaggcacggtggcttaacgcccagggaaggaggactcacccaaacacttatgttaaatagtgagaatatattgaggatttagcttttgaagaaagctgtaatgacctcatattagaatatagattagtaaaggcaattatcattaattattgataattttataattatttatgattttattatgttgtgggtctctgtaatatcccgaaaaatatat

SEQ ID NO: 164204 - DNA, 584 bp, Cannabis sativa
ggtaaaataatttccaacaccccagctgtctgtccctttccaaccacgcagagactcatcctattacagccacgcaaaggacccgtcccaaccgttcaagcccgttcctccgtcgccgtcgagtcagatcctctgcccactgccagtccaggtcattcctccacccacgcgaaagtattattctaaaaaaagtttgttagttaaatttttcagtctttcgtggttgatttagaatgactgttcaatgtttgtgttaatttacatttaattttgatagatttttttaaaattttttgtcagttttgaatggtgattataatattttttgatccggtggtgttggtcgggaaaaatgaaaacgatatatgttctcgattatttatcgataaattctcgataggttatcgatgttttggtgagggtcattaaatttagatattatcaatgtgttatcattatcgacatgtttttcatggttgaaacattgaaaaagaaaattgtaatctccttttttatattaattcttgtttgaatgtcgattgattatcaatgagttgtcaataagatttagcttttggtgatag

SEQ ID NO: 164205 - DNA, 1387 bp, Cannabis sativa
  modified_base (1344)..(1361): a, c, t, g, unknown or other
gggcatgttgtcccgatgatcgaaaatcaatagctggatattgtgtgtagtttggggagacattagtagcttggtcatctaagaaacaaacagtggtggctcgatcaagtatggagtccgagtatagagccttggctcaagtcacagccgaagttgcatggattgaatctttattaaaggagattcactttgtcttaccatctgttccagttgtctggtgtgacaacatgagtgcaaacgcactagctactaatccagtctaccacgcaaggacgaagcacattgaacttgatgttcatttcatccgagacaaggtgctgcagaagaagatcgaaatcagacatattgcgtccaaagatcagatagcagattgtctaacaaaagtgctcactcatccaaaattcaaagaattgacagacaaacttggtgtgacaagctcccccctgcgtttgaggggtggtgttaagaaatcattagcagagtaatacaggggattagccttaactgtgttgttagctatagaaggtcattagaagtttcctcattctgttattctcttttgtcctatctttgacctcttgtactctgacagctgtccttgtaaccgttacaatcattgtgtactgattgcctataaatgagagaatcccctgccagcaatgattgagttgagcatttacttttcacctacaatcttatcttggtatcagagcattcattggcccgcgccatgtctgtagtcagccaaactccacacggaggtaatcaagatgatggagatggtgcagaccagccgactcctgtacgactcagctcccctcaggtctttaatggaggttctcaacaaagcacttacactggatctggaggattaaacaactcaccatttggtaatactctcactcaacccttttctatcaaacttgacagaaacaattttactctttggagaaatcttgtctctactataatcaggggccaccgtctcgaaggttacatcaatggcacgagaatctgcccacctaaacttataccagctccaggtgcaacaatcgaaggtatatcagatccaacactcatggtaaatcctgagtttgagagatggatagtttgtgaccaactcttaatgggttggctctatggttccatgactgaagccatagctacagaggtaatgggatgtacctcagcaagaagtttatggacagctctcgaaagtctctatggggcacactctcgcgcgaaaatggatgatacacgaacaaagattcagacaatacgcaaaggaagcaccaccatggctgagtatctcagacagaaaagtgttgggttttatgctctaannnnnnnnnnnnnnnnnntaatcagatttgcttattaatataga

SEQ ID NO: 164206 - DNA, 863 bp, Cannabis sativa
aacttattaatgcttaatattatgcttttctttaagagttaataatactaacttaccaactatatagtgacaaaacaatcaaagattattatcttatgataatcttctatatactacaaaagaataaaaaaaaatagctatctgatctcatacatttttttatgtctaaatatttatcacttttagtaaaaaaaaacaatattttgtgattaagtaatattatacaaattgtcactgttaatgttgttttagtcacaacaatattaattattgtgatgaaacatgtttagtcatatggaaaaatgtaatttttttgggctaatacttctaggatctactgatttttagtaatatataatataaaaataaagatgaattaatttaatcataatttattttacttttaattataaattttgttagaactaaatatatatatgtatatatatatatatatcttttctctaattttttttttttttgaaaattcaacaatgtattacttcaaaaactatccatgtacaaaataacagcacctaataaagacctaaatatttgctatacaagtattcttctaatcttacaaatcattaaacaatctctaatcattattaatcgaatatatattgcaaatttaaggaaaataatgacccaaaaaaatataatttattttaaggggatttttttcatttttaaattttaaaacagtttttttttttttgtaattttacgaaattttatataaaaacatctattgcaactaacggagcaacctaaatcgcaatcgaaaatagtatagcacctacatagaaactactgaagaaaccaatttaaaaactcaaaccgtaaatttttttttaaaa

SEQ ID NO: 164207 - DNA, 763 bp, Cannabis sativa
aatatgtgtaagtatatttcactttttattattcttctctcttcactttttttttttctctcctaatattatatatttcagtaaattaattgtaggtatttttttttaaatagatgaatctataatacgaataaaattagagaattttctatttaacagatcaattaagtataactctttagatatttatttatttttatttaaacttggtttaaaatatcacacgttgcattctctatctcgctccctcaatctctctcagacctataggttgcgggacttgcgcagaagctcaacgaaacggtagcttgcgcgcacttgagttgtttaatctgaagtgttcaaacatttagttacaaacaatatgtaaatatatatatgtatatataccatatgagttctttcgttttgtttattatttttttctcattgaatttgaagttatatttgataaaagaaaatttagaaaatgatttgtctattatctatgaataaatagttatgaaaatactccaaaaacaactttggatgaaaaaaagtgaaaaagtttgtttgggtgagattggatttggaactgataatggtaaagaaagataattcaggaagacatgtatcataatgaattttaaacatctatttttatccatttatatatatagggtgactattcaatggttacatttttattgttatggttacatttttttttaacctgtaatagcaggttattaataggtagactttctttttttagatttaatta

SEQ ID NO: 164208 - DNA, 1020 bp, Cannabis sativa
  modified_base (966)..(992): a, c, t, g, unknown or other
aaagatattttttttttatttgaactcttaagatgagtaagtacaccttaagcgctggtttagtccgccttaacctaaaaccgactttggctaagcaccacgaataccttttaatatttctaacaaaaaaaaaaatatcaactaaaaattgtgagtgtcaatgtcattgtccatgaaaagatgtaaggtatatatacataaataaaaataggtatagtagagtccatttaaaagggtccacaactaattaaaagaactttattataagagaaccctactctattatctcatttccatttttagataaggacttgtttggttttggtttgaataattggggcttttgaaatggttaagtcattttcaccaatataactggcttgcaagtaagggtgttgggttggggtccaatccaatccaatttttcaaggttaagactatatacacaaattttgaactaatgcccttctcaattattgatattctttaatgatttttttatttatttatttattttggggaatattgtttttttatttttattttcaaagatctaattttgatgcccattttagtcttggataatgtcttaaaatccaatacccacttactactatattatctccataaaagctgtattttttcttagttggtatttggtactttgaggatttttatgttcggttggtggcatttaattccttgcttatccaaaaattaaaaataaagaacaaaaatagcataaaatgttataggtacaacatagttttaatagataattttaatcttaatttttttaatatgatagtatagaaatttagtataatttataatatagaaacaaatttaagtaactaattttataagtatataaaataaaatagacaagtatgattttttgttaagggaaacataatgttattaggagaattactttatatgttgtttttttaatttttttttttnnnnnnnnnnnnnnnnnnnnnnnnnnngttgcagcgctagttgcaatataaattt

SEQ ID NO: 164209 - DNA, 1804 bp, Cannabis sativa
ccaaaagaaaaacctaaatacaaatattaatatatacatatccatttcatgttaatttctaataaatattactgaatttccattatcatcaaatcaaaatgtagtgaacatttctcttatcatcaagtaactcttaaagggaagagaaagaacaaacaatggcctccaataataaaacaatacggagcacatcgaatacagaagaaagaaaaaacagatttgacaattatcaggtcttagtatattcatcacaaatcacagtttaattgatacagacataaaatagagcaacacgagttcaatgtcttgaaggtaagaagtaaaagctaatatctatatatactcgcgatacaatgatagctaccttcaaccactcttccacacaaaggcttatgcatgtttaactgttttgtgtgtactccacttccagacgaacaattcctgcaagtaccaaaactgattttgatttccataaaaataaggcaataaatcttatttctgtccttagttaaatcgaagaaacatactgaaaaagggggatgacagtttgacactcactaacatgtagccttatttacataaactagcgaaggtggggaacttgctcagaatgcttccccagacatggtaaagtcatcaaaactccaaagatccattgtgttcccgccgtcctgagttgtgtcaccagcgagtaaagattcaaaagaagtagcatcccagtttccatcaagatacggcatctgaaagtacttcatctgagactcaaagctggaaagctcctcagaaagtgtctttgaattgttttcttcagcttgagggaccacattctctgagtcacttttcagcttcttcatcgggttagcatcctctagaaacagggagtcatcactttctaaagtggccgaaagaacagaggagatttctggagtctttgagccacgttctccccaaccaaagtcagagcactcaaaggaattgctaccctgatcagagctaaaatacaagggtgtggtagacgtagctggagtgggtttaagcccaacctcttgatttgcaggaagagactccacataatcatagtgattggtaagtggtttctcttcaagaaaccccattgcactgtagtaatcctgatctgagttatgcccaagatcaaaacttgcgttcatattcgactcgaacgactgaacagcgttagcctttggtagtgatctcttaagattatccttagctgaacgtttaggggaagcacgaggagtttcatccgggaaattaaccttagctttactgccacggattcttcgagcttcagcatcgtaagctcttgcagcttcttcagcagtgttgaaagttccgagccaaacacggacccctttccttgggtctctgatttccgcagcccacttaccccatggacgctgacgaattccacgatattggttcttcctctttctcttagcagatttttcagctagcccatcagattcggtatatttcaccgttgtggaaccttcaatcacacacgaagaaaacgcatcaaacaacaaacttaatagttttggggctcgaatgctcacggaacctaccagaaatattttttctagagtttccgatctttcaaagtaaaattaaaatctttgaactcaaccaaaatatttgatatatcactgaataataattaacaaaaaatctatctctacataaatttcttttccattttttgtcaaaggatcgttgaaagagaaatgtaaatgtaacgactgttgatctatgtcatgtacataaaagtttttacctttttttt

SEQ ID NO: 164210 - DNA, 595 bp, Cannabis sativa
ttttttttgtttatatatatataattttatgagaatttggtagatttcaattttttagcaaatgcaaaataaattagggagcacaatatcttatatgtcaaaataaatttagtacgtgttaaaatttaataacaaaatttaatatataaatatcatgttaagtttgcgttagtaaaatttaatagaattgtatagaagtctttaaattcagcaatcttaataattcaagaaaattcaacaacttaaaaaattcataagatacaatttactacatgttaaaatttaaggaaaaaaatcataattaattttaattttgacgcaccaatcaaataatggggcaaaacataaataaattaattatatttaggataatgatattattacaaagtcaaatttgaactcaaaatagctaattagtacaccaagttagtcgacgtagcttacaaggtgtttttcctttgcccttatcattaggtaaatattattaattattattatacattggtctttattatattactagcaaaaattacgtgcgaggcacgtatattaaactttatgctagttttttctatgttatttgaaagtgatacaa

SEQ ID NO: 164211 - DNA, 1900 bp, Cannabis sativa
tttttaaggcattccatggtagaatttttttataattttttggcttgttctttgagatttggaagaaaaactcatctcttcttttcctctaattctctttagccaaagaagtaattttggctatccttccatccctttttatcctacactctccatatccttatatttttccttagttttcgtctcaataatgaactatatatgtagttttcattcaaaaagtaaattaaaaatgaaaaaaaagaaagaagaaaaaaacatgtgggttgacctaccacaaacgtgagaaatcatcaaaagtagatcgcatcaaatgttgattaaataagattataagagtagaaagtataatatatttatgatatatttatatgaaataaaaaggggggaaagaaagaaaacatgtttctgaaaccaagcatgtgcaattaaaatagaaaaaaaaaataatcttaaatttgaaaagagttgcagtattcctatactattattactttattatatttagtgatcatacaaatcaaattatagtgtccatttctaggcattacagactccatatatcttttctcttctaataatgcactttaattaatgtaaaggatcccattccatatcaccaccattattaagatctcaatcaataaatgtacggaaaaataattgtgatgtgattaatattttttttttctaaaaaaaatgttatgtgattgttaaatttagtaaaataaatatagagaaaatactataattttgtgcgcctctcatatattttaggagaattgttgtggatatgcaatatttttttattttgtttagttttacttttttatattttcttttatttttatgttagttgtttgcatttcgattttatgttgtttctattttataaaaattatttttatttctaaacaatgttatttttatttttaaaattaaataaaaaaaattaattataaaagtataagtgataaaactccatttatactatattttattaaataataatttagatatattgtgtgtttgtaggagtgattatccaattccaattgatactttcagacctttgaacaatatattagtgttagttatattgaaaattagcattttaacaatttcagagtgctagacactatggtatcttttaaccattctcattgaaaatatgtgaccaaaattgaatataagatatctaataagataaattttgttccttagtaccttatatatgcttcttatatataaatattagtacgatgaatcttattatttagaatgtgagactcttaaataaagttaatagaggtgagaaagttggatgaatggcattggtaatggtagggatctaaaagggtataacttaagaatgtgctatttttcatatttgggtagttaagtttacatgaagatatttttttaagagtgaacggagttaacgaggggagctaggtttgtttaaaaaggtgggatttaatgataattgggtgaacttaaacaagccagctttttcatccttgacttcttccacctcacctcgaccaacaccccaccccacacccacactccttctttctctctttctttattattatttattccatctatttctctttcatatattcacatgcaacatcaaaacaacactacttcaaaaaattaaaaaatttcagatttcggagcccacagtatatccaaaagatatttcaactctttataataataaataaataattttttaactttttttttttatattttgataaaattttaggctaattagtaatttttccttcgaaactttgacatataccaaattatatcccctaaatctttttgtctgtttaaaattcccctgaactatagagattgataaatttaaagactttggtctaat

SEQ ID NO: 164212 - DNA, 1260 bp, Cannabis sativa
tcgacttcgttttagcattttcctaacagacattgtttcaattggtctcttaggaatgaaatttggtgagatattttcttgaccaagagaggcagtgacataaggattagtggtggtataggctggtgtggatgggacaggagagtgaagttgggtggtgacttgtggagatgattgagtgtagtgtgtaggtggataggtagcaaagacatttttggaactaggatgtggaagggagttgtagtctatatcatgcatatatatattggataggtttgctgtgatatgagaggtgttggtagtgggagtggaagtcattatgagaagtcatgtttgtgtagagaaaagagttgtttggttggttgagtgattggtttgggtggagatcgttaaagcagtagaggcaaaggatgaagggagggtagaaaaagatgtgtgagggtaggaggggcctgatttggagatgaatggaatgtatttgtgttggtgtgggggatgtcgtttgctgcagtaacgtggagtcccgtaagagatgaatttagcgtgatgtttgttggtgattgcatggttcagtcatggtagaaagtgggagggtgttgacttgtgtttcgtgaaagaggtggggctgaagactccccatgaagaaggattcttggttgaggctgaccatgagtaagagtagtaggtagtgaggaagaaattgagtttctagccaatctagtgagtagtggccaagcattggcttttgaaaaatctgtacgatatctgtcatagccactagttggaagttttgaaccttttatccatggtccatattgaaaaatcatcgtcattaccgctgcccattcgttccatgaacgccacacatcgttcaaaaggatggccaagacaatcacattcaaagcaaaatacaggcagtcgctcatatcgaaaatcaacccaaaatgcatcctttatttttaggagtttgatcatttggcccctcatgagtggcttagtaactaggtgtttaactcggatccgcaaaaaaggaccccagccttcattggtagaatcgtcatgaactttcaaaaattctccaataatatttcctaatgcttcattaagaaaccttgatttacttagggaaggtaatcgatatatttgcacccaaaaaggagtataaaccagattttcctttgtgacattttgcagagcatctggcgccaaaaggatgattaagtggttttgaaaataccatggttctttgttaagaacccg

SEQ ID NO: 164213 - DNA, 1404 bp, Cannabis sativa
aaggaaggagatgagagtgagtgagtgattgattgatgtctgttctgtatagaaatgaaactttgtattgctcccaaaagtagtttgattttatatttttttttatactcattttttgaaaatacatatgtcctacatttaaaagagacaaaaccaccactaactattcatgaaaaggttaaacaaaataatttctttatttatttatttttcttcaataaacatgcatataataacataccttcactacataagatcttgtttggaatgatggaagaaacaaaaacacaactataccggatgtgggtaaaagcctattttaccatattatgggctacaaaattgcatgttcgtataacaaaagaaacattacaactagtaaaataacaagaatgtctattacaaaaagcataatagttcttaattttccaacaagaatccaatttattgagcttattgataatgttgaagttcctaggtatgaaagaaaaactaacaaagtaggacagagaaaaggaaaagaagaaaaactaacaaagtagcataagagtcttattcattaatgatgtgtgttatagcttatatagtagatcattacaagtgattcaataatagaatccataacacacaaaataggagctaatagacacgtgctaactaactctatcaacctctaactatattagttgtcttcaacaccttccctcaaactcataattgaacgatcttcaattttgagtttgtgtctgaactcaacaaacctttgactcgatatagctttagttaatccatcagccaactatttatagacagagaggtgtttaatttgaacagttttattaagcacattttctttgatgaagtatagatcgagctcaatatgttttgttttttggtgaagcataagattctgtgtgagtattcggtacttagatgatcacaccatatagtaggaggttgagagagttgtatttaaagttcagagaacatatactgcagccaagtcaattcagctgtaacactgacaacaattctgtatttagcttcaaatcttgatccagagatggtctgttgatttttacttttacaagcaatcggattcgagctaagaaagatagcaaagcctgtaattgaccttctatcatctggatttgaggcccaatctacatcacagtaggatacaagatcaagagtgcctggtttttgtagatgcaatccatactctaatgcaccactaatgtagcgaagtattcatttaatagctgacaaatgtgtagacaaaaggtttttgcataaattgccaaaccttatttacactaaaggaaagttcaggcagtgtgatggtcagatattgcaaggctctgttacgaaaatttataatcactacgcaagtatacgcaatca

SEQ ID NO: 164214 - DNA, 1247 bp, Cannabis sativa
gcgttgaccgacgtgaatagtacacaggttataggacccgtctgtttaaaaacgacactaataatatctaattagcggcgtttattaaatgaggctaaaaataaaactgacgtaaaaagttattttcttaaaaaaaaaaacttgctttcatttagcgttgtttatcaacattcgattattgtttttctcgaggatttaaaattgacgcaaaaagcatttctaagaaatataaacaaagctaatttaataaacccccacgctactgttcatacacatcgaaaacccactcttctaatgctctggcgaaaccacccttatcccttcccgatcgttctcttcgaatccggctagtgctctctgaaaaccaacctctatcctctcggtcgtcctctccaaaactagcctctcgtcccttccgattgtccccttcgaaatcagccactcgaacccttcgaatccagccacacgaacccctcaaatccagccacacaattttttaggtgtactggttagcttcatagttgaaccccttcctcccttccgatcattctatacttgtatgtgctttatatttgggctcctagggtttctgcaccagaggcagacgcagaggaggaggaggaggcagcgccaccagtatcaacatctcgacagccattgtctcatgtaagttcggttgttacacttgtgttttggaatttcttagttgtttttttttgttctctttttcgaattagatgggattctcaggttttccaagacttttagacctagtcgatcggttaatttttttttttcaaacagatatttgaaatgcattgatagaatatatgtatatggttgcttgattttttcttttcttttttgacagcatttttatgatgtttgtagtgtgagtgagtgtatatgtatgtgtgtgtgattgtatatatgtggctatttgaatattttctgggtttatgatgtttgaataaatgtgtgattcttctattacggcagctgcataattttggggagcttcatcaatttgttctatatttaaagttgtgagatcaaattagtatttttaactatttgagagagcaaaatggtcctgagtgcagtgaaagtttagagtgaatgacatataattagaaaaaaatagtgtctcagctaaaattttaagaaaagtattagatgtgaaaaatttaggtttcaattttccttgaaatatttcatggaaatatggtttaggcttttaaggagtc

SEQ ID NO: 164215 - DNA, 1441 bp, Cannabis sativa
aatatcatctatatagaccaagataagagtagtagagaacttggtgtaatgaacaaatagagtgagtagacttagatgagacaacaccaagagacatcagagaagtttaaagtctttcaaactagactcttggagctcgttttaggtcatagagaaccttgtgcaacttgcacactagaggtgggttagaaacaacttgaaaataaggtagttgtcatatagacctcttcatgaaggacaccattcaagaaggcattcttgacatcaagttgttgaattttccatccttgagacaaggctagtgttaacaccaccctgattataacaagctttactactagactaaaagtctttgtgaaataaaatccaggttattggtgaaagccttttgctaccaacccatccttgtacctattgatagtgccatctagattctccttaatcttgtacacgcatttgcaacaaatagatatgttcttcctcgtggcaaaggtacaagggtccaggtgaaatttcctgttagggtcaacacctcatcttacatagcaccattccactattttttctaaagcaattgaggttggttctcgatatacattgaaaactgttggcttgtgtttccctaattttgaccttgttcacatttgatgtgtattgggaaatttagaagcatgtgctgtaattactggtgtcgtgctagtctcatggagatcaatctacactggttcaggacttcttgatggaggagactcgactaaataatggaaggggagatctaggagcaagagtgacctcaatagagccagagattacaataggagcttaatcaatgcctagaggtggagaatgagaaacagaaccagagtgaggtaatcttgcaacaagagataagtaacttgttgaagagtgatcacgggtagctaagtctgaagcaggaataggtactggtgttgcaggcttaacatgtggtaatgttgcagttacatcatgtggtggctcatgattaattgtagtgaccattggtgaacctggagtgtgttgagtagagacactaaacttggatgtcgatgtaggaatgagactagagaggccaattgcaatttcttgaactgttggtgcaactatcttaggtttattgaagagaaagtggtattcatcgaaaaatcacatccctagagatgtacaacctgcctataggatcaaggcacttgtatcccttatgatttgaattgtatcccaagaacgtgacagttagagtcccatgatctgcaaggggaaagaccaggagctgtgcaatcctacattgcctggggaaggttaaacgtgatgattttgagattatgtaagtatgagactacacagttaaaggacttaaatggatttattggtactacctatatcaacaagatgcatcttcttctcggtagcccatcatgaaaga

SEQ ID NO: 164216 - DNA, 1330 bp, Cannabis sativa
tgttgttcatcagattctgttgaaagttagaagcataattactttggtgttgtttcaaattcccacccgaatcaatgaagctctcttacctccaagaaccatctcttttgaacttccctgtccagtattcatcattcccaaatccaatccgataccagtgttctttatgtgattaggggcttccaattcaataaagatcaaatctggattatggtctttctcaatgtccttacccttccccaatatttcaggatcagtattgagggagagagaagaactaaccaggggtaccttagccggattcgaattgaaattgagtgaagattcaccactagcacccgaaccatgacctgtaggcagcatcatcgaagaggtagaccgttttttaggaaatctaggagggaccttagcctgtgctgtattaccacacgtgtcttgaatgaatgaagtagggaaatcttgtcgttcattaacttttagccaagaaccgtatcccggctgttgcttccccgatccatcttcaaagagtttaattggttctgcacaaaccagagagtatcatgtcccacaaaaacacatttaaaacacattaagggtaatcgatcgtacctgtatggaaccagatctttcgaccctcacatggaaatagaaagcccggacatagaggagttgcaatgtcttgccaaactttgaaggtaaaataacctttggacgcaatcttggggatatctacagtttgaacattgataatgtgtcccgcaaaacccgccaatcgttccatatttccctgagtaatcgatcggatgggaaggttcagaatacgtccactgagtggaaatttggtgagcactttgtcccaatcttgcggaattccttcgaatttctccataattaaggtgccattattaaggaaccatggattcttggccagaattctattcaaatcttgagacgatttgaatgaaaataccaagaaacttgcagatttcgtcgtacatttgatttcaacgccccaatttctttcggcgatcccccagactcgtcccaatatagtcttcaaaagcgatcgactgatcggacaatttgagcaccatcgtcccatcgcacaaagcgccgcacttccgatcctccagacccattgacttcccatccttcatcttccagtaccgtcagattcgttgttcgggcaagcaggtcttccatggtggtgtccgattgttccatgttcgtaggcttttccagcatttcagggaggctcttctcgagagagagcatttaagaagagggtgttaagcacgcgaaaattctttttcttccaatttatattctt

SEQ ID NO: 164217 - DNA, 902 bp, Cannabis sativa
tattattgagcttaggatcaataattccacttgagaagaattttttgactgtagcgcataaactcgagcccactatatcctaatatttgcgaaagaaacaacccaaaaaaccgtcaggccccagggctttaagaggatgcaaacagaaaattacatccttaatttctgcatctcaaggaattctggagaaattattattcgagaaggagtcgattcttttgacaaacagttcttcaaaatcttcttcaatgcaaggccgagatacatttggcatttgcaaacgtaaaagcacaagacacattgtaataaaacacaatgatttttagtgcacatttattgaactaagattcacaccattttctttgagccaaaaataataataaaaaaagatgaacactattttcaatcatttgtaaaattaaaaatatctatattacaccattctaatgttgaattggtaggttctttatcttttttgatacttaagagagctattagttgataaaaaaagaattattagttcaatttttctttttatgattgcgtactgtataaccagttaagaacacatatatgtttttagaaaattttgaatatttaaagtgctggaactactcttccaactattaaaccatccacgaaaccttctctttcggcttcttatgcaactccagttagatacttttgtacttccagacacatctgtccacccttgaaatgacttaatctttatttttctttatttttgctttgattttgggggataactaataagggtccccttttttacttgcagagataattttatagtgctttgttacaggggccttttgatgtataaatattttgctttcatacctctggaggtataaactgtcggaatatattttaccaggatctag

SEQ ID NO: 164218 - DNA, 1598 bp, Cannabis sativa
ccttagcacatatccctttataagtgtgtttttattcctaccaataactgtaaggagaccaagatacttatcatgggtagccaataaggtcaggcccaacctacagagcaccccatcacgatcccgttgatgcacatttggactaaatgaaatagctaacttatcaaagttgattttttggccccaagactgttcataagtgtgaagaatattacatattgtatcaactgcccccacattagccctcccaaaaattagactgtcatgagcaaaaaaataaatgtgacatttgtggtccaaaccgagagcacctaaaccccatcaactctgctcttgtctcagcccgagagatcattgaggacagagcttccacataaagaaagaaacaaataagtagaaagtgggcacccttgccgtatccttcgaagggatgacacaacccctaggtttatcgttaaccaagaaagcatactcaagggtggtcacgcaatccatgatactctgaatccaaccatctgcaaacccaaaccgacgcacaatgccctaaagaaaatcctacttgactctgtcataggctttactcatattaagtttaaggcccatgaaccccttcgtcccattatttctcttaaaaagtgaatggagcaactcaaaccccaccatcacattatcatgaattgagcgttttgcaacaaaggcacattgaaatgatgagattaaagcgctaagcctattcttcaaccttaacgctagtgccttagccacaatcttatacacgacattacacaaactaatgtgtcgatactctttaacaaactggggtttttgtactttgggtatcaacaccacatttgtctaattgaattgccgcacaaatacaccatcattcaagatatttagacacacacaggaaacactatcgccaacaacatcccaaaacagttgaaaaaataaagcatgaaaaccatagggccttggagcttttgtagaactaatcgctttaactgcactcaaaatattatcctttgtggaaggggccaggagccgagcattctcgtcatcagaaacacacgacccaactgcctcgatacccaaatgaatatgttgcactataggtctagatgattagaagatattagaaaaatagcgctcaatctcaacaacaatatccactacatcattcagtttgtgtccattcttagtcaaaagcttagtaatagcattatttttcttccttgtcaaagccttattatggaaatattttgtgcttctattccccgcataagccattcagaccttgacctttgcctccaataaacctcctcacaattcatatgatcatcaagtatcacctcaagtatcacctatatgaacatttatattttatatatattgcatatatatatttatgtgagtaatttgcggcataacctcttgaagtagccaggtttttgcaactaacccccaattctaaaattttggtggtaaagcctccttaactcgtgttctgttatcagtttaacatttccatccatttttagctgttaactgccatggtggaatgtccacgtgtacacagtgtacacatggcacaattt

SEQ ID NO: 164219 - DNA, 1911 bp, Cannabis sativa
gaaaaagccgaaaaaaccaaaacctgtattgtcgggtctggtctgacccgaagaagcataattcgggtatcgggttcgggtttcaaaaagccattgaattttattcgggtgtgcacccgagacccgaccagaatatattatatataagtatatatttaataattattattttatttttaatattcttaactaaaaaaaaaaaagcaaaagtaaaaaaaaaaataaaaactaacaagtaaaaatctaattaatgatatacgcatcccaatgtcactatcccatcccattataccattgttacctgtacaatcatattcattattaataacctttggtttctcctctcaagtcccaaacccaatcgtgatctgttcttctccaaaaaaaaaaaatcaacatgttaaattagtttatttcacattttaggcagcctaaaaaatatattaaaaatagaaaaaattgatatttttaaaaaataaagtatcattaggcctaaaaaatctttcaatcggatctcagacgaatatactaaaccaatcaattactgataacagccagacaaggaggcctccaggtgaattagtctttaacagattaggccccgtacatgatttgagagatgatcttaatcgtagaaggggacatgatggacgatacatccctcccaatatttagccaaccaatgtaaataactatgtgcccggtaatgttctaagggatccacaagtgatacaagtcggtcaacatgcaggtcaagttgatctagtgttgcaagcccaaatatataagcttaagagccctgtacgaagcctgactggcccaaaactcacaaaccttaaacttgatcgtactaggggatcacccttctcataaaaaattaacgccctttgatctgctgcacaagttcaaaatgccaacatagaaaatgtacacgcgcaatgaagatcctctgtcccacatcaagtacattgaaatgcaaatgtacttgggcagcaaagggtgatgtacagtgtaaaatctttccagctaccttgacggaggtcttccagtagtggtacttcaagttagctctagaaaaatttaactcgtggaattccttcatggtggaatttcacacatagttctccttttctaggcaactctcatctcacttagaagacctggttgaagtaaagcaagtattaggagagcctttgagggcttacgttagtagatttatgattgatgccataaacatgaaaggattaaccatagaagggaggttggccgccatcctaggaggaattgaacatctggaagaattatagaaagacattaagaggcttactgtaagatcaataggagagtttttagattgagcaaatgagtttataaagcttgaagaagttatttggcgtgtagatacagttggtcagaaaaagagccaaccgcacaccactttcgctaatacatccgttcaatagaattagaactctcataacaacattagttcgggttagagtggtaaaaggtcaaataacgaaaaccagtaaggtaatgggaagaaagacaagttcaataataactcccaacatcattctcgattaacgaaactgacatacactattagtggtgggtgcccaccgctaatgtctgccgctattaatagttattagcgatagacacgaactccgccgctaataactgttattagcatacaattatgagcggcagattcctgccgctaatagccaatggcgatagatttaggagttcttagcgatggactcctccatcgctattgataaatgttatagtgccccatgtgttgcgatattttgtacacggaagtgtacgtatcgtttcaagtagtaaactcatcaggagtgaggtcgatcccacagggagtgcagttaagtacgttaaaattaa

SEQ ID NO: 164220 - DNA, 778 bp, Cannabis sativa
agaaggagtacctcttcttgctaatggatagaatcatggcatggaacgtcaggggctcaacactcaacaaaaatagaatgaggttaagaaattaatctcttatgataagattgggttagttgggctccttataacaagggtcaaggcacacaatttgagggctttgtatcttcacctattttttgagatggtattttacatcaaataatacttggcataatggaggtcgtattgtggttgcttggaattcgacaatgtttactattaccattattaaatgctctagccaattaattcatatgttggttaggccacataataaaggagatggttttaatgtaaaagaaggaagaagagagatgtgcatggtagtggccagttttacctcgaagctgtggttagttctaggcgacttcaatgatatactcaataaggaggagtgtattggggttaaagtgaagtttggcaagaaagaagattttaggaaatgtggaatattgctaactataagatgtcaaatataatgagaatctttatacttggattaacaagcgacacgaagatgatagaatttagtcaaaaattgattgagtatttgcaaaccagcagtggcttgattgtttggaagatgctgaagtcactttctacaatgagggtatgtttgacaatagaagcgtcaatgggtcgggtcgtatctgatccggctataatccgacctgatccaaatcatgtaagaatttgccccgtcctgccctgctagatcagatactcggatcgg

SEQ ID NO: 164221 - DNA, 1233 bp, Cannabis sativa
  modified_base (1081)..(1082): a, c, t, g, unknown or other
ttttttttaattatattatttagaactgtttattgtaactattttaagacatcttgcgtaattttaaaaaaaaatctcaataatttaccatgtcaaaacataattcaaaaaaagaatatttgcaccataaattcccaaaaattttagtttgatgcagataagtctctaattttaaaaaattacagtaatactcccaaggtttcgattttcaatcaatacccaatttaacaactctattaccttatgttgaaaatttattggccccatcataaaaattatttaaaaatcatttaataatatcttttttgaaaactaattatgttatctttcctttttctcttttctccccctttttttcttcttcctcttgctcactcacaatcccatcttccttgcccccatcactcaaacgaacgacaccactaaattcccccacccctgtaacctctaaacttgagtctttctccttctcgcatcccttcctctagtttttccatcgcccttgtaagctttaatggaggatcagtgatcacccttcactgttgacgaaaaaccaagttaccatccacggacaccatcaacgttttcgagtttgtccctatcatctttaattgtatttgaaagccccatgacacacacttcagaggaaaaagaagaataataagatttaattatatttataggtttaaatttttggatacaatatttatactcagttttcttgatagaatatgaagttttttgacagtgggtttaaattttttactatggctgaatttttattgatttttatggtgttttttgacaaaggggagagggcttcgatgggtttatggcagtgatgtagtggtggcggtggtagaagtgtggtcagatgaaagagggtgaagaacattgacgaaaaaaaaaactcgagaaagaaaaataaaattgagaaaaaagaaagtagaaagaaaaataaaggaagaaaaaggataaaataataataataatttaattagtttcaaataatttattggagaattactccatatactattttttaactttttttttatttacggtttgggttgctccagtnntttcttcagtagtttctatgtggatttctatacggattttggttgcgatttaggttgctcagttagtttctatagggctttctgtgtggaatttcataaatgcaaaaaaaaaaaaaaagttgaagtgtaaaaataaaaaaaaatcctaatt

SEQ ID NO: 164222 - DNA, 1940 bp, Cannabis sativa
cactatgtttgatgccttaaataagttggtatttttttttatgattatttaatttttgattaatattacaataacaagagtcacattctacaataacaaattacaaatctttattcgtagctaaatataacgccaattaggagtgaaattcatttggttatgttaatcttttaccaactttataaccaacaagtcagtgacgattttttttttttatgaaaacctcaatcaaccattgagaaattataaccgttcaaagctgaccgtataatttttagcaatttttggattttcaatttttggcagtttaacttatattttttttgtcaaaaactgaaaccgatggccatgtcaaacaaatcgtaatcgaaattaatcaccaaattcgacaatgacgtgaaatcaaaaattcagttatagtctggtcaatttgatagtcgatttcaatttttcgatttttatgaacatccctaacgccaacatacaagcagtaacttccccacaaagagcattagcaaacaccaaccgcttggtactagcccaaacattaccaaatatcctttgagagcatctccaatagagagctataaatatgatgtattgccattttttataatattttgcaaaaacttaactccaatagtaatgcaaaatgtgtgcgaaatttagcccaagctaaaaattgtgccaaatttagcacaaaaaatagcatgggctaaattttagctcacaataaatactgcattttttaattatctctttgctacttattaaaactattcattaactttgaataagatatatttataagatattaaaataatataataaaattaattattttgtatattttaaatgagcattaatagtaatattgacttttatagctaatttgcaccttgagcattagagtacaaatacaaaaattaggccaaatatagctttatagtatattttgggctaaatttaacctaaaatatacaccatctaatacttaaaacacaatacttaattttgatagtttttttttttaacttaatttaatagttaaatgatgaacattgttattgggcaccaatagtgcctaaaatcttatacacatgttatcttgtaattagttagtgacattctttaaaagtttactttaaattatatgagactcgaaatttaattatactaatatcgatattgaaatataagaagatgctgacttttagtattttacttaaactattgtaaaaaattgaatgtaaattgatttgttgtgaaaataaacattaaatttaattaattatttattatttttattgtttaatctatctaatgtataatttatttatgtgcagtataaacctaacccaatgtctctttaatttttttttggaaagtaccttcaaatttttaaagaaaggaaaataagtttttaaaataaattgtttgacgctgatgataatattagattgaaatttgttacgagaattatacatctgtaattatttttactattagagttttcacaataataattttaagatcattgtttagatttttaaaaatttgttagtagtgttactaatatgtgttgctccattaaaaaaaaaaaatatgtgttgcttaatgtagtatttgtaatgaattgatgaatttgagatgttattattatattttcaatgaatttgtgaattgttttaaaaaaaataataaaaattgaaggccttgtgccctttttcccttacctgctttcccgcctatgtattccacaactcgtcgctccttttcacagtctcttgttctttaagttttgagccttatattaaaaagtttcagagaaacctgatccgatcaagttcattcactaaatcgctcgatgaaattgaagatcaataaagcttccgatctcagctccatttcaaccgtttctcctcaaacaaggttcactt

SEQ ID NO: 164223 - DNA, 1047 bp, Cannabis sativa
cagtgtaaatggggttcctttccctatgttcgggccgtggttgtctttggagtcgacgtacctggacgtattctcgagagcaaactcgttcactccggcgtcgactcaagtgggtctggcgagttctggttcttttcgccctggaattcggccgttggccatgactgctggtacgaagggccacggtcggaagaactctcggcctcggacttcgaaccgttctgtgaaggcgaccgatcgtaggggcctggaggggggtcaggctcgcagtgtggtctgggttcccaaagagcttcctgcatcacgcatgcttggagcttccattaagggtaaaaagagtaccgttggaaacctggaagatggaaaggaggttgtacaatttcctgtttttaattcaaaatttaatgaccaaggtttgacttttggtaaaggaaaagagcctcggcttgggcttagtaatgagcttgttgggccggctctctcttgttctgggtcgggttccaagattggctatttaaaagatagtgcatcttctaatgggcccatgaaaaaatgcaatggccagtttttttcttcatgtgggaccgagcccatcttggaacaaaatgaaaccggcttgcatcatcctaagagtttggggccgaatggtcttgttgggccttttgagttttctaaaggactaattgagggtaaggagattattgggtcgaccaattctaattcaattgagagctctatttgtggtcaagaggtaaacttccaccttgatgaaaaattagctttgactaatttttttcaagctcaaggcactactcttcaagagcttaagaaatttgggaacttggatctatatgagattaaatcaattggaggtgacattggggttcctactacctcggaggttaatgaacgaactactccgttcaagagaaagtttgatgaggccactgcatcgctttgttcacgtccttggacgcttcttcgtcctcatccctgggctatccgtgatttcccttgggatccggagggtcgcgctaatgatactaa

SEQ ID NO: 164224 - DNA, 1357 bp, Cannabis sativa
tcccacataatttaatataataaccacaacgtgacatctcgagaaggtgttatgcaccattggtgcttaatagtaatgctcaaaacttatttgtcagaggagaaagaaaaatgaagtattaattagaaagcgtttaagagatatataatcagggttgggtctatattaagaggagttaggtccgcatctaagacttaccgggcaaaaaaaaatatttttactttaaaaatatacattatttttagttttttaaataaaagacaatatttttttcctaaaacgtacctaatcttaaaggccggtttgtattaactagctagaaaaaaaagttatcaggagtaacatagataataataataataatgtataactttctttgggttgttcatataatagatcctttttttatcatttttttttaattttctggtaatttttcaaatgagaataaaattgtttttgcattatcgtacttctattgcacatattcttcaacaacatattgaaatgaaattataaactttgatttatgtactattactatcattacttgaaatttttcaaaataaaaccaagatgtaaacataaaatggagataaaatcttgttaattacatttgtgtcaattcacaaaaaaaaaaaaaaaacataatcatttgtgtaaaagtactggactatttatcaatttgggttgtatttgcatctaagtggtaattggtagttactttgtacataattagtcactttcattaataaatattcattttcattactcattcaaaaaattacacaaattaaaaatatttcaatatctaatgataattttacaactaataaaaaaattaattgatttcattagtaattattgtaaattagttttaattacaaaatattttaattattccatataaattaatagatatatatatatcacaattatatatactgatgagtaaatttaaaaagtaattctatttaaaatcaaattattcaattataatgtatttttcaattctgcatttttttttagtatgctctgcacatagtatatatataaatatatatatatatatatttagttatatttaattatttatttttatgttattcaataaataatgttatttttttattaaaaaaaaatatttaatttaagtactatttataaaaaagaaaatataataatattcaatatttttttgttaattataattttaatttaattgtactacctttttttttttatcaagaagaaatcttcattaatcaccaaaaccaaacaccctcacggctctccaaaggagaccaacctcacccctcacttaattacaaatcaatctctttagtaaatctatctc

SEQ ID NO: 164225 - DNA, 673 bp, Cannabis sativa
tggttcagattcttggcatggctggacagtggtgacttcagttctttgatgaggaagccttcgtgtataaacacggccaaacttggtcccattctgctcattacatactgtttgttgctgagatttattttgtaaaccattttctacctcacaaatatttttttcagcattttcaccaccattttgttcagtatttttggaattatttacttccagactttccctactgctaccaatctcttcaatctgcctttcattatgtcctaaatcatagcctaacaaattcaagtctaatgtatgatcattaaaaacatttttggcaatatttttgaggttgtaatgaggattaaatctattatttgttattccaaaatccaaatctttaacttgattctccccctcaagatgatgattaaaaaatgggatgttttcaaaaaaatttacatccatggttacaaaagttttttgaagcgtaggatcaaaacatttgtaccctttttggtttgaagcaacaccaataaaaacacacttttttgctctagggtcgagtttactagcatttttaagtggattttttataaaaacagtacatccaaaattttttataggcatgtcagaaaacaaacgagatttaggaaagtagtttttaagaacagatatgggcgttttgaag

SEQ ID NO: 164226 - DNA, 1167 bp, Cannabis sativa
cgtactctggattgacggtgagactgaagctaggctctccttctgctgttgttggtgcagcgataagttcaactgggcagggacgattgccattaacaaaaccgtcgagacgatgtcccctaatgacagtggagaccattgttttccaaagaacataattctttcgatcgaatttcaagggaaaaggctggtttagagtattgaagggttgggtataggttgactgtgttatgggcaccggagagcttgcagcacctgctgcagcagtggtggttccctgaggagtctaagaatgagcagacattggcacaggccgattgtgctctgataccaagttaaattatacactgaaatggatgaaaaacaattttcagctcaaaggaggctgagaaccaacatattcaatttatattctgaaaagagattacaaaggcaaattacaaagtgacatgtggccctagtgttggagcccaagggaacaaccaaaatagaattcgtacacccttttacaattaataaaccagtaaataaaaaggagaataacagaggattaacatgggattaataatggacaataactaatcaactttcttaacatccagaactatgtaattgtgataaattaataaaaatcttaaatgtagatatacttaaaaagaaatattgatctagtgaaaaaagaaaaaaagaatacaatgtttgatcaattttataatataatacatgttacattatggttgagaatggttagagtgtatgtatataatataaatgtatatatactagttaatggttggaaaatagttgagagatatatacaattaagagaaaaaaaaacaaaagttataattatagtatcttgattatggttactattcatcaatgtagtcttataaagaccaaaatataatcacttactcaaagaaaaaggttacataataaatacacctcatgaattatcaaagaattagactaaactcaataattatcacaaaaaattatgaattgttaatgaatatgcaggaggaaaatgaaaatagagtattatggttaggtgtagatgttttttttaggctaattgataatttttcctcctgaactttgacatgtagtaaatcgtgccccctgaacttttttggccgttaaaaattcccctcaaactattga

SEQ ID NO: 164227 - DNA, 926 bp, Cannabis sativa
gttagaaaatagatctaaaatacagatggatcttaaacttatgtcagattatcaaagttactatatgaatcaataagatggacgacatacctgattctatgatattagatatgaaattagatgatgggtatatggtcttctacaaactaatcttttctctatgagttttcacgcaattaatgggaatgaaagtgaagagtggttgagattggtcttaggaaccaaacgctagtattctttatataacaaactaattagaaccccataaaccctaattaagtttactattgagtattatacattacaaagatcataccaaataagatgtttattggactcatttaattacatcacttatttagctcaatttaaaatagtagctcaaataaattgtcttaatttataaatccacatattaaattattaaaaattaaacattttattttgtattgttgacctaaatttttaacaactaattaatataaagattggagatattaaaatgattgtatagaaaggtatttttacatcgtataagcgttaatggactttaatttacgcctcgattgtatttatgtcagaacaatgacaaatttcatgaaaaatataattaatcttatgtgaaagcaaatgattaaaaaaataaaaaaaattctactgctgttaaaaattttaataatctagatctcattcatatataatcatctttgtatattaaatgaaactttaagtaaaggaagtaaaaaatatacttatgtaacgtacgtgatttaagccattatgaaattttgaataaaaacacaccttctcttagggtcatcagcttaactaaaggaataattacataaggcactattttttgtaaaatatttatatttttacgctcaaaaaatatttttttacatttttacggttttccaaaaaat

SEQ ID NO: 164228 - DNA, 1284 bp, Cannabis sativa
gccaaatgtttatgataccttaaataaaatgcacaatcaatagagatacccacactttttaaattgcatcttatcatgtagagtagttctcttaagtctcctcaatgtatcctttctattttcgaaatgtgataattatatttttaattgtttttcaaaagggttgtgtatattgtggttattgcatgcattccactaatttttgaatttcttttaataatttatggtattagttttagggttcttttagaatttttagatatttagttagttattaactaacttaaatattttttgacgatctagtgagagaaattaagaagaaatttttttgagatgtaggttgtacacaagttgtatgtgttttatcacaactccctcaagcgagttttttataggtacaagacgccatctttgtccttgatcctttgagatcactctctaatttgagctactattctgcataaagattggttacattatttgagattaaacctcgttaaattttttgtctcctgttatcgatgctacaacattccgtcacagcttgtttttagttattttttaggttttacttaattgccattattgtgttattccgcattattattgaaactgacttgttcttgaagtgtgtcaactcacaacagttggtatcagagctccatggctaagatcaaagtttcaagaaccatgtttcaagtttcaagaacttggcatcaatggcatcaaccatattcgaattgacaaatttacaggaaaaaataacttcgatctatggaggattaagatgaaagctctcctagttcatcaagacatttctaaagcacttgatgctattgttctcaaagagcttggagatgacaagaagaagatttaagaaattagatcgaaggctcacagtgcaatcttgttaagccttggagatggagtactttgagaaatttttgatgggtttttggatgaagcttgcagccatttacatgaagaaatctctagccaattgttcagtaaaattcagtacacaagtatagctatttttctttatttttacctttatttcatagtgtttatttcttccctgctggattctaaccattcacattattttatcattcaaccaacataatgttttgaagagttaaaaacctcaaatccctaaggttcataatcttccataataataataatgacagttaaataaataaataaaaaaagggaaattttatttacaccccaaaattttctaaaggcaccccattttaataatttttattttataca

SEQ ID NO: 164229 - DNA, 1038 bp, Cannabis sativa
aacgagaactaatcataagttaagtcatccctcaatttcactaagtgtgaaggattcctgtctcaaatagataagctaacacataatggattggaaaaggaaatttttttcttaacggtgcattactgactagtaaacattctaagaaacaatcactactcaaccaaaatcttgccctgagtttctatctcttcctcttactttgcactcaaatctcacttttcttcaccacttatttaatttaaattcacatcttgcgtagaatcctagttggaataaaatgcagaactttcttgaatttcaacatagcttcatatattactcaaacaatcgagtacagtcaagcaaagattatctaaacaattctctcataaacgaaatgaaacagtataaaaaatgaaattaacctgttggaagctcttgacagtctttccaatgctcttgccgacttccggcaacttcttgggcccaaaaaccaaagcagcaaccccagcaataacaacgagctcaggtacaccaagaccaaacaaagcattacaagtcataccctttctagctcgctcggttccgaatttggctctgcttcgacctaaaaccaacgcatctaccttcctgctcccgaaagcggtcccgttgacattgtttacgtaaaagctagaacgggacgaagataaaggcagagaaggaagaggtgttggtggtgataaagaaattgaagaaatctccatggttaatcgggctaagaattcttcttatattacagtttctgatttagggttttggttgaattttcagttttgtgtgatttgggttgtggatgattagataacatttgagatttggagaaggagactgtggggcctacctgtgtttgaacatggattaggtagatttttcttacatgtttatctcacgtacaaaattttatgtattaataattgaatttttttttttgagaaaaattgaattgaaccagcaaataatataattttctcttttttttttttttttttatatattccctttttattattatgt

SEQ ID NO: 164230 - DNA, 1074 bp, Cannabis sativa
ttgtttgattcctgaggttcatcaacctcgccaaggttgaggttgaaagttatatcattttgtgatatttggatagagtcttcgaacaactcactgatccccaccgggtccatattgtcaaaagtttgtatcttgaaagtagaaggtagtaatgcagagagcgattaagagtaatcctctatgaacttctgggaagtaagctcctagaaagcaacaacatacatttttttattagtaatgtgttgttatatgaaaaaatggtatttaattgtgtgtgatatcattcatatctaattttgacatgaatgctttagctcgcttgatgacatacattctacaattaaatttacaagtaacataagatataccaaaagtactaaatatatgaaataaataaaaaaaaacataaatatgaaaaaataaaatattattatttacccattttattgaacttctaaattgttaacaatttctatagtaaaatcttctctttcaaagtaatttattttttcatagaaacttgtagcttctaagagccatcatttagtatacacctagttttgagggagaagaaatatgcgagattgtctggacatatgagaatagaggatagaaagttaaggttaattattcaaggctataattataattttataattgaaattttaattaaatgaccattatgctaagtatttttaaaaagaaatatttactaacttaattttttaaatttaaggctattttgcgggagaagttgaagaatatctatttttcatacattaactaaatttacattcaaataaaattttatttaaatatacctcattttataagtattatactcaaataatcctcacactctcgcagatataatttcaaacataatagatgtgtattttttggagatatatgtgtaggtttgtgagaaagttgtggcaaatttttaattaaagaataatggaaattatcgtaaagagtaaaattggtagaatgattgaaaaaaaagaggtaaacataatagattttgaaagagggggtaaaaattaaagacatcaatttaaaagagatatgtag

SEQ ID NO: 164231 - DNA, 1510 bp, Cannabis sativa
ttataaacacaccttttaataattatacaatgtagaatgtacccgagcctcagagaactaaaagtacacttgtattttctttttaattattttatatattatattttttttttcaaatttattgcgtgattatgtgtattgttttatgaattttggttgtggtttaaatttttcggttagttttttgtgtaaaattttataaaaaatatatataaaaaagtattttaaagtgtaaaaataaaagatttctttttttcttaatttttataaggtttttttttttttaatttttagaattaaaaaatctatttaaacaaaaaataaaaaattatttttcaatttaaatttcttttaaaagaaattagaatttgtcgtttttctaaaaagaatttatatcattcttaatttatttacaatttttgtaatgatatctaaatattttaaaaagtatttttcattaatagttatctaaactataaataaaagtagaaatttatatttattttatacttttagctataagcgaaagtaaaaatttagacaaacataatcgtgtataaagtggttacttttataaaagtgaacttcaatgatattgtataaagtgattcaaatttagtatatattaaaagtcgggccattcctttcaatggtgacaaatttacatggacaaacaagaattataatgggaattttgttcgggaaagacttgatcgaggcttctataatgatatttgggctgacttcttcattgaagctagtgtcacacaccttgacttttatcattccgaccataaagcgattgaatacatattgtttctcatccggatcagcatgctgcaattaacaccagacgcaccagatttcgttttgagcaattctggctcaaggatcctaagtgtcgtgatattattcaacaagattgggctgactcttctttggtgcaacaacctgacttactgctgcataatgttgcagcttgtgcttcctcattacaaagatgacactcttctaaatatggcagtatgaaacgtgatatagctgaagcacacaaggtttctgcaaccttgcataacactagggatatctcttctgaacatattaaaggatggtgaatgcggataagattctagatgaactattagaaaaagaagagctttattggcatcaacgtgctcgtgtggattggcttcaaagtggtgattcaaacactaaatttttccattctagagctaaatccagaaatgcatcaaacaagattaaaaagttacataccattggaggaggagtggtgcatactgaagtggaaatggttgctgaaataaatcattatttttctggattatttgcttcgaattgtattgatgataatgctttgcaagctgttcttgccactatagatactaccattacaccagaaatggttgatgataatgctagtccgtcagttgtgacaggtcagttatctattaatggttgtgcttatactgtgttatttgattcgggagct

SEQ ID NO: 164232 - DNA, 765 bp, Cannabis sativa
  modified_base (733)..(740): a, c, t, g, unknown or other
ctatactcattatagaattatgttgtgattagactagttcacataatatctctccactgtttcattcctaatatgcttatgttgtactaactaaacattccatgtatttaatctgaaatatctgcagatggacaaggtgataggaaatgtgttcaaaatggtaaatgcagatgatggtaagatggttagagaagacgagttcaagaagataatgactgaaatcatagggagtgtgatgctgcaattggaagggaatcccatatcagtttccacaaactcagtggtgcatgagccacttgcctcttcttccacattattacagccaccatcctagtaatacagccgagccgagtacatattatagagctaatcgcgaatctgtcgagcgtaacaacttttaagaaagacaataaaattttgttgagtaacaaattatcactggcttgtctctgtgtgtgtgtgtctttgcgtttttaagtgtcaatgtgtttgtttgtgttatgagatttctaaattatgccaatttagaatgagttgaagccaataattatagccggccatgttgttatgttttatacccatagcaaaatgtaaatgaggctgtgtaaattcactacttgattttacaggatatcctttaccataactttttttatttgattattgacacacttggcttggggctcaattgagactttccaagtaataataatggtaaatactattttggacnnnnnnnnttgcaaaagttacagattggaccct

SEQ ID NO: 164233 - DNA, 1725 bp, Cannabis sativa
tagaggattctctgctatgcttacagataatgaagtttcccttttatcaggtatatatattttgtctctcttaattttatgatatatatgcattttttaaaatatatacatgaattttatacaaaatgggagaacaggtgacagtgaagtggtatctgttattgaggataaaatagttgaaccacaaactactcgttcatgggattttttagaagcgggaatgcaatcaaaatggggtttggataagccaatcaccaataacaccattattggtgtagtagactcaggtacctaatatataacaatatacacaggaccgacctgaattgaaatgggtcatagctaaaaaaaaattaagtcggcctgaatatacatatacatattaaaattatatttctctactcattcttttctatttgatttttcttttatcttctttgagcaatggagatgaaagttttagatttttatacgattattctttttctttctaattaataattgatatttatttatatataattcatttttacgtatgacatatcttaatatcaaaaacaccttttttaatttaataagatatttctttgtctttcatacatatttaataaggtttgaattattttttttttcattctctctttctcaatttatattttacttgagccacattaagtcacttttttttttttgtgcctacagccatgttattttttttttaatttttttctttgtccttctttttttttatcaatcaacttttactatctcattctcttaaattttaaaaattatttttatcacatgactatttagttgaactttaaaaaatatattgttataatttactctttaatgtgattattttaatatattattcttttgtaatttaaaaagaaaaaaaactattgaattgctcataatactaatcatacactaattaattactatttttttatttaagttaataatttaagtttatttttaaaatttaaataattggacaattaaatagtttctaccataaaaataaatgaaaactatatgtcaattattgttttatacaataaaattaaaaattaagtaactttaaaggtaacataaatgttgttaaaaaattaatataaaaattgttaaataataaaacaacataatattccaaaaatagacatataatataaaaaatttttaataacaaaacaacataatataatctaaaaattaacacataattttaaaagtactaactaaacaaaaaaaaatgtaacaaaaatatatatgaaatcatttttatcttaaagtgggtgttttcatgaagaaggtaacatgcacattggtattctatattgaccttataagtaattaaaatgttacctttctacccataaaagtaaaaaatatatttttatacaagataatctattagcatcttataagcatcataagcaactaattgttatattaatatatttataaaattttactattgaactatgtgataagttaattccttactattataagctatctttttgtaatttattgaagttattctataaaattaacttatttgattaaaatattacattgtaagttttagacttaaaatattaaaatactttcttataacttttagaattgtttggtataataagcttgtttaaatcattttagttactatttggatgttaaaaaattatccttttgttaactaaatataaaaga

SEQ ID NO: 164234 - DNA, 1565 bp, Cannabis sativa
  modified_base (1510)..(1540): a, c, t, g, unknown or other
tagggcacaaaacccaacaagcttgtggcctcttaggctgcgctcagcccctgacattgtatctgtggcacttagaacgcactttgaatgttagagaatgaatactccttttagtgaggtgtccctcctagagtcatatttgattccatttttattttaatattttagggagatgatggctctgtgaactgacttaaccttttgcttttaatttttatattttaagggagatgatggttctgtgagctgactcaaccttttgctttcgatttttaagcaagatgatagttcaataacctaactcgaccttttgctgatttttgtttgtttccctacacacgctttacgcctaattttgaggagcatccccctcgttattgctagtgctctttcttgtggaattatcttttgcatttcactcttttcttatggtggaacttcaatttaaggagcatcttggatgtttgatttttacaggccacgggttggaggattcacttaattgtatttatttatgagcgtcgagagtagcaactaataaaacttgtagtattctgatgagattcctgaagaacactaactggtgtcttctcttaagactctatttccttcctccacacagatgtatttctccactcttttgtaaaagttgtctaagccatccaactctcttttcaacatattcttccacaatccactcccatgttgtaccccagcaactatggcagacttgcattcatccttagttaccttccctactttggtaacttcggtgttgaagtgttggatgaagcttcgcaaagtttcttgtccctttttttttcacattggtgacacttgtgatacgcataatgttatcacgtgcagcatgatgttgttggaggaatttgtctaaaagttgtttccaagaggggatagacccaggtgccaaccgtttgaaccacttatacgctgcacctatgagcgtcacgataaagcactggccccttgctttgcttgtgaccctcttcatcttcattattttgttaaaagcatctaggtggtactttgggtcggttatgcctttgtaaggaaacattttgggcttttaaagtttgtgggtagactctcctctaaaatctcccttgaaaatgaagattctccatcaaactcatcctcgtcccagttacaatctttagatgtagctgatgctatcctccgtcgaagatccaccatctccttatctatctccttcctccttttagctagcttttctcgtaggttcgggggtggctggctttattttctttttgctttgaagtaaatctatcgagagagttcgtttctcgatcgtgctcatctggcagagcttttctctcaagttaccttggaccattttagactcagtctttttgagttgtgatgagggttccaaatttttttgggttaaagctcttcacagggaggattcaggggtgttatttgtcgagaaccttgatactcccccatcttcttgttggaaattattttnnnnnnnnnnnnnnnnnnnnnnnnnnnnnnnttattaacatcctaaataagaactt

SEQ ID NO: 164235 - DNA, 1687 bp, Cannabis sativa
aatttaagctataagtggtaaatagacatcacggccttcatgtcgttgagggccaacaaatcaaacatgttgttaaaaggagagggaatgtctatcacgacgaactacacaatcaattttctcgtggcttgattttctcaaactctgaggggtaatcagatatacacgacaggtgtgatgccttggcaaaacaagccatacattactttgttgcaaggccaggtcggtgagttggagccccatattttcataggttgatttgaaaagaatgttggaggatgctccgtcatccaccatacatctttccacgatcataatgcgggaaactaactagtgttgcatcttcctcggcaaaggagatcgtgggctctatgagcttctgttgcttagagctctagtctttgataattaggactttgcctttaggctcgtggcagagtgttcgagcatatcgctctctacctttattggtattgccaaaatggtggggtctacctattatgaccctagatgtcctgccacgggcggtggcatcgaatctcctttttggcctccctatgcctgggtctagtcgtcttgcacataatgatgcaggtggggattattacgccttaccaggtactcaatctccctctttatattttggcactcattagtgtcgtggccaaagttgttgtgatatctgtagaactccgacatgtccctcttgcccttctcccttctgataggaaagggctttcggtatgggacctttccctgaggggccataatgatggtctcgggcttctttattatgagggtgaagcaagtatacttctcctcctatttcttctgtggcatgggcgaagtattaaacttccccttttttccattgttccttatagagctgttggtgtcgcacttgtttctagtgtttttaccactagatgtctagggagagtttctattgtctgcctatgcgcttgatgggtcatgaggctattgggtgcctcgcgactgcctgttgtttacatgccccacctttgcctatctatggcttcttccagtttgataaagtcttctgctctatcaaggaactccttcatgttatttgtggatatcctctggatatctttctaaaactcacttagcgggagtatgcccccagcatggccgtgtatcgaccttcatcagtaaggcctttcactttggtagcctcgtccataaatctgtgaatataatccttaagaggttccccttgtcgctatttgactttgacaaggtcttctagttgtaatggtacaagtctcgaggacgaaaattgtgtataaaattctcgtgagaactcagcccaagagttgaatctccctgggatgagtttaaagtaccattattgggctgtctctaacaatgggactgggaatatgcaacacctcacatcaccagtaacttttgatgtgagccaacaggtcttctcgcccggtatttatcctccatactagcatttagaacttcgaaaagggcaaggcatttatgtatgccaagaatagtgattcccttgaccgatcaagtttaaggtctgaaggtttcgggctagctatgcgttggatcatatccttgagttggtccaattgtgcttgcacaaaaggatttgttgttgtgaggacctggttgactggccctcctttgggaggctgtagattttaaa

SEQ ID NO: 164236 - DNA, 628 bp, Cannabis sativa
aatcttctaaagatttcgttcatgagccttgctaagagcaaggcgaatagcaaggagctccccttccagaacgctgctaacaatggagaaatcagtagcactccagcaaagcccaacttcctccttcaaatgttcgaccacagccaaactagcaaagtttttaactacagaggcatccgttttgagataggtaacaccgtctccaaaatcctcagccagactagcagagtgatccaattcgaagtaggtgacaccctctccaccaggatttcgagggaccttctcttcccacctagtcgccatttccaccacacgctacgaaatttccctggagattagttccaagttacaacactttccttcaaacacaattctatttctccattgccagaggacttcccaaaagacaggcaatgtgatgttgttgagtttttgttatttgtatttatttttgatgttgttctccttactttcatgtgattttttttgttattttcttgtatttttattgaacacagataggaggtggtggtgatccgacctatgagacggagatgagagggacattgacgggaaggtggtggtggtccgacgtatgcaacggagagtagagggggaccgacgggag

SEQ ID NO: 164237 - DNA, 1580 bp, Cannabis sativa
tgtcggtgtggcttctggcatttgtatcttttatttgttattttttatgtttagtttgttttgttctttattaatttcaataatggtgttgatacaccactttactattgttatcgtattagtgccttttcatttatgacactggattttagtcctgtttctttttagtagcatgaattgtctatgttcagatatgggagattttcaaatttctattagccccatggtttatggtgtgattatgtggtacgattgttatcattatggttggtcaattgattatttccttttattatagatagttgttatatttcaatttttattggaagatcattggttgatagtcattaataggtaaattatgtcacacgatcatttggtttggaagcctaatataaataacatttttttgatacttgattgctagtggcttatttgatccttagctgaggttattattagaatttttttccatgttattgcaaacgactcgatatgtttaattttcatgattttattctttgagctatatttttatataatatattttgtccaatttacttattaatggatattaggagattttcattttatctaaaagaaaataataataaaagtatattaggagattatattttaagctggtatattatttatttacctatgtttatggtgattgcccacccttgagtttttctttttaattaagaaaaaataataatatatatacaaatatatatttgtaattttttatgttttaaatctgtacaattactttacagcgagacttgtctaatgttttgtaatttttttattgaatggaatttgatttcaaaaaaaaaaaaaaaaaaaaaaaaaccctggtgtgaggatgaatcaatttaattagtggggttagattatattgatccaccaaaataataataaataaaagaatttgacagctcttgtatatttaatataacacattctttcgttaccatttacccgaacaaaaaattattttaaatattttatctatagaaaaaattatgttattaagcaccctgtaccagaaaattccaaatttattacacatatattttaagaaaaagtcactgaagaactaatcaaaacataataaggtttcaattagttattatctctttataaatataataaaaataaattaaatataaaagcaaagtttatcacgacactcgaatttaaatgctatatataatatataaaaacaattgattttcaattatattccttaattctcaatataattttaaatgtttcttaaatattagtatgaatgttcttaggggtgtgttgtatcgtgaatgtaatgtatgattggaatttaaattccgttgaatttataaaatgtataaaatatatgtccccaaatctgtaagactaattatagtttatgatctaaaacaagaaaattaagtaacaaaaaataaataaaaaaagactattttttattatattttatccaaatacaatgagcacaaaatgaatatatataaaataaatatttatatttgtggtgccaatataaatttttattagatatataattatataat

SEQ ID NO: 164238 - DNA, 2115 bp, Cannabis sativa
cattatataatattgactagccaataatgaacaaaaatatgcagttttgataatccacctactaatagaatttattttagaaattattatgtaaattgacactcttctattcttattttatggggtaaagattgtccataagattaattgatagtgcagtgctaccaaatacgcaaaaagatggtaggtaagtgtgtgagagtaaaaactaaaagagtgttcaagcaaccccaaaagttaaaaactcaggtttgaagataatgtgaaccgaccaattaaagttaaaaacacggtagacagttaagttataaagcatctccttctactgtatactgaattctttgaagaaaaaacaagaaacctacaaaaatttgaacaagccaatgctattgaacttgacatcttttgctactggtgaaactctctcattacgagattaatttattatggaaaactgcaatagtatattctaaaaaccatatcaaacttgtaccatgctttgtttttgactgcttttgcccaatggagcctccaagatatcatagtggccatagccatgaaacaggacattgatgggattttcttcgttcttaccatattcttcgccgtacttggctatgttaaccaatctgccgttgcttctatctaccatgaaaactgatatgggtgtcctgaggaatagaaaggttgagtcagcgatagagagagcttatccaaagaaaaaacaaagacagtaacataaaaatttgaaatcacataatgcgaataagaaatcacttgaaattgatgttataaaaatatggtgataaggggagtgcacaaaaactcactttaaaacatgagatgccatgagcaattcaggctctccaccccatacataaggttgttgaatatttttcacataagcatcaaaatccccttcaatgaacctgagaagacaacattacaaatcgaccaacagttatagcataccatccaaaaaccaaatggcagttctaacccaatttccaaatcacattagcttaccattctgactcctctcgcctctttaaaagctcattcacaacctatagcagtaagttgcaatccatcaaaatacaaagcattttagtaacagtctcaattcaaaaaaatgaattaaacagtaagaaaatcttcatgttttctcaaataaaagaaatggcataaagaattacttgagctcttaaatcatcagcaagttctctttgacgaatttcgtcaggagcttcttctccattccttaagcaggccacatgagctatggctctaaacaagcaccgaccatcagcaagaacccctgtagtattcaatgcttttatcttatcaatatacaaaaaatttcaacagaaaagcacataatatacaaaattacactaacaaaagagcaaggaaatcaaacaaactgaaggttccagtagaacatctacatataatccaaggattagagttagacaaatataaagcttcacatactatacaccacacgtggggtccaatttgaaaagttgatagctaaattcaaaaagttcaattcatcggtaattttgtcgaacagataatgatcactatttcactactaacatatgaaatcagaaagaaagagaaaaattaaagaaacgcacagagacacatatgatatacattataaatcttatatacgaatatgaagatttttccaagacatatatacgtgtatagacgtagcagacgagacgattatactaatataatttcaaaaataaacctgtaatcctgtaatcggcggagctatcgatgttctcatcagaaacgacaagcttctgctccgaaactggcgcttcggcgctcgcgtcggcgcagcaatcgacgactggagcgaggcaagcgcagacgccgaagagaagccaagccgagtcggcacggtggagccagcgcgcaggccgcgcgtcaagagcagcgttccacgagccctcgcctctcaggtcgaaatgaatcgcgggacggcgtcgatcgaaccttcgaccaccggaagacggcaagatggcgtgccagatagaagcagctccaccacaagacgcgccgagctggcaagcactggagtggtggcgacgccgg

SEQ ID NO: 164239 - DNA, 689 bp, Cannabis sativa
tccatactggtttgggaagcatcaacagggaagaaatcaaaaaaaccaggtgatacttgactggttttaagaaaaggaaaaatttgctcatagaatattacatccctagaacaaaaaatcctattagtattgaggtcaagtaacttataagctttcattcccataggataacctagaaaataagaacattatcatttttgtgtattctatcatcccactctgattcttttatgttgtgattgatttgaaagatcgtagtgtgagtgttattacgaatacaatttacgaaaagataacaatgacacttaatagattattaagaggtaaattttctattcatcttttgttttcttatttatgtatgtacatgtggaggatcttaggatgtggcaagatgataatcactgaaatgcttctgatgcacacctaatttagtttcacaaaaatgatgaattctaatatatataatgaatgtttgggtgatgatagatcgttagttatatggtaatattgagtgtaaaaattacttttgttttttctagaaaaattaatataaatcattattggggcataaatttttttatgtaatgatttttttatgtaatacaatgtaatcctcacgaacacgtagctcgaaatccatagaatcccgcactacaacaattatgattattagaggcggaccactc

SEQ ID NO: 164240 - DNA, 3790 bp, Cannabis sativa
gttctatgtcctagtgtgagtaatgctaccccagcttgctatcccagaacgatcatatgcctatggacgacccctatctaggataaatgattggaatttggacccactatcctagatgccctactttgaccaaagtctcgatctcatctttttagataatcacactcattagtggtgtggcccttttctctgtgatactcaagttccttgttctagtagcacctattccttcctccgtgcgacattcgtagaggatttctatagtggaccatattgcaagtcactttgtagacattttcttgcatgcctatcaaactggtatactcagtgtatttagggtcatactccttccttagcttctttgaagaatcattacagttattgcctttacccctcttttattctaagtatcgctcacatttggttccagagcctctatgtgtgtgtttaggagctacattatacccggtctgtgctgccttgtaccctaaaaaatgggtccgtgtaggtgcaataccaaaggcactgggtccgtgaatagttggaaaaaactgagtctcaggaagagtcaaagttggagccagaatgtgaggtgtaaagctgggtgcagtcgtggaaggggcaggggccaaaggtacttcaaaggcttatatataggcatccttgaggttaataataacttgggcctttgacataaacttagtcaaggtttcagttttctttcttcatatttctccccacaacaaagaactaacaaccaatccaggctgaagggccatcaacttcatgtcttgagtgactttagttttggcatcagcctccatcatcctctagataaaagccttcaagctttcattttgttgctgcttgacattggtgagagagccaacctccatgtccaaatcacgcacgataatcaactatttgggaaaggttgactgtaaatctttccagctatcaatcaatcctggtgttagacgcttccaccagccttccacagacttggtcaatgttaggtaaaaatacaagcacttggcatcgtcactcacacgttcaacttgcatcatcttattatatttgtccaaatgtgcatgtggatctgtccttccctcatacaactcaacgtgtggcatcttaatgtgttttagaagtggagtttctgtgatccccctcacgcaaggttctgggtcctcatccttagaatcttagagggccccactgtgctttttgactagtttggtttgagctgctatttgatactctaacctttttttgtcgcttttaggaagatcacatcctcgcattttgtcacttaggtggtttctggggtcacctccacgtggcctcgctttttcactttcgtacctttcatacttggcatccaaccgctgactaaggtctatggttgaccagcagtcattcgttagtcatccttttatcttggttgataatcactgggatggtttctctgccctttgggcttaggtacttttgtactttgcctttttggcacagtttttcctctaggaaaagaagggcttccgggctcgaaagcactagtggccttctgcgtccttgagggctggccagtcaaattcgtgtctttctaaggaggcttaggagctactttcatgggggctcacctacctcacctttacctttatcctttcgggaattcaaggtttcaacctcagttttcctaggagcacgctctttagccataacttccatcgaggggtcatcgtcgaactctgccgattcctcgaacttattttggagatgctccattattctcttcattttctcagtgatttttttttctattcttctaactacgtttgagtagcttctaattctttaaaaactcacaacaagttagggtcatggtcatagtaataaccatctttataatacacgtccttcatgtaaccactgtcgtcgtcctcctattcccactcctcatggttttggtcatcatcgacgacatcatataagtttttagcatcttctccttggttctcaacatgagcagcaccctcttctcttacaccacctagttggagaacatgggcgggggagtccgcttccttcataacaacgtccagaggagctttcttgcctacgttctttcaagtgagcaccatggttgatgtggtacgacagctagcaaactttctttagctctcaatgaaagcaccaaaatattgatctagaattttggaaactaataaattagggcttaataaaggaataaaatagtaaataatggacaaatgattttacgtagtttgggcgttaataatccctagtccacgagacagttgtattggccctttgggaaagtgtttgaataatacaagtgtttcaaatataaatcctaggtctgcactcctcttgtttctcttgatgaagaagagagcttatagaagtttttgtagaggttcgactattataaaatgattcaccctttgtacataaaaaataagggcatttataggcttacatgtgcgaaagggcattccctttatccccctagggttttgtactcaacatgttgcaagggttgtcactacaacatgacgatttgaccattggttggtaagaaacttcttcatcgtgtggtgtacgactgttgtgaaggatctcgtatggatagggacacgtgtcactcaaagatttcaccttgaaaatttgctacctagacaagccgttaaacaaaaagggtaattgtcatttcgggttttgaataaggtgttgtcaaataagctccaagattaacgagccaacgccttcctagatcacacagacctacttcctttttggaatacttaaagcttcgggtaactctgatccttcccaattatggatggatagtaagagtcttggatccctatccgtactcgctaatgttggggacctttgattggcttctgaaacataataatctttagcatcttctagcgacaagaatatattactcactgatcatccagagtggcacctttctatgattgccatgtatcaggcatctaggaatacagataacactgctaaattacttgtaagatttctcaagaatattaagaaactcacctggtcaaaccttgtgatcttacttattctctaagtaataatacaacaactaaaagtggagtaggctattagcatcattaccatggggtcgaacctctacaaattccttgtgtttttatttgcttaactattattattttattagtaattgatcactcaattcaattgctttaaaaactcagtgtcgttggctaaaagtgaggtcaacatacaacactgtcaagggtatggattacacaaaaaatgatgttgagaaaaatctattttgagttagtaatatagtaattatttatttttgtaataaataatttatattaaattaatttaaaaaaattgaggaaacaaagatattgtcaagacaagataccatcttgtaataacattacatggtggcactatgttccgtgatactatgacaaatggtgggcccccccccactagatttgtttttggatgattaattaactaatttaaaagataaacatttatttaaattcgaatttgagacatttcttcaaaatagttgagagattctttccaggtggtagagatattctctcaatcaattattagatatttagttaaaattaaatatttcaatttaaatataaattttttaagggaattattacatagaaaatataaattgacattttatttacaaaaatacctccataaggtaaagacaacatttata

SEQ ID NO: 164241 - DNA, 658 bp, Cannabis sativa
ttgaaatggttatggaaattttagtcagagattgtaaaagaagaaaactttttgtgggtttttgatattgaaggagagaaagttttaataggtttttggtttttggttgttgagcgaataaaaatgaaagaagttagtgggagattgttcccaaaaaggtttatatatttctttcttcttcggcaaattggggagagtcggctcaagcctcaagcctccaagcaaagcgggtattaggagaaatgtgtttttactattatgcccttactccagttgtggaattgcgcatttttgttttggtattagaacagtgaaatagtcattttgtatttgaggtgagggaatcttctttcaggtctactggtctagtcagcagctattgttaccgtacgccctttaaacatggcacacgtgtttgtgctcgcgcgccaaaaaaaaaaaaacaaaagcttctcttgttcttgttctgttcagttatgtttcacctagctttttactgaccatttcgaaaaaaaataatattgatatattttttgaaaacaataatatatatggggtaattctacaatgcacctcttaaaagagatgtactgatgtactctttatttattttatttttttgagtcaaagtgagaatttcatttaaacactttcagcc

SEQ ID NO: 164242 - DNA, 2894 bp, Cannabis sativa
gagagagagagagaggaaaataatagttttttgtctatttgcttaagtgtggattaaagtatattattcagcttattcaactaaaattgattttaaaaaattcactaacttaactaaaagacaagattaaggtaaagaaaattacctatttgtccttttcttctctaagaagtaagctcaattcttaggggtaatatggtccaaaactataatcccaaaaaaaatttaacattccaaatgtctaactatattgccccactatttctaaactactaatccctgtctaagtgactatacaggccatatgtcgcattccactattactggacataaaatatgaaaatcataaaatttcacatttaatatacttagaatttaaatatatctctataattacataaataataattaaaagtctatttctgaatataagctctaattatttactaatttttataataaagctaagcagtcattacaagtttacttttaaaaatgtattaagaatgacttgaaggtttgattacaaaggaagacaaaatggtttgggtttgaggttcaatttaaaatatttcataactttttaactaactacattttttttacaaattaattttttttaaatagggatatttatgaaaagtaaaaataaattataaaaatacgattttatgaaattttaattttttagggtctataagttttgaaggagcactattccaggattccttctctagaagtggataagatttaaattttggattctttaaaataaaaagaaaaaccattaataggaaatttaatataaaatttctctctaaaatatgaagattttacactatgtagttgcaaataaaaataattaaataggaaatgagctattatacgcttagtagtgtctaacatcatcacaatgtggtgctttataattaaatagttattaatattttttatatataataattataaattaaaatatatgagactaaatctttaggaataattgtttggtgtatagagtagagtatagatgttggtgaattaatgtatagtaactatagtttatagttcctcacccgtacaatactttccaagctaattcctcaataatcataacaaatattcccttaatcaattcttgtaatagtgagaatttgtaagaattaaattaatcatggatgacaccagttgctccataaagccacctaactgtctaattaccaaaattgactcacattaaactctttagtattacttgtaactttcatgtaggtatgtgagcaactaatcatattaatttattatatggttctattataaagcaagtgtgtgtaatgtttcctagcctaaaagacacttgcatcaataacaaatagtaattcaagtgaaaaaaggtgcacttattttccactcaaagtagtcagtgcagtgctactgtgtaagtgtgaagaggttttggttttgattttttttttaaatgaagtgcggcagagttattattattagttttttttttttttgcacaaaagtaaataataaataaaaaaaaaagaaggattttattatctctgttaatttttttgagagaatatctcacctaaattgaattacatatatatatatatatatatttctgtatatacgaaaacaaaagctgaagttttctctgtactttcaccttgtgagctacctagctaatagtaatctactagaattgtctctcttttgctatgctctcctccatttaagaaaaaaaaatatttatgaaagtcaatatatatcattaccaaaatatcctctttaaatcttattttttttaagaactatactattactaaaaataatattaagaactaaacttagtattattagctagctaattactctctgatggtgcttcagggatagagtaattgtcttaattaatgctaattataatattctattttatttatttataaacttcagtatgtatactgttactatacattccaactttttatatttacaagtgccctatgaagaaataaggtagcacatttgttgacaaaactcaatccaggagatgattttctcatttgtttatagatgtaaattaaaagttgtattgctcaccaagttggtgagtatgtttgttgttgatcaatgaagaattgacccttttcaggtaaaaaaaaaaaaaagtatgagctaactcacatctcacgaaataggatgaatcattcatgccccccacattaatcctttcttgttaaatcataagttcaataataaattaattttaattaatgtgggaaaatggactttagagcttcaataaaatagaaataagtgatacaaatataaaatataatttattttatgaaaaatctactccaatagctactatgataaattgttgagcaaatttcgtcacataacaaaaagtgatttaaatttggatcacgatatagcataatacaaaatttacatcacaataaatgctatacttttataatatttatcattataccattttttttaatattttattatttaattttagttagcatgatcatttgtattaaatgacttacataaataagatacactattagtgctcaatactctcctagttgtcatatcactattagtgtaattaagtatcaagtctcatataaaaaaaaatagtttttagacaatatcactaaccaatcgtggatgccacctagaatgttctggacaccactagtgcccaatatgaatgatgttattataaattttatatttattattacattattattattatggtaaatactattttggaacttgtgttttacaaaagatactaatttggaccctctattttgttaaatgacaaagtggaccatgtattttctaaaattatacaa

SEQ ID NO: 164243 - DNA, 1130 bp, Cannabis sativa
  modified_base (1084)..(1101): a, c, t, g, unknown or other
gaagaagaagaagaagagaaggtgagagtttcgagggccagtgttccgtttgtgtaagaggaatctccataggagtatgtgtaacggcagggtggtgatggtggtgatgagtctgaaatattgcataaggtactttgcttatccaagtacatacactgttcggatttgcaaggaagaaggtggaaagttgaggaagattcgggtcgaaacagaggacccttttgggtgaaacaatggggacatgggtggcattgggtccagatgagatcgcttcctgtgtcagcaatggctagaattgggaaaggaggtgtacctatagagatgttgattagatattctcctctgctggggaataactcagattggccggcactagtagttgtagtagtagtagtagtactgatgttgtttttgttcttctttttggttaagatcaagtggttggtgcggtgggtggatcgttcaagggccatggataagcgttgccaatgggtttgtgaagaagaatagaatggagattttggcgagtctcgatggattaattctaagttaatgatgtcatcaccattatttttgcaagagattaatgaaacagtagttattgtggtgaatgcgatgaacaacaaccaaactataatattatgctgtgacttcaacattgtcatttatcccttcatagagtatattgaagtatatttttatgagtttattttttaagatttagaagcctatatatatattattatatttggatgtagaaacataatttggattttttttattactatcatttaaacaaaattcaaaatggtatcaaacttttctatcattcatcaactatatttaattaattttacaatctgaaatatatccaacatttatggtataaaattatgccaaaattaaatatcagatatatttttagatatatgtaaaaattattctatatttgaccaaaaactatatatttacaaaatttaatatttttattaaaagtataaaaaagtaattatcattaataaagagttatatttgaaacccataaaattataaatacaccccattattaaaaaaaaatataaannnnnnnnnnnnnnnnnnattactcttaatatttttttaaatttttt

SEQ ID NO: 164244 - DNA, 2022 bp, Cannabis sativa
  modified_base (1986)..(1991): a, c, t, g, unknown or other
acacacatatatatacatattttgaattagggttttatatttagctcaactccttacaagatttggattatcatcatcatcatcatcaacacaaaaataacaagggttagttgtatatatatatacatatttgtgtatgtatatgtatatatgaatggtaagggaggtgacagaagagagtgagcacacatggcattttcttgcatgaaatgatcatgctcgaagctatgcgtgctcacccccttcctgtcaccccaccatcatctctctcgatcatcactcgatctctttatttctctattttttttttaatttttgggattatatataaatttttaggtctatatatggattaattcaatttttttagtgattatttgcttattttgtgtgtttatgttgttgattttgcatgagagaatatatataatcatgaaattaatttcttcctctcttaattaaattagggttttatcattattagggctttggtattgttattagtactgttttattgattctaataaattttaatttaattaattaattttatttttttgcaggcctaataaaaaagattattatagctactaattcctaagcatggttaataggtagattagatctgactaattctgatataagcgtgagatgctttattaacagattatatatatatatataaatatattttaaaatatattaattaatttaatttaatatattaaataggactatactagtagtctagtactatctgatatgattagtatcatataatgttttgtgaaaatttaattgattaattaagtgtaattatatatatatgttattaattttaataattagggttttttttttagggtttctagaattactcataaatattctgaaaatatacaccaaaagctgaattatattcatcacttttccctaacaaaaaaaaaactcaaaaactacagctaatttaatttcatttaaaataatattttgaggaaaaaaataatatgtttttggttgataaattaaactatatatataaacaaatatttatagggagaaaaatagaaaggggaaagcttatagctatagctattatggaagaagatatttaagtgtgtatatacatataatatatcttaaatttgtgaaaagatcaagagaaacaagagctaaagatttgtacagaagagaatttttttatatattaaatatatataatacatatgtatatgtatacaagttataatattgatgcaataattttgaaaattagcaaacaattaatttattattgtgttcttattacttaaggtttaggtaataataaaaaattggaataatttcgttttacatctatctgctgataattttatgtatatgtttatatataatatatttatattatatgtgtgtatatcagtgtatgagtgcaggatacagtatgatacatacgatgatgatgatctcaattggaaatgaaagtatatatatagctacatagatatagatagatagatatatatatacatatgtaatattgctcagtagattgatgaaatttatatatataaatgtatataataattaatcatgtaatttactcattgtgtagtgatggaagatttgactcattggtagattaattcacaaatcattgtgtagtgatgaagatatgatttttcttttttgtaaggagtgatgaagttaatattaattacctttttttttatatgtatatatgttttagttatatatatttacaatgaattgtattgcatatcagcaagtcttcactgttctactgatatttcacaattgtattatctatgttaacacattattacacatgaaatcattattgtatcatttaattaatttttaaatgaaatattgttgtaattgtatcgttttattatatttgtgagcttaaatagcggcataagtatctaaagttttatgtttgtaagcgacataaactcaatnnnnnnttttagcggcataagtacctaatgtttgtaa

SEQ ID NO: 164245 - DNA, 2162 bp, Cannabis sativa
aacaatcaaaagcagcgaaatgcacttgcagaaaagagcaagctactaacgggtgtcaactggtccaacagttgcttgtttgtacagcccatagagaatgagcttgttttcattggtggttgactcaggcagggtctttgctttctcagcatgctcctcaaactcctcctgcataaacatgaagagttttccgtggaagaaaatgatcagaacaaaaactaatcatggaaaataattcatcaatctgtaacatagagaccaaaatccatatgtttcatgaacaatatacaatgaataattgtaattaatgaaggtaagcacagatgaaaagaggctactttctagtaacctgcagataatgagatgactatgctcttcgtccaatatgataccaacaggtgttaaacccaataatgatttatttctctacagcaagtaatatgatggttgtgctacacaaacacaaccatggtcaaattgtacaaattttgctataaactttaacaaacataatcacattacaataaaagtcattcattttcagtttcaaacatgaaactccagtaaatctctactatattgtactcacaccattacacttatacttgctttttaaagctcaacaaagttgctttgtgaactaaagttaaaaactgaatccttttgttgaacgctataatcactgggatgcgcaaaacacgaaaaattcatgtaagtagctttactcaataatttcaatttcaaactttaacatatttccgaattcctcaacatctaaatctcctttttaagtaaaagcggaaaatttaccaaccttcagtacaacttttaaaagggactactcaatgaactagcagtgaagtgaaaaggtgaatgtggctaaacacttcattctaagagtttctatcgtcaaaagcaacttaaaaagttgaaaaaaaagaagcacccgcgacaaaagaaaacaaattcatattactggaaaatcctggtatcaaaaaaggggaaaaggtgcagcaataaactctacaataacaagaataaatatcgggaattttacaacgaaacaaggttcgctatcaaaatcagtaaaaaggaaagtacaaaaagatttgtattgaactaatgaataaataatgcattccgatcaaagttacttaacgaagatgtatgggaattgaatcgttgggttaaatgtttccttaatccttataagaggtggtcaaaactacaagaaaatgtgaaattagctctatgttacactctcaaactaagtccaaacaactcagaacttgacagtaatacaattcatagagtatacttctgtcaaattagtctctcataaaaagaagtcaaaatcactcgttcaattcatccaatagagacaaaaaaaaatctagtcaacgaacaaaaccagatctactattgaaatttcaaacatattagtcagtttttgccaatatatatgtgtctgttttgtttatacgaacaaaaaattcatcaaatgaaagatcacagatctggacaattttcttcatagcaatcgaaaaaaaataaaaaaaaaatattataaaaggaaagagaaagcggaccttcaaagccatggcgagtgataatcggaagcgggtttgatgatggccttcgcttgatgacgataatttagcgtcgatagtatcgatggtattgtgtgagtggcgatgggctttatttatagaattttaatgagtgagttgtaaatctcacgctcaaaactcaaccgtactttcagaataataatataaaaaagtgtattcgattcggatttatcatatttattatttatgataataaaagccaggtggataggaagttgagcgtctttgtgatggacgtctacaacatgggtctcctccactccacctatatctcataggcccaccattatttgagaaacgcatattgggggtgaaataactttaactttaccttttgtaacacttaattataaaaattaaaatttttgtggcaaaatctactaaactcccattaaatcgtactctgtactcttccgtctaaaatttatatttaaatgtcaaggtggactgtccacgtgtaaacacttgtacaggtaacaaattttgagtagcccacataatattaattttaaaatattttaaaaattaaaa

SEQ ID NO: 164246 - DNA, 1443 bp, Cannabis sativa
  modified_base (1415)..(1418): a, c, t, g, unknown or other
gcccactctcttcatcttcaaggggaattttccaagagtcattagcaaagtgagcatcaagatacacttgctgaaaagtcgctatcagacatacacgatggaggttatcattagtaaataacatctttccatgtctctcccatatgttaatactagtcaacataacatttgttctctatttcatgtcgataaatggaggatgtcttttgaaagggacaaccttttgaaaggtgacatgtcttgagggaattttgggtgtatagaattacttgttgtgggaaagtctacagttactcttagtgatattttcaatatacactctaagttaatggagatcgtagaagcctttctttttatgggtgggactcctttttagatcacacaaaaaattgatctcatgaggagttagaataggccaattctgtagttgataaaagataaagattgtaaaaaaaatccggtaaccactcagatttatctaataagggaaaaccctaaagtaatgagcaatcgacaaaccacgattggagagtcatgaatgcacacacattcatatgaaatcttgaccaagagctacaacaaggattttgagaaccactaggacatccaattctgggttttctaacaacaatgtcaggtagtgaatactcatctcaaattagttcatcatgattctgtgtattggaactaaagacaagaggtcatagttcgaaggctcgatctcttgggtccttgctatcaatagtaatagtgagtaactcagtggctataatatttcctccacaggccttgtctagatctttagattttggcatcgtgagctttgcatgaatgaattgggttgtgtgtcggtcatattctcacgctaggaatatttactctcaactcagttttcctcaactttgataagctgaatatcaacttaattcatcttaagatatctttcctcaaaatttagacaaactgcactttgctggaatgaataatttcaactcaaatagctcatatgaaaatcttatttttgatttttggagggcatatcaatggagttaaaggatcttcaaaaagatctaaaatccttaaattgaactttacaaaatttgaaattttttgaaattaacttaaatttaaagaacacttggagaacacttgaaggattgatgaaagcaaagttttcagactctccattctctgttttggttgtgtggaccagatgagaaaagagaatggaggagttctctatttacagcaattgatctcctctattcttaggctaaccacgaatagatttaaatttaaatttaaaaagaaagataaagagagagagattttatctctatcttgaatattttgagttttggtattttcagtaggggtgttcataaaatagtcgatccaatccaatccgcacgatnnnntccaatccaatccgcaaagtgcgga

SEQ ID NO: 164247 - DNA, 3634 bp, Cannabis sativa
  modified_base (3086)..(3087): a, c, t, g, unknown or other
atagaggaagatatcttaaaaaaaactagaaacagttgatcaattcatacaaggaaaaatacctaaagacgataatggaacattgtcagaagaagtcgtgcaaaggagaaaaagattaaaggttgatgtgaatgatggaaaattcaaaagaataaacctatctggagtcgaaaatacaatttttgggaattagaatactggtcaaaattaaagttgagacacaattcggatgtgatgcatattgaaaagaatatttgtgaaagtgtctacgatgcaatgttacgcatagataagaagtcaaaggatactgacaaggccagacttgacttacaaaggatgaacatacgctaagaattacacttgaagatacaatgagataaatggtttaaaccacaagcatgttacacattaccattggttgatcgaagaaaattttgtaagtggttagcgtcagtcaaattttcggatgggtatgctgcaaatatatcaaggaatgtaaatataagtgaaggtaagactactggcttaaaatgtcatgattgccatgtattgttgcaaagattgtgaacagttggcttgcgactgtaagtcaaaaaagatgttatacttgctatttctgagctctcattattttttcaaaaattatgtgcaaaaatattatatgttgaagacttggattcactagagaaaggaattgtgaagtgcttatgcaagcttgaatccatttttccccagcctttttttatgttatgatccatttagcagtgcacttacctttagaggcaaagttgggtggtccggtgcatacacgatggatgtatcttattgaaaggtaatatgttaatgaacgtgcatcttattttaaaaatttacaactatttttctaataatgaattttaatttttaggttcttaggttctctaaaaaatttagttaagaatagagcatgattagaaggttcaattgttgtaggatatgttgctaaggagaccttaacttttttttcgatgtatcttcacgggatcgaaacacaattcaatcgtccagagcgtaattgggatctcagtgaggtacaaaatgaatcaacgttgtccgtttttgatcaacctacaaggttatttggtagaaaagaatttcaagatttagaacctaatgagtataacaaggtgcactggtacattctaaataattgtcccgagttacaatcttacatcgaggaagatttatattcttcatatatatatattttagtttttatatattttgcataaatatttatattgtcttgttattattaaatagtgagcacaaagttttattacaatctaaaggtatagtagacatcattcgaactcaagagttggaattttcattttggttcaaaaaaaaagtaagtagttttttttttcttcataacaatgttatttataatttctaaacgctaatagttaaaaataattttacagataaatgaaaaatatcaatcatcttctcatgaaataacaaaatcaatgttaactcttgcaagtattccagatcaacggatcttctcatataatggaagcatagttaatggcgtgcgctatcacactaaaatttgggacgtcgaacgaaccactcaaaattatggtgtttgggttgagggttaacatggtggcagtacgtgtgacttttatggtgtcataatagaaattttagaagtattgtatatatatgaccagaaagtggtactttttcattgtgactggtacgacactgataccaaaaagaaaagaaaacaccaagaatatcatatcacaagtataaatgtgagctcaaaatggtataaggaagaacattatattcttgcagaccaagcaaatcaagtattatatatgcaagatgacaaatttggtcccaaatggagagtagttgataaggtaaatcaatgctatgggacgttccacaagtaatacttgaaagtgttaatgtagaagaagatggttctaatagttatacagaagcttatcaagaagagagatcaattgatattgacttaacatttgacgagtcaaatgttaaaatttctcttaaccgtcaaaatacggatcttatagagattacctcatcacatattaatcatgaaataaataattgtgatcaaattttgaatgaaaatgatgtaagggaaagcgtagaagatatatcagatactgagactgatataggggatattgataagaaattatagcattctgaatgttcatatacagatgaaagtgacgaaagtttatgagtaattttatattgttgcataaatttcttttataataatttatttatttattttagtatcactttaaatttattagttatttggattttctaggcacatggcaccaaaaaaaaaaagaatagtggagatccctaataacatcacatcaacgcaaaatgttttagaacaatcattcgacatcccgactactagtccacctttaccagtttcaagagttaataattccactacaacacaaccaagaggtagcaatcaaaatgaacaagaggatttagaatatgctggtatgatttttttaaaattttattaataattttataaattaatatagtttgtattaatatatttttatcaaatatttctctgagatatttttttatttattttaatagttccaattaagaaaagaactcgtggtcaaaatagttgcaaatacaaaccaaaagttaccagtaacatctagaaagggagaacttcactcggtaggagacaatgcttcacaattagcatcagaattttgtttttagtaagaaatcatgcacctcttaaatataaagagtcgagtcatgtcccaacagagcataaggcaattattcatacttgtattaaggttacttcttattcaaaaataacttctttaattttttatgattgacattgtaattttttatgtaatgaataaatgtgtataatgttatttaaatatagctttaaataatttgtttttattatataatttaaatgaatatactctaaattaaaaaaaaaaatctaaatttttatgactaaatattagtcactgaataattannttatgtaattctttatttattattgccaacgaaactatttagtcacaaaatattcgccatttcatgattaaattttagttgttaaagtttacttttttggttgttgaaagtgcatattagtatttatgtgaccaatatatcaatcttattgtgactaactttaatatattttgtaacaaactttagtcatagaaaataacattattcgtgactaaatatattagtcactaaaactcttctacgatcgactttcgactttcaacgactaaatggtgactaaaattaattagtcgcaaaatatttttggtgactaattaatgagttttaatgaccaaaaaactagttggcaaaaatggattttttttttttttgtattggctctaactgaaatactattgttaacgcaaatttttcgttaactaaacttgagcctcacagtagtgattttacacagaaaaaataatagctgttaaaataaaaatatgaacacatggtttttttacgtggttttgcagttaaaattctcatagtccacgagtcaatctta

SEQ ID NO: 164248 - DNA, 2125 bp, Cannabis sativa
  modified_base (2080)..(2086): a, c, t, g, unknown or other
taaaagatttcgatattaagctgcccgatatgtaatttatgacgacaagctatatcgtaggagtttcagtcgatcgctgcttcaatgcatcgatgggggcgaatgcgactacattctttgagaaatacatggtggtatttgtggtaatcatactggtgtaattccttggccctaaaaattatgcaacaatgctattattggccgaccttccaggcagatgcaatcagttttgcaagaaaatgtgataaattctaacagattgccacctatgttaacagaacaccaagccagttaaattccatcaccagtccctggccatttgcggtctggggcataaattcaattggcaagttaccaaaaggaagaggatgagtaaagtatgcattagttgcagtagactattttaccaagtgagatgagaccgaagctttagcaacactaacaagtgcaaagttatgggagtttgtctatcgagcaattatttgcaggtttggcattcttgaaaactaatctctcataatgggaagcgattcgatagtaaggaaatccaaaagctatgcgatgatccagggatttaaaaatctttttcagtggttgcttatccttagagtaatggtcagacagaagcaatcaacaaaattatcaagcataccataaaaggtaacctcgaagagagaaaaggcgtttggccagaagaacttctgcaagtttattgtcatacaacataactcctcgctcaacaattggtgaaacccccttttcactctcttagtggtgcgaagccatggttccaattgtggtaggagctgaatcgctgagaaaagatattttcaacatcaaagccaatgcaaaatactagttgcttcaactcgatttgctagaagaaaagcactatcaggccaagataaaaaacaaagtctatcaacattgcaaagtttgctatttcaactcaaaggttaaagaaagaagtctgcaagtaggagatctagtattgcaaaaagtcatgcccaatacatggaattctgcacatggcgtatttggagacaattgggaagctccttacctcatcattgaaaaaaattggcaacgcaacttactgattatctgatctcaacaactcagtcttggatagagcttggaatggacaacatttaaagttctattatcaatagtacccgcatatatatacttagttaatttatttcataaatatcctaagtatagggggtataaccatatattgtactattaattatctaatgaattatcaattttcaaagtacaatttttgaagttttttatattttttacatgtttatacttagaaaattttctaaaattttgtcttatgattataaatatcgaaatgttcatcacaccaagttgtgaaaagtaatcgcatgggcaaaaggcgactatgaattatgcaagtctaagtcttttgacgcattaagttgcaattaaatatgcgcatcaaattaaatgataaaagtacttggtcttaccaaacaaaaggtgtatcctcgaagggatacatttttcataaaaaggcaaaacaattatcttaaaatattaccaagtacaaaacacgagtacccatgtatcattaaaaagaaagttcgataaaggaaaaaagattaggcgatatgggcattgggatcatctgcaaccttgcttgtaccatctgcgactttagcaacagtcgcatcttcgacatcattggggaaaagatttccacctaacccttgagtctcggtaggcaacatggtacgaaaagccttagccatctcaactacctctagtcctaaaattgcgaagttaaagtctggcagcttagtcagggtggtgtagatgtagttagagacagcctggtcgtaagccttctttgcgttctctttttcagcctcaagatcactggtaagaccagcattgtcttcctctagcttcttggcctgctcatctagagtcttgacttgttcttcagacttgttggccctctcttctgcttgacctttggccttgccaagatcgtcgacttccttgtctttggcagtctggtcttgttgggttttatgccctnnnnnnnactcattttaatataatcagatttgcttattaatataga

SEQ ID NO: 164249 - DNA, 1237 bp, Cannabis sativa
  modified_base (1186)..(1192): a, c, t, g, unknown or other
aataacaatgctctttatatttttttatccaatttcttcgtttaattatcatgttggacatttcacgtgttcactcaaatacatgtggtacatatacattgatttaaattatttaaaaacttcaaagttaaaaaaaaaatattcttaaaattttaaataataaaataatgatcattaatgaaacttgtgtgagtgtgtttgttcacattgttcatgtataaatatataatatatagtatttgttaaatgtttcgttattttttgttaagcgttctgcgaatcgtgccgcgcatttcattgcccgacattctatttctctagctgaacgtatattttctattaatagtgttcctttgaatttgatgtctattttaatgagtgattgctcaagttaataaataacacttctactcaaaaaaaaaaaaaagcagtaatttataaagttttaataacttgataaatgttatgatgagtgtcatttatcaaataataataataataataataatataataaaataaattatttaaatttaaaaaatatatactttttaaaacttttttttaacaaatatcttaaaactaattgaagaaataaaattaatagtactcttcaaaccgcttttacaagtttttaaatgacgcttttgtacatgagctttaatgactctaaaatacagatggtctcaaaagtagggggacaaagttctaccatgaagatcaatatgttagaagggtagtggaggaatgttgttcaaatgtgactgtgtacttggagtgggacaagtagtattgtctctactacttgtacttgtcgtactcattgcacaacaacctcctcctcagagacgtgcttgctttaacatatttgttttagatcgtacactcctttggtatctttcacgctatagctcatgctcatagtgagggaacaacacttgaagattttgcgaagtcttggccccgcagggtgtgagacgtggtttaaatttgggtggaatctcctcctcaactctattgatggtcatcccatctaagtgctattgtttcgatgtgtaaagtagtgataagtggtgattatgtgaggaaggtgaaagaggggctgaggagatatttggccaagataaggagaccatggagaaagaatggagagatagaaaagagggagttgttggaattattttacnnnnnnntagatttactaataagtatgtttcattaacattctaatatgaatt

SEQ ID NO: 164250 - DNA, 827 bp, Cannabis sativa
  modified_base (757)..(759): a, c, t, g, unknown or other
ttttcatctatacatatcatacaaatattaattaacaattggattacccaattttgcatgtcttttgtcctatctttattcaaacaaagttttatatatatttatggaatattatcacaatatcgtattcagaaattcaatattaattacatatcatagtttagtactattgtaataactagatagttaaattatatgaattagtagataattaataatttaattattaatagtgattgtatatttttttagtagaaaattaaaacttattgtcaaaaatagacgatataaaaataatttcttaattatagaaatatattagaattctaagtgcattatatatgttatatgtgaatttttataaatttcatgtttcatgttcagtaacagtaaaatacaacgatttagttactagaatcatttaaatatgataaaatatcttagaattagcagagcaagttagttaaacatttagaatatcggaattattttagattattgtgttggactattttacttctatgtaattaaattaattcatatttaagacatttttagtggcattgtgtatattaatccacacattatttgattactaattcttttttttttccccaagtttcggccctaagcaacaccaagtaaactagaattttaatttctttcaatttcaaacctgaaaccagagattttcaactagaaattttataggttaagaaagtttcagctcaaggtaagtgttgcccctgattttgcnnnatatacgtggaccaaccgaacagggacacgtggatcaaacatcctaaatacttgaattatttgctaag

SEQ ID NO: 164251 - DNA, 895 bp, Cannabis sativa
cgttgtaagagttgtagagatccaaaaacaacatttaatcacacttagaaatgtcaaaattatataatttagtaacatttataacctttgtaacaattgtaaaaaatgtaagatatgcccatgtgaggtaaagtaaagtgtcactaaatagttcactaaatagttcactttagtgacaattgaaaatgtcactagtaaatattttatatatttatttgctatatttaaaataatattagtgacattttaaaattgttactaaattatattactaacatttataaaaatgttattaaattataatttttttcattttaaaaataattttaatgtcattttaaaattatgactctaaacatatcattaaattattattttataaaaatatatacaaattattaattttgttaatattaatggtatactatttaaaatgtcatgattttattaatattaataccaatttaacttattataaataaatatattataataacaaaaaataaattatagtaaatacaataataaattatacaagcatgtctcaaaataaagtctaaatatttcttaaacaacaataaaattacaacagtattgtatataaacaagatatggtgaaacttttattacaaagaaattaaaacaaacaccaacaaaaaagaaatatataatttacaactttttacatacacaagtttaaattgttaaaatttaattttgatttttatgaattaatttgctgtaatgattatatgtcttagtttattgttcattttctctggctcttcttatacttctacctgtaaaacgcaaagtataatacaaattgaattagtaaaatattggggaataaacaattaagtaagatgaaacttgttaaaagacaaataacata

SEQ ID NO: 164252 - DNA, 1055 bp, Cannabis sativa
taaaatctatatgtttcatgagtttattttattttttatgttctttggttacatatacaatttgatagaatttcttctaagttagaaaattggtcatcccttttataatgtgatcactgctatttatagaagtaagatattaattatttttgatctaatctgtacaacagttatgaaacgtggatattcctcaaattcatatatttttaggcagaaaataacatgtaattgttttcaaaataaaataaccgtcctatttaacgtactcttaatattctgtaacatacggttgccgaaacacttgattgtttgatgtaaggtccctgaaaaatttgtcaacctttggatgcatgcctcaggtaagtattcctcaaatagcaaactgattttattgatgaacatgagcaagcttaagcaagttaagcctctcaacgttaatgaatattcttaaatgccttgacaaatttagcatctttagttatatgttaggaacatgtttagtgtcttgcgtttaatattgcaaatgttactttattctgagaagaacatgtatgagcttcatactaaaatgaagctagttatatcttgacttttaaattaatcgagttaatttattctctttgttgtacacgtgtggtgcaactagacctatttgctcgaagtatgtgtataacaatttattacaacaatgtgttttcaatcaaaacaaattttatcatggttctgatatagttgaggcctaataattttttttttttgttatttttcaaatttttgtataaaaataatgtttttaaaaaacaaaaatacttttgaaaattgtgagccttattatatgagagctctaaccctgattctgttcttagagctgactctgtttatattatagataataagttatgattaagcctatattaataaggagggtggttaatactattttggactatattttgtaagaattattgttggaccatatgttttgttaaataataaaataaattttgaattttctaaatggtataaataagatcctgagcttaattttaatatat

SEQ ID NO: 164253 - DNA, 679 bp, Cannabis sativa
attcaaatattatgaaatatagtttttacaattatattaatgctctatgagagaagagatggtgtgtttgaattctaagtatgatcacctaaacactatataaatgagtctaatgtgttcatttagaagagaaggtttctatataaaaaaaaacacattgctagaaaacccatcaggcttgataattcccaaagttatttttatgagagttcctttgtacttagagatagggagaaatatgtttttagacaaaggtgtaataacttattcaagtcatactgatcccactaatctacactcatgagtgagtgtatatacatatatattcttcttttgttatatatattattatattatatgtgttatattgtttttcttctaccttttaaatatatatgcgatatatatagtgtatatatgtgtattgtaatatatatttaattaatctttgtattattttataataaaattataatatgtgttgattttcttgcattgtaataaaatctcaaaatattaaaattatactttccctaacattaaaaaagaaattcagcatggggttagaattataaggacactactacaaaaactcccctttagaggcggtttttaagccctttcagcgtcggttttcgcgaaattcgctaccgacgctgatcagggcgacgctaaaggg

SEQ ID NO: 164254 - DNA, 973 bp, Cannabis sativa
taaggctgaagcacatattccagcactcgaagaggctgaggtgaaaaagaatcattatgaggacgacataccagtctaatctaatatttttgaagatatatgtacatatacatatatttattaccttcttattatcatctattggagatttagaagctatttctatgtctttttagtttttggaattatgttttcaaatataagaataaaaatttattttttattattttaaaaatttaatggtattttagctaaaattttctaaaactaatttaagatttttgcattaaattttcttttcatattctacactataccacgacatgaactcagtcccactctccacccgaacccgagacgtggcctgagcctagaccaatcatagacctcggatcctagattcagaccccgaccttctaaccttgaacccctaaccccaaactcaagacctggacttggacccaaacatgaactttggatccctagacctggaaccagaccttaaccttggatcccaagacctggccctggaccaccgagacccatgacatgagactaagacccaaacccaaacttggacctggacccaaactctgacccgaatctggacccgagttggaccctagacctgaagacctggactctgaccatagacctagccgcggcctagaccccaagacaaacccgaaacccagacaccgagactcgagacccgagacccgaacccagcgctcaccccgggactaggacccgaccccgagaccaggaccctacctttgaactctaatctgaaccttataccctaaacccgaacctaagacctagatgctgaaccctagaccccagcccaagacccaaagtaagagaaaatgtaaaaaatatatatatatatatattagacaaaaaaaactaaattcgcttttggaaataaaaaaaaaaaaacatttttatcttttctaatttttttttaatt

SEQ ID NO: 164255 - DNA, 1348 bp, Cannabis sativa
  modified_base (1291)..(1306): a, c, t, g, unknown or other
tctctctctctctctccctcttcaaattttccttcaagaaaagaagaaaaaaactcttcattttcctcttgcaagctaatgccttaagcttcttctttcccgtggttcttacttttttttttctaagatccgaccttcccacgagcatccattagttgtaatcagtgggtaaatttttgaatctcattttcttattgttttattgatttttccattgatgacttgaagctttttaaattcttgattctcacgttagattgtaatcttttttacgttataatccgcatgacaactttaagatgtataatgtatgatttcttaatgaaaacgatgaaatttgagcttcgtttgattcttaactctttgagtcacgaagaacatgaagaacaatgtttgagtttttaataagcacatgggtttagtttagggagatggccggttcatgcccaggtcttgaaactttggctggcactttctttggtcttgaatctctggctggtgcatggtttgtcttgggactcaggccgacacatggcttcagtcctagcaatttggtcagttcaggcctttattcgaccttagtaaggaatcctcatggctttttgagcctgtctcacctttatccattacttggttccttcaagaactatgtacgacatatcttaggttgagtctaccttggctagtgagtgatctaaactcaatgtcacttgtggttttgcacctggatcttgttctttcctatggctttgtacattaggatactaactaataccttaaggtttagtagatcagtactttgtctaagtcttttcatctttatcagttgctcactgccccttgtcttttgtgtgtagatgaacccgcgtgacttttagggaggtggcatccagatcgacaaagactttcttagtcttctcttcgaagaccatcgcccagccctttcatccagttcttcttccggggttcttctgttagccccttgagtctagcatcactactatttagagcaaataggcagtaaattttacagtcggttcatttaggagctgaaccaagggttgaggcagttcctccttagtttgtagacttacattgtccaggacagtgtgcatgttacgtttcccataggtcgggaaattttatcaattagtgaccttcctactagtgagagtacggttgttattgctaggcactccgagcctaccatggtgaggaccaagcaaatgttttgtaaggcacattctgttggattatcttttaccaggaccaagatttactaacaagtatnnnnnnnnnnnnnnnnaatatgaatttctaaaacaatagaatttaaacacgtataaag

SEQ ID NO: 164256 - DNA, 1940 bp, Cannabis sativa
ataatcacgtacgactctttgtcctcttttttattataattagtactacttttcttctcgctcaatggttggttgaacaagctatcatgatgttgatgccccgacagagattcgatggagtacttgaatgaagagtacttttgatcatgaggatcagaagacatattattattattatcagctatgtactatagactatatataagggtggtatataggaggtttagttatttttatttatcaactaacattcatatataatatattgcttattaaaaattaactgtacatgtattatgttattatccaataccgagagtgagagtcacaatagttaagattttaatattttagagaaaaagtatatgtataatatatatcctttgtgtttatccaaaattattaattacacgagaactcttgcatggccaaaaaacaaactcacaactcacatgcaactcactgactaaatcagtcggtcgacttttttcttttacagacttactgaaaacagtttccctgatcagagtcgtccattaagttctccaataattagaaggagaagaaaaataaaatatggggtcgctttttctacttattattgattggccaataatacgagaactgcttgagatcatagaagctttaattacatttacaatatatactagctagctagctagatctgtgaatcttgatttgagtaataatattatctaatgttatgtccacagatcattcagacggagacatgcacattataattgctatatatatcacacacttttcagttttcactattgatattaccaataattcaataaaatgactgttctgagctcaaaactccacgtgaatagggaaggtacttttaatcattttgaaaggcgcccgatctaaattaaatgaagctgtacatatatgattgtagtatcaaataattacagcgcagagtgttctattatgggacatattgcacgaattgctcttaattattttaagatgtacaatatcacaagggttgcatctctaataatttatatatcatatactatcgtgtgttgtgtgttgtttttatgttatttattaaagagaaatattttctagcacccttttacatgtcattatcattattggtgcaattaagtattgagtctcatataatttaatacaatgtatcgctatccaatctcaagacaatatgtctaaaggtgcttgacatcacggatgcccaataataatattatttgttaaaccaaaatgtgtaaaacccaatatctcttatagtacttgtcaccccatctctagtcgtaacattatttaaatgggtcgactactacacatcatagttacttttatttttttactagcatgcaagtataatcttagctagatttataaaaattagaacatatagttgtcatatatataactattgagaaaatttatatgtaaaattgatatattttaaatttgattagatatataattatatctatatcttgactaccaatgtaggagaaaatttaaaaaatgttttttttttcttctgaaatcagttattacagtagttcttaacaaacaaccgtcattaacctatctcgtgggttcttaatcgccgagatagggtatcctaaccgccgtcattaacatatctcacgagttctcaatcgccgagatagggtactctatctcggctaagatagatcaacaactctatgtcgacggtcagatcctcgacaattgttaactgccgagataggtctatgtcgtgagtttttaaccgccgacatagggtaattttcttgtagtgaaaattatcaaaaatctacatcatctaaaaatctacttattaatttgatgagcataatgttttgtaaatttcccattttatttgggaaacttataaaaatactggaatttaggttaatttttacaaa

SEQ ID NO: 164257 - DNA, 2657 bp, Cannabis sativa
  modified_base (1215)..(1231): a, c, t, g, unknown or other
  modified_base (1839)..(1842): a, c, t, g, unknown or other
  modified_base (2553)..(2558): a, c, t, g, unknown or other
atagtatgtaagagcttcttttattactaattttgggttcaaaataatgcttaaaagttattttgtctcaccattatagcctctatctctttgtctgagacaggggttcttcttggctgaagggaagcttttcctcccaaagtattctcatggggtgccccccgaacatccgatccttgagcggatttccgatcactggttgcttcttgagtttctgcagctgaaactattcactaaaattcattacacaatttaccaaaatagaaaaactaattgggaaaagattccaaccaaccaacaaaacttatatcactattgcaaaggataaacatggatataataattatcattgtgtttgtcaatctgatcaaataaatgaaatctaatttccagtaaaagaaacaaagctaaatttagtcaatttagaaatcatccattttttatcaacaagttttgtcattttcctactgttagattcaaattgctaatgtcagggaatcataatgataattaataaaagacaatcaacaaaacaaacttctagctggaattattgttgtaatcccatgtgtgagattaagagattctataaaagattgaccaaagatacaaatttttattataattaggatcaaattgtcaggaattttaaacatgaacaacctaaaatcacacattacacatacaaaagaaaaggttaaatgttcattacttccaagatattagatataacccaattcacatttagtctaaaaacaaataattaattcccatacccaattctatgaagatttaacattcaacttaaaaataaaaaaaattatttgttaaagaaaaaaaaaggaaaaatgaagaacacaggtggaaatggaaagatgaaaggaattaatttagaatggaaatggagaaagagacctgaagatgagggttttgggtgtctatctgggaatttaatgcgaggaattctcttcaaaaggtgacctgctcctcctccccccatcactcacttcttctcctttttctctctctacaatcacaccacacttgtatatatatatattttcagaaaatatatacaaaatttatatttaattaaggctgaggatttttactccccaactttaggatgtattaaattattttctgggtgttaaaaatttttcttaaactattgagattgttagatttaagaatttttgtttaatttcattcaannnnnnnnnnnnnnnnnttgtttatgtactaaaccatgcatcacagactttgatatctaccaaatcataccctcgaactttgatatatagtaaatcatgccccctaaattttcatccatattaaattttttactaaaattagataaaagtctttcaatctaacaatctcaatagctcaagggacatttttaacgacattaaaaatttagggacataatttaatacatgtcaaaatttgataggtaaaaatcttaattagcctttaattaatagtttcatttactccttgctctattcaatataagagttttttcggctaaacaatctcaattattattcatttgtatttaactttttaaactcaaatggtaaaattttcccaaactattaaaataataataaatttagagtgccatcatgttccacgcttatgtgtatatttttttacatatgtcatatttatattagtacacataatattattattttaaaaatataaaaattatttcaaaatctataatatttttttatttttataattttatttaattttaaaataaatgttgaaaattatttttaaataataatattaagtgtgctaatataaacgtgtcatgtgtacaannnntatacataagcagttcatagtgacacttatccagataacactttaaatttgctaccacttcagtaatttaaaggattttactgccaaaatttgaatttagaggattaaatataagtaaaacatcaattggaaaagtttagccgcaaaaaattcttctttaaaaaaatataatttgggagagtttgaaagtgttattaggttacatagtaatactttttaaattccactctattttaattatagtaattgcatgtgaatttttattttaatgtttgacaaataaattaataattataaatagtaatattttgtaattacacagtataattacatctaattcttatgggagccataaaaattaaagaataattaagtattgaacagaataacactgaaaaatataattactttattattgaaaaaataattacactaagacttgaacacttgaccacaatacacaccaatcacccactcttttattttcactaacactcaacactcacactcatttatatacactctgtggagtgtggagcacttagattgaacacacactcactactactcacttgaaaactataaattctaaattttaaattaaacactataaaatacaaactttaaatgtaaaatagtttaattattaaacgcaatttatatatgatattgttgcctctgatttagtccaaaatacgtggaccaaccggnnnnnnacacgtagactgaagaggtttaactttgggataattcagctaagtctctttaatcaaagggatcagcatttaacatgcctcccggagaaggcatgtgag

SEQ ID NO: 164258 - DNA, 1138 bp, Cannabis sativa
  modified_base (1062)..(1072): a, c, t, g, unknown or other
cagtacctagtttatcacttgagcaaaaggttgttgggtgcgaaatccaagtattccatgatctggaaattgaccttttgcttgctgaccgcgtcacgaaagctgagaccatacttccaagccgacaccttaagagtacttacaaatcatcccctatgctaggtgcttcaaaaggcacagtcctctagcaatttattaaaatgggccatgaaacttagccaattcgatatccagtaccagtcgtgggtatctataaaaggacaggcccttgctgactttgtagtggagtattcaaacttaaacgccctcccggaagatccagtccctcaactgactacctggaaggtctacatagaaagagcaaccaacgacaagggagccagagtcagaaagatcctaatctctccacaggggcaccactccaaagtggtttgcgcttcgggtttttcaccttaaaaaatgaagcaaagcatgaagctatgtcagtaggtctgaaattagctaagcaggtaggagcccaataggttgatgtttgtagtgattccctgttagtggtgaatcaaatctctagcgaatactagacaaagggaaaacggatggatacataagtcttgttgtcctagaacttttgcaaggttttaaaagttacaatgttttccaagttctaagagaactaaattcatttgcagacatgttagccaagctggcaatcagtatgtactttacgcttgatgacgttacggcgggtattatattctggaaggcagtcaaggatccccgttgctagtgagtacaaatggggccctaatactctaactgtttctctgccactagggaggatcaaagtcacttgaagctacgagtaatccaagaaggtagcaggttagtgtgactgggaaagacggctaaatgatcctggagcctatttgacaatatcctatccagagctcaaagccactgttacctatcttttgacaccaaatcagatcttgtccctgtatgaccatggtatgcgcatacgtgcctctgaaaccacctttttttgttgggttttatgccctnnnnnnnnnnnatttcaatataatcagatttacctattaataaatatcagaattaacattttatgttgtatggttca

SEQ ID NO: 164259 - DNA, 857 bp, Cannabis sativa
aatacaatgaatgtaagttctcaaatttgtatattttcatgcaaaaatcctatgttccatgagagaacaaatcacatagaaatcaaatatcactttatacgagataaagtgactcgaggtgaaattgaaattgaaatggtgcctactgaagacaacccaacagacatgggtactgaaattgtgacttttaataagttcgtacattgtatgaacttattgagaatcaaccttggagactaacagtaggacctatcaagctagcaatctcagagataaaaacacatactacatcaaaatttattataggaggaattcaggtggaaactgttgagtaaattccacttataatcagtccacttacaacatatccacatcaccatacaacaacaataacaaaataatagaaagtaagactcatcctaggtggctttgcctctacaagaccaagaaccagaagttagttacaactagtttttgtaactaacttctagctctgatcaaccgactcagtacactataaaatacaagaaattaaaagtaaaagtagaacagaacaaaaaaaaaggagaagaagtaagagaagattaaaccctagatcgagacttctgctccaaaatccagagaggaaaagctaggcagagagatagctctcgtggtgaggagatagaaggaaggaagtacatgcacaaagaagaaaaatgaagttagatcgggctattaacagagaagaaaaataaatcaaaaaaattgtggaaagaggaatcgagccttacctgatcaaatagtgtgacaggaagctccaacaattgtaaaatcaccattgttgatagtggatataaagctagatctctgagatg

SEQ ID NO: 164260 - DNA, 1904 bp, Cannabis sativa
atttacattctacttgtaacaaactatctcaccaagttttcaatttttttttttttttgaataatttttttgaataatttacgatattgaaatcaaatattgaaatcaacattcaaacaatatattttacatgtataaaaatattaagaatgcgtgcttgttaaacatatgttttcggaatattttttttaaaaaaattagtaagttatttactataactataatatacttcttatttttttacaaacactcttaaaatatgattttaattctataagttaaaagaaacgctttaaaaagcttagccaaacaagcaaggaattctcttagaacaaaataacaaatccaaaagcaaaagagggaagtctcctttctattcctatcaaattgaatagacacaaaagaattttattaatggaaataaaattgtagatgatacctcttttgaacatgaaacaaacacatccaaacctaactacaactccaatacagattgcattgtcaaaaccaaatttcctccaaaaaagatttatagatagaaccagtttcaagtttttaagaagacaagcctcaaaggacaaagagccttctttgcctcatcctgccccaagtcccaacaattccaccaaagtagtctcatggagaatctcctcaaccctgtaaaaatcctagtaaaataaagagaacgattagtatcagttgtctcaaatgaatacgaacgatcattcttcttgcttgagatgctcacacttaattgaattttcgtgacataataagcaataagatagagattttagactaattaaaaatgtcatattgctattggtgtaattaaatattgagtttcacatattttaatttaatatttattatagaatatcgttaactatttacaaaacgttctttaaaatgctctcttttatgcctagcatattcaagaccaaaatttctttttagcttacttttgatttgggcagccatatgggaaagaaaaggagcctccttgttatctttttgttttgaaaggattaggagaagggccaccttttcaaatgaatacccgatccaataaacccatattttgattgataagtgaaattttcatttccaatgaagtatcaagtgattaatcacatacatatatttaatagtgaaaacataacaagttaatcaggttcactcacaatttgatatgttagatgtacaaagtgcaagatcagattaaaaacataaattaccaaaaataaataaataaaaggattatttcacaaatacacagaacaaaaaaaaaaaagttgtacaaaactttcaacatatttacaatttttataattttatttacagaaaatacgattttttgatatatttttatgttatactcttattaatttgttgttaattttttgttatttgtatattattttttattgttgttttcctgttatttttatagaacacggtaaaaatgtaaaaaaaaaaatcattaaaaatataattttttttaaataaagaataatacataaatgacatggtagtgcatgggcctagcccaaagaataaacattgttattaagagatagatgatacataagttaaaagggattttttcaataatatacataaatagaaaattatttacaataataaccttacaaaaacaattcataaatctttaacgtgccatgtcaccaaagaatacctatctttaactattagtgcgtgacaataaaaaacctagaaacaagtaaatatttaggcttttttattgtttaattaagaaaccattagatgtctttttcctttattttttcctttttgtgttttttttactaaaagagattatacatttctcactcaataatatttttagaaaaatgttcatgaaaaaaaattaacaaagaatt

SEQ ID NO: 164261 - DNA, 1442 bp, Cannabis sativa
ttttttttttttttgtattgaatattttccataaaataaccctttttattgggaaaagccatacatttacaaagattatataaaaaaatatataaaatgtgtaatttttacatgaatttattgttgagttagaagttagttacatatataattaaagcttttgcaaattaaaaagacaaatatgaaaccctaatttatacttactactacaaataagatgtttagcagcgcttattcaataacacttggtaaataagtgttgctaattcattaatttttgttattagacacacttaaatataaagtgttgctaaaaaatttatatgtttaaaccattaatatctagcaacacttatttaataacacttgataaataagtgttgctagttcatttatattttttattagacgcacttaaatataaaattttgctaaatagcttatatattttaaacattaatattttaaaattaaattcaaaatcaatagcaacacttctaaaataaagtacgtttttattaataatggagaaaattaaaaaataatattttctatattaattttagtggagtgtaacttctttagttttgaagattaagatgagctaccaagtaaaaaataaaaaccacccaccatttttctctccaaaccaccattgatatcaacaattttttcaaaaaatttacaaagtctccaaactccatggatctcttgtatattggctattcattactaagattttggtatttacattttacaagtccaatcgagcattatttaatttgtatgcatcaacattattcatcaatttgaagtgggtgtgctctccttaaatttacatgagaggtaactttttcattaatattttatttcttcatttttttatcagacctttttcttctccttttcatcttctctttatgattatttacttgtacagtgttatattaattttcattttttcttatttgcacactaattgtgtagtgaattgaaccaatcttttgataatatatattcaccataataattgagccaacaagcttgtttattatgtataaattcacattattgataacgtgacttgataataatgcatgcatttactgttcttctttagttcattgcaggttagattgtttctttaacaacacacaaaatggaatgaagaaaattaattaatctttggagcttcagaaacttcgagtatttagaaagaataaaatttttggagaaacagatattaggcacattttgtataccctcttttcttttgaaaagttatattacacttgttataaattttcaaatttattataaaagctcttatcaaatgttgtagctgttaggccttgggattagtatggtgggctagcatatattaaataaaagggtaattgagtctttgtattgagggaagtattttggagggaatacaatag

SEQ ID NO: 164262 - DNA, 1244 bp, Cannabis sativa
atttatagagcttttatataataatggtcactatgcatataatgcatgagtggccaatatttgatatatagttatagcttatcataactaacgtaaaagaaaagatgtgtatacacacaattatttgtgttgtgaagtgatttttgtggttctaaatatgacaaaaattaattctcattatatacaatatacccacttgtcgttctctcaataaatctcaccaagtaattttcaatcattgtattatgtctaaatataaacccaatttgtttctaatacgttttcccatctgtgatgttttcattcgttacttaaacataatcatataacatattattaatattcctagtaagaatattgaaagtttgacaagtgtttggaatctctataatgtattattaattgttgttaggagaatatcaataatgttctaagaaaaataattaatttaggtttcagtaataacgtgataaaattacaaataattattagtattttatatttgggatttctggttatagaattacatatagctatattagtttgaacaaataatgtacgtacgtaccaatagaatagagagaaagattaagagtcatgttttttgggtataattttacctacatttttcagataatctctttcacttgacatataaataaaaatagaagggagtagatagtttcttttgtcactatgatgggacattgattcatgttataagaaaacaaaaatagtactccattattgaggtgtgttcctagctacttattaatactggtcaagataatttattatcaaaagaatatatgtgttggtttggtttcaagttatatacattggatttgtaaattaatttgaattaattatacagaaacaaagtgtaacgtttgcctacaaattatactcaataaattactccgtaataataataataataataataataataggaaaattgtgtgtattatatgttggcgatatactttaatgtatagttttatttttaagtaagacccattatgaaaaaaaaaaaaagttaaaactatttttttaggaatttttttattttacactttaaaatagttcttttttttattattatttttttacagaattttacataaaaatccctatgacaactaacggagcaacgtcaaatcgcaacaaaaatccatatagcaacctacataaaaatttgaggaaattacactctataccctttttatattgtcctattttat

SEQ ID NO: 164263 - DNA, 3137 bp, Cannabis sativa
gacaattaatgtgtgatctccattttggccttcaatttcggttgcttgcttgccgtgatggtggagaacatttgtagtgtcaactgtatgactcagcagtaaatgttgatttgctccttgaaatcttcttctttccgtattgttggcattgtcaatcttagcattaatgtcgttgatattgtgatcatggggatcaaccgcattgaatgcttccttgttcacaccttggtctgttgtgtcatcggaaaactgagaatctgcctccgttccagtacgtaaccatcgtgagccagcctgattgtgtcttctccttggttcagctttcatccatatgccatatggtttctctatttcctccaatgatttatcaaacagtcgagaacagaacttctcggaatgtccgagaaatccacatatgaaacagaatgtagggatgaattcatatttaaaattacaccatatccattctccatttgtcttcttcagcttcatccttctctttaatggtttctctatattgatcgcaactctaactcgtaggtagtcacgccaaatgcccatgaaattctttgggtctgtcttaacaaaagtaccaatgtaattggccacattcttgactactgcatctgtcatgaatcctgtcctgagattgtgtaattgaacccataaatcaagacgatttaaggtaatactcctagggtcttctcctttcttaaggcgctcaaagatcaattggttcctattaaaggtccagggactgccatccatcaccctctgaatatcaatttcgtggtagaactgaaagatgtagagattaggctcgagctctttgacgaataccccttttcctggctgccagagtgaggccagtgtgtgcttcattgcatcgacatcaatcgatctcctcgtcaagaatttccccacaagacaccacctatcatcgataggctgtcccacgtcttctatgaaattgcatagtagttctccttcttcttcttcctccagttgtattgagttatacctttcattcattgaattaatttgttgactagtagaagccataagacaagaacaaacaaaaaaacaatcagaatactttagaattctcacaacttttactcatgtcaaaggacaagacatcgttacatttgaccattttaagttttaacagaatctcattaatttaccaacttaatgacatgcattagtaaaaaaaaattcattaagactaaaaatcactctttaatttaacgaagttcacatgcattagtaactcaaaagactaattcatttaattttttttaaaaaaaagcatattatttcatgtaatatcaataaccccaaaatccttttaataataataataataatttctatgtatatgtatagatacaatatacatacataattgattttatttttttttctagcttttttgattttattttatttttgtacattaaatatatatacatacttgaatgttattgactattgagttaccaacctttctacttatcaataaccccttaattaattattttatatttaattactgctgtatataaatacatatatatattttttcttttgtgcaccaccatgttttggtgttctattatattattatttttgtaaactcatatttctttttctttgttgtgttatttttagtgtgtatatataaatatatacatgtaaatatatgaatatttagtgatcatatttatgtaaattatgtgtatatgcattttttttttattttaatatacataccataaccatcagaagaactgtttgctccaggatcacgcacagtaccaattcataagtattattgtgaagaattatttttgagaagaattgtgacaacttatctttctccaatcaagctccacgagagttctctatttccttaaataagtatatttatcatcttaagcaacgtgatgtatcttaaaatttttaaaatatgttttatctttttttcttattattttaatttttatatttataaaaaaaattagtcaaaccaaaagacatccaaatttattttcatttaagaataaaaacgttgtatatatttattttttaagtattgttatagtgcattaaggtgtctatcacctctataatatagcgttatataattagttagtaattttttataatttttatttaattaaaataagtatggctcaatgttaaattgtataaatcaatagtaatattacgtctcatagaatatttaacactatttaatatttttcttactttatatatattcatctaattcttagttaacctcctaaaaatattgtaccaacttagtgagaatttaattacaatttaaaaaaagtctcatgagttttacaaatttctccttaatcttcttattatttgtaaggaatcaatttattattaaaacatttttatttaatagatgaaaaaaaaactattgtattgaaggagttgtataacgtttaagtaataatgatattattttttatatatatatcaaataactttgaggataatgacattgaaattcaattaccaatacaattatatatatatatatatataaatcaaataacattgaggagaatgacattgaaattcaattacaaatacaaaatctttcgacaaatttttcgacggcgatgacaactccagtaacttttttagcgacgacaacttcgtgacttttctagggacgatgacaactctaatgacttcttatgtggcaatggctgcactaataattttttccgcaaaatttgttcttagaaattttgttaaattattatgatattttgttgggttttctatttttttttatttttttctataaagttaccatactttgtggtataaattttatatccataaaaaaataaactaattttttcttatatttttgtgaattcctataaaaaaaattgagaaatatcttaaaaagtacataaatttgactattaaaatataaaaattatccaaattataatttttaaatgttatactttactattaaaatataaatttttaaatgaccagtgtactgagtataggctgatacttgtcaatagtaccgtcatacgaacgttcgggactcagtattgtgtgggacacggcag

SEQ ID NO: 164264 - DNA, 1289 bp, Cannabis sativa
ttcgaaagaaaaaaaatccaatcatgatcaaacttttacaaaattcgaatccatataattgagaactgaaagtaaaatctctacaactgagctccctaacatggtatcacgcattctatatatgctctctgctaccattttgtatgacgatttgtttcaaaaatcgatggatcaatcgaaagaaggagaagagtcaattagaatgcctaaatttctgccaggcccaaatcggtagaatttacattgagttcaccaccttagactcagctacgattgaagatttcaatcgtaaaaatcctcaattattttgcaggcccaatcattcatcgttcagttgcaattgaaaattttgtcgtggaagctttatcaccgtgcttcctccctcatttgcgatgtaaattttattttattttatttttggggtaacgtcaatctccattaatcatccattagtttttataaaagaaaaaaagaaaatgttaaaaccaaatcgttaaactaagaattatgttacataaccacattttatatagatatatattaggaaaagtgatatgatttatgaatttgaattaatgtatgtatatagataattgttatctaatatttttaagagtttggtagaagatttttttaaaagaaataataaaataattaaaaaataaatttttatatggtagtagaagaatttttcaaaaaataataaaataattaaaaaaaaatatatttttttttatatggtaggattttttatatctgtccttgatatagatttttgaatatgttgtgtatcatttttttaaaatcttaatttcaaaagaaaaaaagaaaagaaaagtcaaaaggtggctgatgagaaaaaaaagctaataactaaaatattttttttgttatcattttttttaaaaaaataaaataaataaaattaaaaaaaatagacgacttaaggggaaaaaaagtatagtttatattaattaatatttatgaagttaatgaaaaattaaaaaaaaaattaaggagagaacaaataatatttattagagaaattttagaataacatgtgacggcctcatactttttctttatatatatagataaatttttggattatttttaagttgacatgactagtctgtttattaaacaagttattttggattgatatgcataacccgaaaataacatgataatgacctatttaaaaatatacacctttatatttattatatttattgttagaattattttaccaagatctagatttgctaacaagtatgttatttaacatc

SEQ ID NO: 164265 - DNA, 1170 bp, Cannabis sativa
ttgaatatgacagtatgttaaaaaataaaatacaaatatcatctaattataaacagattaacaccacacaactcgtataatataaatacattttatttaaatatgtcaacttattaatatattaataatatacgggttagcttataattcgtttattaaaagggtcatgcccaaaagagagccgaactcgtttaaggtaagtccaaatccacaaacttttatgctgatttcaaatcgttttattgcatcaaaccccgctttgctgcatatacatgaagataagaatcatatatataatcctacaattttttattaatataggatggatcatttcacaactaacatggatacaatcattggtcatgttcacctattttagaagacttttttttttaattatctaattttgggttgtagatattatctacttattattaaattttgaatttcgatactcttttttccatgtgtgatcctgccctggtaagctgtgttggattagagaactataaaattgagaatttttaacatgttatgaactataaatatatacgtacatattttgtaacatgaaatttctatcaagtttacttttgtacgaattaaacaaactcatatggtatctatcatgtcatgtctataaatttcttttttaataatgaatggctgacccataattttctgtaggctgaactaggcccaacattgtacaatggtagagctggcctgataaaaatgggcctaaccaaccggtccatatgcctattattgcataaaaaaaagtaaaagatggaaacttgtcaaattttgtcaaaagtcatcaaatttaatatttaattatgatgtagtaaagttgttagatttgaaaggaaaaaaaaatgctttgtagaggcattactggtttatttaaacaaagtggagctttttaatctttaaatcaacttttaatcacaacacccgtggaatggactatgagtcacattactttctttaatggttttattttgaatagtagtgctttctatttgtgtaggcttgtcataaaagtttatggtactattattattgggcctgtacattaaagtttatgtttctctttaattttttttaggtctatatcgctcatatattgtcctctttatttttaccctcttttttaaagtctatcat

SEQ ID NO: 164266 - DNA, 974 bp, Cannabis sativa
tacatatggtttgaactatatggttcaccgactgatcgagatgttgatattattggtagtgtaagtagagaacatcaaccgtgtttcttttagctattttggatgtgctcaataatgactcaaattaccatgaacatcttctatagtaaagaagagatttgtttttatttcttgattttcatctcctgtttccttaggattcaataaagcttaaaacgttttttttttatctaattataaggataatatgcaggttattcaatcatggtatgtcctcggtcgcttaggttcattcaactcttctaatcttcaggttggccataaattattgtgctatgctcttttgcttcaaattctacgtagttgtctgtattggtggtgtagggtcgtgtgagtttaatcctaatagcttgtctgtcttatgtgtttttttagtgtatttttgtagcaacttttgtcacaatcccaagatagcctatgtttcaataatgttaatgtattgtattcagaaagcttgctttcttcggtatagatttttagattttgtttaagaggaataggctattcattttatatatgatgaactaactctaatagaccaccacacggacatttgaaagaatcctaactttaatacgccatcctccgcgcttggtcctggaaagtaatgagaggagtaatttattcatcttatatatgatatttttatttctacacataaacgatgtgagactaactttaatatctaacaaagtaactatattgtatgataaaacactaacgtaacagaatttaaaatgttacttcataaagtttttgctagaaagtagggtttttctcttagggcaggatgctctttgtgtataagtttgatacatagttttaggatatgttgaagttcggtcttttcatatattctgctgaaagccttactaatatgtatcgatggacagttggccaattcatccgtagag

SEQ ID NO: 164267 - DNA, 823 bp, Cannabis sativa
aaaacataagagtctgaatgcatacctcaacaagcttaataaatcgatcgaggaagcaaagaaccgtcatcatttctgttaagaagctctaatcaatagtgacgtatgcttttttgagatccatcttgatcatacaataaggtttatagcttttccccataatgcttaataatatcctcacaaactattatattgtgagaaatacatatttttccgtgaacaaagccactttaattttgtaaaattagattaggaaggacctatttcaatcttgaacacactaacttagtagcagctttatagagcatattatagcatgctattggcctaaaatcagccatagattctggacatttaacctttgggacaagcaatagagttaatctccttcaagatttctccagagtagagaaatgagaggactactaaagtaacatctttacgaacaatctctcatgttgctttcaaaaacttgttattaaaatcattcgaacctagagcttttgagtctggaattgataaaatagcttgtttcactccctctttcgaatacggttgaagcagcaatctcctttgggttttattaagaacatgcccttcctgaacaatcttgtaattaactcatccccttctcatccctttcaatttatcctccagtgatctttttgtttaaatcttgttttacatgtacatgtaaaattgattgttttgaaatctttttttagcatcttaaattatttaaaatttagacttacaaaaagtttataatactataaattaggagttccaaatgatgtatgcttattcataaaaaaaaaaaaaa

SEQ ID NO: 164268 - DNA, 1688 bp, Cannabis sativa
gacgacgacgacgacgacgacgacaacccttaccctaataagagtatgaatcaaaatattttggaggtgaatttgaggttatttccatgggctcaatcgtttccatggccggtttcacaattatatgataataaagacgaaatctcttttgcgagttgtgtcaatggtatactttgcttctcaagagtaacatctttaggtattacaccttatttggttaaccctttgagacaagatgttttagaattaccacctttagatgtaccaaatcatgtaaatttttcgtacggattagggttcgataaatcaactcaaaagtacaaagttgtatgtgctgttgtcgattgttgttgtgctatgtttgaacctgttaccactaccttttacatactaaaagattcaaaatggattgaactagaaaaatcacaacctgatcaacaacattgtgtttcaataaaaggaggtcctaagtgtattaatggagttgtttactggaattgttataattccaatgctcttaataataagtatgtcatcatggggtttgatgtggagaaagagcaattaagattgatttctatgccttcaaaacttgttcatggtgataaagaatgtttttattttgatcaattgattgatctcaacataggagttttgagtttggtggatttatcttcttcaactgatcacattgcgatatggaatttgaaaaattgtgttagtgatcatggtgagaaggaaaattgggttagaatgttcaaatttgaaatcaaagcaccacacaattggccttctagattcaatccatatcaagttataggggtatgggagaatggtgaaatattatttaaaggtatttttaatagtattttcataacttataatccaaagacaaatacttttaaaaccctaaaatttccaccactcccacaacatgagcaatataagcaatactatacctactctccaaccttgctttctctttcttggctttcaagccaactatattagaatatatataattatggttatatgaatattatatttttattagttttttttttttttttcgatttagtgtagagctttttgtattgtattttaaagaatatcatatgaatattagattttttatattaattaattcaatctttacatttgaaaaaataaagatcatttttaaatgggaatgtatatatacataatgaagaaaaaagaatttgaaaaaatatcataaaataaaatcgattgaaaaaaaaaaaacttatttgagattgaaatgataaaaatggttaagaattgcccagacacacacagtttcatttatatatactgttggctgtgcccaataactacttttattataaatctgctaaaaaaatatatttggacaatgcttgtctatgattattaactttttcctcaatggttgatattttttttttcaatgaaaataccatttattcattaaattgaaaaatctgtcaaaagagtgacaactaatattggaagaaacaatcctcgtgaattagtacgacctagatatatttttgttaattctttcaaaacaaaaaattactaactcatcatcactcaaataaatcagcccaaattaatgccaaaaataaaggaaaacttacaaaaaaaaaaaaaaaaaaaaaaaaactggaatttgggttaacttttac

SEQ ID NO: 164269 - DNA, 811 bp, Cannabis sativa
aaaaaaaaaaaaaactagaaaaactttcctttaaaataattttatgataaatattgaaatgttgatgatataaaggtatttctgttcaattgttttcaagtcaagtaaaagctcgtttcggaattttaacggcattgtttgcggaatatgtaaatttgtctagaaagtcttccaattcagcaaggggttaggccaaataaaaaaagaagttttggattccaccagtagacggctattactacaaataatatataatgcagctatagatgaaaggagtggctgcttgtgaaattcctattcaaggacgattttgtaccacaatgtcaccaagggcaattttgaaccacaattagttctgaaaaaactctttctgatgtaattgattaatagcattagaataccgcataggataataatattcgaattgtttattatttattttttggttataaaataaaagggaagattgaattagaaaaaacaagaaatagaaaaggtgtgattatgcatatatgtaaaaggaaaagtcgttaatatttcaggaaaaagtaacgagatagaacatctattttcaccagagcagcatcacagaccccatagatcaaaaatagagctaaccaaactgaaccaaacagaaccaaaacacattacgaaccaaccaaaccctaaagcaacgagtattatcaaacccttaagatctaacttctccagttgccttcggcggcgccaccaccacttcctctgttggagtaacgggaaccaccaccatctccatagccaccaccttcacgtcggcctccgtatccaccac

SEQ ID NO: 164270 - DNA, 1260 bp, Cannabis sativa
tttttttttttggttaaatgtttatttagcttttgtcttcatctacaaattaaggattggagaaatttttaaaaatactctttttttctaattttattttatttataattttacatcctaaattttttattataaaaatactctttcctcaataaaaaataacaaaaaattactaaaaaaaaagagaagtgaacctcaccacaactacaaataaactataaaacaattataaataaaataaaatattattttattttattcttattcatattctcatttccatttctgttttattcatcaaacgaaagcttaatgtacatttagtggattagattgtgttggcaatatgctcatccgtaggtagggcgttaggctgagcatgtgtatggctttatatcatttgaaacatttctatataaaatttcctaatatttttgtcatggagaaaatataaacttgatgagaacaaaagttgttgagagttgtttatttcacttctttgttataatatattctcttctttcaaaagttctcatattaatcttggtttatacatttatttatatttttttgtttgtggttgttatataaccatctttcctcatcaatatgtatcgaaatattctccaacaaatatataattcataattaaccgatgtatgtatgaagaattaacttcgattacaattggcaattattataaaaagaaaaacattttttattccataaaattagttactgctaattaaaaataataatacatgtaagattctctgatcatcgtcaacaattcaccttaatatatttatattttgaaaattcacaaccgtaattacaaaaatcataaaaatattcctaactaatactatgaattaacctctttcgatttttgatatgttcagtttagcttcagattcaacaacattcttatttattaattaattaatttaatttttgaatgttgaaatggtaaaagattctaaaacaactattatacatcgaaaatatatatagatatttaaaaaaacattacatcaactatgaaccaaaacccatgattaaaacattattaaaaataaagaatatttttaaacacatcattcaaaaagaaaagatatttctcagaactaggaaccaaaacccacaacttatattgataatatatgaagaaattcaacatatatatttatatatatactagtgagagtactcgtactacgcacgtgaggtatttttaatttttctttaaaaaataattat

SEQ ID NO: 164271 - DNA, 920 bp, Cannabis sativa
attccatttccattaataaaataatcatatttattggccaccagtgcctaacactatttataggtggcgcttttataattgactaacgatattctttaaaattattaaattaaattatatgagactcgatacataattgcaccaataataatatgacacataaaaaaatgttaagcacgaaccttttagcatttttctaatactctaatatttttttattattattattaaaacgtttagagtaatctttttttattgtgattaaaatatttagagtaatcttatagcatacaaacctccttttagccattttttattttaaaaaaaaaaattgaatgtgttgtaattatttataaccacttgatcataaaaaaataattatattaaatttttttcaaatagattataaagcattgctattacttgattatcaactaacactatttatatatataacgttttatcattagttagcgataatttttaaatattattaaattatactttatgaaatccaatacttagttgtaccaataataatatgacatctataagagtactagacatcactaatactttagcatttctcataaaaaaaaatgtatcgaaacaaactttgtaatataatttttttattgtaattgtaaagtagcccagctataagaaaaatttcagctaggcacctagaaattacaagttaaaacacacacttatataacaaatcaattttaataattatagcgaccctttagtaattttttcaaagattaataatttataatataaaaataaaactcataaagcttaatacatatattttttttttgttgttgttgttgttataaaccatattttattagtataatttagtgttataaatacggattgagctttttgacacgacacaaaatcagcacgag

SEQ ID NO: 164272 - DNA, 1187 bp, Cannabis sativa
aaaaaaaaaaaaaagttatttttgtgcaacaagtccaataattcataacaaatatcacactaaatatatcccaccaaataaatatattttacttaaaaaaaatcaaaaaaatctcgtattttatatattatttacattaataattaatttataatataattatatcatgactactagtaagaatttaaaattttaaaatgataaataaaataaaatatttattaaatcaattaaacattacacattaaaaaaaaaacttattgaatgatttaaattctatagttaattctaatatatgcgagcagaaataaagaattgtgcaaaaaggagatcaccaacaatgtaagtctttttttacaatttagatgtcaaaatattatttaatttgttgtgcatatttaatgtgaattaaatcgtattttcttgtgttaatttcgttttcatggctgtcttttttcttttaggaaagtttttgtataagagaaaaattcgctttatgaaaagtttgcttaatattgatttatttatggaaaatttgattttctttaatggtagttgctctttttgatttttctatgaatatagcagatcgtataatatttatattgcataaattaaagtctaaatcgtgatcttgaattttagaaattttttcgattctgcctattctgtagtgtgatttagtcgctgcaaattagggaaagttttatacagctgtgaaaacgtattgtggctgtcactagagtttctataaattagaaataaaacctagtgagcaaccaaacgttatcatctcttctaatcttataattttatactttcatctttgtgagaagagagcttgtttagtgaaatcttagagagttctactaggttttagtctttattttattgttcttctactattcttagaatagggtgaagagcttcgttgaataggagaagagtcttcgagagaagactgacttgttcaagacttactttgggaggaagtaagcacatgagtcatcaaaatttgaagggagttcgctatttggtagggttcagaatttggattggcaaagtgaattacaaagggttgcgaaaaaattattagagggagtctaaatttgtttaagtcaattgcttttgtaatctttgatactttactaattgattttattctctgggtgtggttccgtggacta

SEQ ID NO: 164273 - DNA, 583 bp, Cannabis sativa
  modified_base (532)..(535): a, c, t, g, unknown or other
tattgataataagtactcacatccacacttaaagaaacttaataacaatttaaatatgaaaatgctatcaagtatatactttcccaaattagatgtcggcctcaattcttctttttttttttaaggttgagattgaaagtagtataaccatgtagttgtacgtattaattgcaaagaaaaacaaaataaaaatcaatatagaatccacaggtttttatttttttaaaacaaatcgataattttaaattaattgaaatattgaaattataggtatttaggtcattaaaaaaaatattttgaccacaaattatattctttatttttttttcctttggaagaaataatactcatttttaataattgaaaatttgagatgtagttttaattatttttaagaaattatattctgaattgtttataattaataaaattatgggaacgactatgtcgactacaatgttgaaccagtaccatatcacactacaaaaaattgctacttttagtgacaattttttaatcacaacataaattnnnngtgactaaatgtgatttttagtcccaacaaaaaattatttgtgactaa

SEQ ID NO: 164274 - DNA, 2530 bp, Cannabis sativa
ggatgtgtggaagttgaaggcacttgattagctgcaggtaaagtgttagtaatagcaggtatgacattgaaagtgttgttggtaggtacaggagcagcatctgcattgggactgacagagttggttggagaatgatgagaaggctgctgagattggtcaggacacacagagccagtgggagttgagtttgtagcagtgtcattatgtagatgaatggcagtgggtaaggttggggaattgtttacattgagaaaggacactataggagggacaccagaagttggaggtgaagaaaattcagtagtggttgagtgatttctaggctgagaagagtagggaaaagtgtgttcatcaaagacaacatctcttgagatgtagagcctgttgtctttggataaacacttaaaccctttgtgtgccatgctgtagcctagaaaaatacatgggacagacctatactgcagcttatttctgttgtatggtcttagattgggatagcataagcacccaaagaccttgagactagtataatcagggacagtgttgaataatacctcaataggtgatttgttcattagaataagagagggcattcgattgattagataggctgcagttcgaaatgattcatcccagtatttgagaggaaggttggcttgagcaagcatagtgagacctgtctcaacaacatgcctatgcttcctctcaacaaccccattttgttcatgagtgtgtgggcaggctaacctatgaacaattcctgtactctcaagaagattagtaaaggctctaaactcacctccccaatcagattgtagtgtcttaattttgtaccctaactgtaactcaatttgggttttgaacttagtgaaagtaggtaatgcctcatctctagttctgagaaggtatagccaagtatacctagaataggcatcaacaaaactaatgtaatatctatagccatttgctgaattgatgggtgcaggtccccataaatcagagtgaagtagctgtagtggttcagtgtaagttgtagtagagctagaaaagggtagcttatgtgatttaccaagacagcaatatgaacaaacatcagagacatttttattagacaaagtgatattacatttggagagagccatttttacaattttagcagtagggtggccaagcctactgtgccacaaggaaaaatcagaactagacttagacaaatgatgagtgtgacattgaggtgaggacagatatgcaggaacagatgcagatggagatgaaagaatactcagctggcttgaatcaaatttgtacagtccattctcaacattcccaaccaacaagatcttctgtgtagttcggtccttaacacaacaaaaggaagggtgaaactcaaacataacattgttatattgagcaaatttagacacactgagtaaattttttgttatggaaggcacatgtaagagattagtgagaagtaattgttgagtggaaagaggagaatgggctatagacttaccaacactttcaatgttcagaccagctccattaccaactagaacatgttcattacctgcataggaagtgcttgccccaagattagatgaatcaggtgtaaggtggtgagatgctcctgaatccggataccaattatcatcttgaacttgtttctggtgtggcaaaggcagagggcatttctgcaatattggccgtgacagggaagttgacaaaggattcagggcctgtgaaggacttatcgaatcgatagaaacattgtttggccaggtgtccaaacttgtgacatatttgacactgagccttttgctgcatttgttgactcgagccacgtccattgttgaaaggattgccacgttgaggattgggaccacctctgttggaggacagaccattaccacgagacataggattccctgtgaaaccatcagcacgagggggaccaccacgattaaaccctggtggaatagcaggtgcagagtagggtccacgattgtatgtgttgtaaccattgaatcttgaatgggataagttggcttcagctttcaaaatgtcaagattcttggtatgtttatcgattcgagccgattgagccattagcaaggcctcaatctctgcaacagtatacacatcttttcttgtagttaccgaagtgacaaatacatcatattcagctggtaatccattgaaaatagcttcaatgtgatcttgagatgtctgtttatggccaatagtagcaagaagatcaactatccctttgatcttgaggagatagtcatttagtgagcctgtcatcttggtgttacgtagttgagtcttgtacagccctatattagctgcattgagagctgtgtagtgttcattcaaagcaagccatatttcagcagtggtgtcacagcctatcatcctgttcgtggtcttttcggacatggatgaaagtaaccaagaaactagaagattgtcttgctgctcccaatcttcaaattctgggttaactgtgtgatttctttcatcagtt

SEQ ID NO: 164275 - DNA, 1675 bp, Cannabis sativa
acccgagtatttatttcagctacttcctcttcaatcttccataaaaattgacatacaaaaccatgagaatgaatgaattcatctactctctctctgtctctctgtgcgaagaatctcttaatcatcaaaaagacaaaaagaccacaaattaaggaaaaatacatgaagaaatatacaaaaatacgacagaaaagaaaattgaacagttaccttgttgcaaaaatctaatgccgcagactctgctctataaatggtcttcaaaagatgttgaaatgaggagttgagctcgcacttcttatccacccacacgctattgacacaggagaaatgtaagggaaaaggtccttgcgttgtcagatgaaaccattgccattattctgctagactcagagattacatcagcaacgcttttcaaccccattcccagcctaaagaaaaacatcatgtgctctaaagcttctcctttccatccacaagcaaccatccccagtagaattctacacgacaggggtgaaactataaagttcttacctaaatctctagtgtgcttgtacataagggttctcttcgttatactaagagtaagtcgcaatcctaatgttggaaataaattgtactatataagatgaataagctactcctcccattgttaatttattttgagatggaatcccatttaccatattcccaaaatattaacatggtatcagagtcacttgtgatctgttgtgagctcaaagtgccatcagtctaaaaagtcgtttgtgatccgttgtgagccaaagtgtggtaagtccaaacaggtacttttcctgtctcccctttaacctctatttgggaccttgtgagattctttcaaatttcacgttcagtcctgtggtctcttaaatggtcgttcgttatatccacactttctaggcccaaacatgaggagtgtgtattaggagttagtcacatattgctaatgtgtggaaataaattgtgatacataagatgaatgagctaatcattcgattgcgaattggttttgacataaaaccctcccaaaattctaacagtatacttaactcaatgtttaaagcgtctccgaggacaagagagtacttactcttgaagaagagaagttgttattatctacactttagaatcaagtggactgtccaagaaaatatttgctttggatttgtttgtaatatatatttattacgattttgacaacctgacacatttaaagaatatgtaatattgttcctaatacgtcatctccaaccattcaatatttttaataacaaaattaaaagtatagaaaagataatgattaatttgctgcataaatatgtttaatttttaaatataaataaatatttaaattcaatttttttttgacgcggtaatcaaaatcagacaagattatcaaagcagcaatccacaatcggtgatgatacctcctcgaaccaggatagctcattgtctaaccgaaaggcatgctttgccaaaccatgcgctacagaattgtcatcgcgagccacatgggacaaaactgcctccagaaatttagaaataaagcgataatgtcttcaaatagctccacatcacattgaaaaaatatcttcccattattaactagttgtcttcagagcaaagcgaaactgaaaaaattgcaacaccaaaacaa

SEQ ID NO: 164276 - DNA, 1532 bp, Cannabis sativa
cgctaatcagttttgctttctcataacccacacattgcgaagcaattgtgagtcgactggcttactaagaaaaacatgcatcatacaacataacatctgacccataactgagcgcccatacactcagttaccataaatcactaaccccatcttacgcgtaaactaatctaaatattcgtacctatatcatgattaaccataataccaacctaattccagcactctagttgcattgatgttggtatccatactattcaatatttcctaatatactagatatcaatatcttggtaccactctatgtacacacaaactgttatctctaatatggtagctataaagcaatataatatgcgtatactaaacatgtgcatatgtgcatctagatacttttgttacctaaaatctaaatttaggtgtatcgaccaacttgagtggaatgtcgttcaacgatcggtggccctaagtcacattaacagtaaactgataagtgtccatctaaaacacttttgctacttaggtacataatctagggtgctgatcgagatttttggcaacaattaattgaagatatgttgaataattaatgtgaattaaagaaaagaatttttacgtagttggggcatttatgaaccttagtccacgagtcacttttatttctagatttatcttaccgagaataattgttccatccccatcttaatacattctcggtgtatttataggctcatattgatggggaagagccaccattgttgtgctctatttgaattttcctttgcacaaattcctaaaatttcgggaatagggcatcatcccctatatggtaaggatgtgtctatatttaatataagtgtttggtgagacaagacctttctcttattgtcgacttgacagtttgtaatgtagccgtcaaatgatgcatgttgtattgtgaagtaagagaattatgggcttaaactcttaagcacgtttccatagtaaggaataggctgtccttccccatgatgtattaaattcacgcacaataacttagcctcgagttgtacgccatgttttagggcctggctactttttcttcaggtcgcgtttctttgtggagaggaagagaaaaaccaactatcctcctggagggtccttttggagatgactaatctcttgaagcttctactgattatcaagctccggatgtggttaatcataacgcgtcctgtaatgagggttccgttttcacatggctccttcctgaagtgacaagtattttgagaaaaatcctaggcaatatttaccccccaaagtcccaatttaaaattttgtgaaatgggacttgtagatttatggattattgctcccgaagtgttgacgtcatgccttcgtgagcaacacacatgtcaagttttttaatgtcatttaatattcctcctcgattctggtaaagccaattcgctttccttctcatttgattttgatactgttggaaatattttaccaggatctagatttaataccatgtatgttttattaacatccta

SEQ ID NO: 164277 - DNA, 1041 bp, Cannabis sativa
gagagagggcgaggtttcaattggtttgttttggtttcatattttatattctctttagtctcgattatcggctcagagtttaagaggttgagtctcggttatcaacccataccatagaggttttttcgttaactcttttaaaactctatttagactttagtcttggcttactaccgacaccattggccttttttaaatgtgaattataaaaggacaactcaaacttggatactctatggtgtcaattttttaaattaaatgatccttgaaccaacaccaaaagtatctcttgtagtaattgttagacgagtgtacaagggaaaaaatgtggaagatgaactggccaagcaacctgcggggaagaaattaaaatttcaatggcatccggagaacccatagacaactatgggaacaagtttaacaacatggtcaaactctttgttcgaaacaccattcccatgaataaatttacctgggaaagcattgacaaagcagacattcagaatatctaggacaaattagcattaacattcaattttattgtaatacttcagttaaaattattacaaataaaaatatatgactttaaactttaacttttttgcagatcagatttgagttcccacttgaaaatactatattcatgacctacggtttgttagatatgtcaaaagggctacgtgactggagatcgaattcgaaaaaggcatgtaagaagaatatttcttaactgggagagacagaggtgaataggagacctccggagcaagtgcataggaggtgtgggcagaggtcattgcctactagataaattacagtgatcatactcattgaaccgaccaaaccaatcgagatatctctagagggttgcttagtttcctctgccattggtgccaccatatcaaaacctacatatgacatgtatacaatagcagcagcttcaaaaatacccttctctccaattggaaaatatgaattcagattcgaaacatcgccacaaacaattcccattactataattgaaaaactgtgtttttgcaa

SEQ ID NO: 164278 - DNA, 5534 bp, Cannabis sativa
  modified_base (5478)..(5486): a, c, t, g, unknown or other
ggcataaaacccaacaccaacaacggcaataggcatggtaatggaaagaactacaaattaactggtaatgtcgagcagcaccccatggaaaatgcctataaatttaaaactttctcagtcctaatagacaacatagagacaatctatgtgacaacttagtctatggtgtcgtacaagaaaccatctcccataaaaaaggatgtcaacaaaagagataaaacaaattttcgctgctttcatgtggactatgaccacgacacaaatgaatgtaataatttaaagcgggaaattcagtttttttaataaaaaaaaaaaaaaaccccgcacatatagaagtatgtcaaggctgaccaaaatgaaaaggctgcccaagcagacaataaccagaactaattgatgcccccgctagtggacatgaatttataggtaatcattcggggtccacatcttgctggagactcgggcaaagctagagaaaagtatgcccaagccttgcagtatgaacaaaacaaagcaatcttggtcgtggaagaaaggaaacctaaaataccacgtgtaggggagccaacagtaacattcacttaagtaattgctagccatgtcatcttcccagacaacgaccccttagtcgtggagctgaaaaattgaaaacaagatggtgtcacgaactatgatagacaatggagcttcctcgaacattctatttaaaacaacttatgagaagatgggattccaactgaaagacttgatccccttacacccagctcatgtatggtttctctagccagagtgttgcacctatcggacaaatccgcctactgctcattattagacaagctcggagtagcataactgtaacggcacaattcttgataatagatgtcccttcggctttcaatgtcatgttaggccaactaaccctatatgacttaaagactgttacatcagtttttcatctgtgcgttaagtttccaacaaaaagttgagtgggatgtctaaaaggaaaccaaaaaattgcacaggaatgctataagcttgctctaactaaggtcaagaaggaaagtaccttcaactagagttcagacaaggggaaaagcattgcttaataggaagtcgccgaaggcggggacaaagacatggatccccaacttggggaaacaaatgcaaatgttaggccaatagaagaactggaagaagtggaaaccaattaagatatctcggccaagaaactcaaaatcagtaaaggcttgctgtttgtaataaaattatctttaataaaaattttgagagcaaacttgaacatttttgccttgtcacatgaggatatggtcactagtgacaccactgtaatgtctcacgccctaaacattgacccagactttcatctcgtccagcaataaagaagactattggacaaagaacgctcacaagcactgatagaagaggtagagagactatgcataaacaagttcatcattgaagctttctaccctgcttgggtggctaacccgatactagcgcctaagctgaacaagaaatggcaggtatgtattgattttgctgacctcaacaaggcatgtcccaaggactgttttccacttccatgaattgatcacgtcgtgggtgcaacaatcggacataaaatcttgagctttatggatgcttatttggggcataataaaatcagaatgtatccactggaccaagaacataaaaatttctgaacagatatgggtctgtactgttataaagtaatgtcgttcggtctgaagatcactagagcttcttatcggaggctagtcaacaaaatgtttaaaaaccagatcagacagaatatggaagtatatatggatgacatgctcgtcaaatccaggagggatggggggcatatagaggatcttaatgaattcttcaaaatcctcagaaaatacaacatgaaacttaatcccttaaagtattcgagtaagtttcttgggtttattgtcaatgctcggggaatagaagctattccaaaaaaatacaagatacaagccctcctggatatgaagtcgctaccaaaaacgaatgacgtttagagcttaactggttggatagccgcactgagcagatttgtttcaaaatcagtggacaagtgtgttcctttcttcaacatcctccgaggtaataaaaagtttgaatggatggaggaatgcgagaatggtttccaagaattaaaaagacaactcgcaaagcttcccgtactctcaaaatccttggatgcagagcaattgggaatatattttgctgtcaccaaatatgatgtaagcgatgtgctgataagagaggaaaataatgtccaacatccagtctactatattagcaaatgactcgtcgaagccgaaggtcgatattctctgattgaaaaactcacttacagcctaatcttagccacaacgaaattaagggcctacttccaagctaatcatattcgagtttacaccgacaaacctttgcgccatgtattgcaaaagcctgatacctccgggcgaatatgaaataatcttccaacctcgtacagtggttaaaggacaggccttgacagactttgtggttgaatgtacatgcaaaaaagagggaacacaagggacaacccaaagcatgtataagagtccctacaagaaaagaataaagacagacctacctagaagttacatgtaaacggatcagcttctgaccaactttatggtgtaggaattgccctcatcacatctgggggcaacatctgcacggagcgatcaaatttttgttcaaggcctccaacaacgaaacagagtatgaagcactcatagatgggctaaaacttgcttgggaggtacgcatcgaatacattgagatctgtactgattcacaattggtagtaaatcatgtctcaggagagtacatggcaagtggagaaaaaatgatggcctatctaagcaatatacaatacttgctcgcacaatttaagggttagaccctcaagcaaattccgatggaagaaaatacaaatgttgatgccttggcacggctcgcgagtagcacaggagcttataaggccaacttagtcccgatctaattcctagaagaacccaacatcaattgtgcaaaagaagtccaaatgatagataccgcaccaaattggatgacacccatcgcagcttatctcaacactggggaacttccaaacaatagatatgaagctcgaaaaatgatgagactagctgcgcattatatcatagtttaaggtgtgatgtatagattaggcttctccatgccattacttcgatgtgtaacaaatgaggaggctgaacgactcttgtctaaggtacatgaaggattttgtggtagccacgtgccaggacagagtttattgaagaaaatactaaggcaaggatatttttggaagaccatgatggaagattaaaaagcctatgtaatgaaatgtgataaatgccaaagattttcaaagatcccctgtgcaccccccaatgagctaatacaaatgcaatgtcttttgccttttgccatatggggaatagacctgattggacaattgccaaaagtcaagggcagagtacaatatgcgatcgtcgcagtggattatttcacaaagtggataaatgtcgagcccttagcaataattacatctaataaagtgttggattttgtagtaaaaaacatcatatgttggtttggagttttcgcacaagattgtttcggataatcgcaaacattttgatagcaagatgttcacaaatttatgtgcgacacatggaatcataaaaagattctctatagtggcacaccctcaaacaaatgggccagtcgaagcagtaaacaagacacttaaggacactatgaaaaaatagctcgaagaagctaaagggaattggtcggaggaactacctgaggtattgtgctcgtactaaacaatagaaagaacaacagctgggcaaataccatttgatatggcttatggttatgaagcaatgctacccatagagttagaacctccatccaacaagagactgacctataatcaagaagacaatcacgccatcctagcataatcacttgactaaattgatggaaaaaaagcctcaacaaacctaaagctagtagctcatcaacaaaaggtggctcggtacttcaataagcaagtgagggcaaggaaattctttgtggaatatatggtccttagaagagtgttcttgacacaaaagatagtgcagctagcgcactcggacctaactttgaaggaccataacaggtaattgaagttacggattctgaagcatataaactgggtcggtataacaaaaacatggaacttgttttagtaccaaagtattggaatcgggaacatttgagaaaatactaccagtaagtgtataaggtctgacgaccaccttcaagtacacaatgctcgaacatctactcttaagtagatggccttctgagcggacctcgctcaagggtttggataaaatgggtggcactcaggtcagatgaccatctctaaagtacagtctagaaaatacatttttttatgttttaattagctaaaaatcagttagatcatgtaatagacttcataattaaataaatgtaagttactatgataacaaaattattcataccaataaatgaataaggatattaactatcattctaattgtgtcaattattttttactatagcaagttatgaatttaccataaaaaatgtgtacaaaaggtctgcttgaattaaaaagctgaatagatgaaaaacaaacttgggcaatacaagtgaccaagagtcataagtctgcttggtcacttggggggcaactatacctatacaaagcataggtaaataacaagctcaaaaaaacacaacaacagtttgcatgtgcaattattaaaacttaagggaaaatattcatttcaaaagatcacaaagcatgatataaacttgggattaaaggtttcttgttcagctatatgtcttataacaaaatgaagtattaccaagtttaaaggccacttggtcgaccgcattgtactgtaaaaaggcccattggctaaactgaaaaaataaaaatgaggaaaaaaagaagatttcacacagttggagtccctggctctttgtacagattggcttggtcatcaatggttggagcatcaatgctttagtcggtcaaagcttttgggttggccggctcatattcttccttgtctttttgggccgcgtaaaactaagatatgcctccttattttcattgaggtaatcaaagtttgcatttgggttggccttcccgtattcataaaaaacctccaaggcggctgtctccaaactctcgacccccttctagagcacctcctgctctaccttcttggatttgacactctcttccagatcctgttttgttggggattatttaccaggatcttgatttactaccatgtatgttatttnnnnnnnnnaatatgaatttctaaaacaattaaatttaaacacatataaattttaag

SEQ ID NO: 164279 - DNA, 1286 bp, Cannabis sativa
caatccttagcaccttgggtataccgactttaagccttttggtgtcatcaatgctgactataatttgcgtgtttccgatctaacttctcaggattgtacttggagtttcactgctcttcagcaacacttcttaagcattgatattgatcacattctacaaatacctgtaagcctctacgcacttgaggatagactaatttggcatcactctccatctagtatttatactatcaaaaggaggtatcatttagctacatctgtaagggatgcaagaactccatcacaatcacattcacctactacttagtggaaccgtttttgaaaactgaaattgcctcgcaaaatcaagatttttgcttggcgtgtgatccataatgctttgtaccttgctgctaatctccatcacaaacatattattgaagactcttcttgctctagatgttcctacccttgtgagacataaaccataattttttctcttcaaatcagtgaagaatctttggcatatgcgcccttttctaatagattttattggtttatcatccttaactagcaatgattttatccattcactcttctccaattttgatgatgatcaaatgaagactatcctttgtgtcacgtgcaatgataatttacattgttcacgaattcttcctcaacactgtctttatgaaaaaagctcttacataccttcatgaattctacacaaataacagctcgtctactacgcctcctcaaaattttgatgccaacaatcaaccatggcagcctccacccactggtatgctgaaacttaaagtggatgctgctttaggtagtgatggtcaaataataagtattggatgtattattcacaattctaatggtcatgttattattgtgatttccaaaccaattaaggggaagttttttttcaaaaaaaaaaaaaaaaattgaggcaaagacaatctcttactttttacaatggttgagtgatattaactgtgttgttcattttattgagtgatgttttctttttcaagtatctctctaagttatgctcatgagagtgctaatttgactacacatgatcttgctagatttgctttatgggtgtatactgatagtgtttagaggacactctctccaagccctattcattgtaaaaaaacttgtccattaatatacagtatatagcttttcttaaaaaaaaagctcttaataaaagtagatggataattataaaaccgccttaagttaaattggggagttttatttgcaccccataaaatgataaatgcacc

SEQ ID NO: 164280 - DNA, 706 bp, Cannabis sativa
  modified_base (664)..(670): a, c, t, g, unknown or other
tgttttatcaatagcttgatgtaataaggtccagcatatatactaatttagtataaaatatcttaaggtgttaagcattataaaaaataatgtatgattatcggagcatttcaaatttcaatatcatttttcataaattttaatatagtaaataatataaaaatcattaactaattatgagataacatataatcttattaagcactttaaaagtaaaacaacaacccttatcttttgaccaaaatataaagattatttcataaatgcttaaaaataacaaaaaaaaaaaattacattttgtggatttagtttttttttttaaaagaaacttttttacagattattttagttatattatacaaaaatacgattcatgctctaaacaaatgtctaaatgttatttttacagtaacattatatattatgtttcttcaatttgaaaataaggttgtttctaaaatatatataatccataaaaatggtcaaaaaaaaaatacaattttaaatttttaagtatttttttttttttttaattttcccaaaatatatgcctcaactcaaccgcatggacttgggctacatattgccactaattaattgggcttgaattgaagttccaaattaaagggaaatttacatgttatactaacttttgctatttttnnnnnnnaatactgtcaggcggtattttttaattttttactgt

SEQ ID NO: 164281 - DNA, 1006 bp, Cannabis sativa
gggttgcttgtaacgatggaagattgtactggcgtatcaagagacacgacgagtgcataggaatccttgctttagatcttttcgcacccaagaaagaagaagaaaaggtatatgaatgtgttttcattgccatgccaaaagagtttgaatatttgtcaccaccaaaaatcgttgaagaaagaacaacaacaacaacaagaagaagaattagtatccatatgttgcgtaatcctcgaacattgtttccattttctagtgtgattggtgtggttcgaggtcgactccggctgtgccagtcatactggattgacaatgaaatcagtaaaattcacttgaaatcatgggaactgaaatgggatgatgatgattgggttttagtgcatgatgacattgttaatattaaggaagaaactactactactacaaatgaagaattactcaaattgaatgtgattgggatgcatcgtgatcctgatgatcatcatgatgtgtttttcttctatggtcaaattggttgtagcaagtttagtttgtaccaaattggtggtattggtggtgatgagataatcttaagaaaagtgagtaaaactaaaaaagatatgagtcatctcccctatatacaacagtttacacttgtgcatccttggctcccaactacaataccacccttacctacccaccctactattgacaactctatttactaatttctcttctcattccatggatgggatagtgttagaatttttcttttcctctagtttatgttaatttgtttgttctagactttattttgaatatagagtgtcttctttattttctgttataatagattatttcaacactactttctaaatagtaggagtgcatcaatacactatcaatacactctgttacacaagtattaaaaatatttttatgtttttaattatttatttaatttgttttatatttatttatttattcaaaaatcataagatcaattaattaataaatttgttcaaaa

SEQ ID NO: 164282 - DNA, 1264 bp, Cannabis sativa
gcacactttaaatattttgagcagtatttaaaactgcttgaaacattccttgactgctcatatgaatagttagtcctctattcacactttagcttgtgtactatttatcaagatacatttgggtatcttgtttatagtacatgctatattatgcgagtcgttatttgttccaatcgcaattagctttatgttgattaaatttatcagatcgcaattagctttaagaaagtttccaaagtattcgactttatgctgttccggaccagctcataatcaaacacctttcttttgcaattttttttatttatttattttctaagtcatagaaagcctagttttattaacctatacctctaggtaaaacctagttattgtatatttatatgcccttcaagtaattttaaagaaactaagactttatgattacttgaaatatacaactttattaaaataatgaacttttttacaaagataaacttaatacaacagaataaactactggtaatatggccttaggtgttcagtgttctaatagttttttattagcaagccattaagccacgctaacttataaaatcatgttccaatgacaagttcaatgatatacaagccttcccagttcgggttgaatactcctgctactgggtcttgtatattttaaaacacacatcttaagaccaaatcacgaactttgaatagtcatttttgaaatcttttattaaaatatcttgtgatatgcattgttgataagtagtatttgtgacttgtgacttagtgcactttttttcttgagtagatccaaggacatattgagaagttcttagttttgttcttgatagtagaattcatgcttgtgttgcaatgttcacttccactggcaacattactttcgagctaaacgttaatgagaatgcaatatgtcccgtcgctatttttttgtctttctatgggcctagagcacctatggtagctcgtgaacccatctacctttagctgcatccaacttcttttttatagtgtcttttaaggttttattaacagtctcgacttatccattgacctgtgatcttaacactgacgagaagcttttaataattttattcctttcacagaactcagtaaataaatctccatccaactgagtattgttatcggtgttggaatttattttattaagataagatctagatttactaacatgtatgtttcattaacaccctaaatatgaattctctaatatgattaaattaaacacataagagtt

SEQ ID NO: 164283 - DNA, 754 bp, Cannabis sativa
tttcattttagtgttccttttaaagaaaacaattaagaaaaacatttaagactttgacttttcaaaccccaaaagaaaaaagtagctatcaccaagaattttgattagagatttgttattttttattttttatgaagaaataaaaaaaatatgtatataagaacaaaggaattaagaaaattttgatctcttgtgaagactaaatatattatttaattgaggttttttttgcatattttattagttattcatccacgtagtgatgtagaccaagtaatgttgtacctttcaaagcatattgacaagtcgatctgtaggtttacttgaattgaacgactctcgtcacatatgtataaatatagatttaataaaatgttattatgcatttaaaaaataaaatgttttaattgttttgttttgacctccaaacgcgcactattcattaattttcaatcaatatgtattgagttataatattacttcttccactaaaactagaactctaattatatacaattagtaaacattcaatgaaattattaggaaatcgatctaaatattttatttattattaatttttttagtattattaaagttagatgttaatattatactaatataagatacatatatttgtcaaacgtgttggaatatatatatatatactagtaaaaatttacgtgcgaggcacgtatattaaattttacgttaggtattttttattttatttagaagtgatacaattaaaaattaa

SEQ ID NO: 164284 - DNA, 5542 bp, Cannabis sativa
  modified_base (5497)..(5505): a, c, t, g, unknown or other
ttttttttttttttaatttagaatggtaaattatattatcaaaaaataaggaaaatttacaaaatacatttaaaattggacatttattcttcaaatttttttatgatttatttatttattttttcacatttttacggattttattttcttacaagtttttcacttatttttttttcttctagaaaaatattgttttcacgttgttttcccgtagtagcaacgtaaaaataatgttttttttttttttgagtaaacttaaaagtaatgttgatttaaaaaagaatggaaaaatatcatttcttatatttgtaaaaaaaaaaaaaaattcgtaaaagtgtaaaaataaattataaatccgtaaaaatataattttttttatcatttttaagtatttataaaatagtcccaaaaataagtttcatttttgagcatgtatagtaaattataatataagaaatatgatattagtaccaaaagctaatatatataataagattttatgtcaaatattattcttaacattaaataaataaataaataaaatctatttttgtaaggaaataaaaaattgacatattttttttgataactgttaggacatcgaacactatgaatcttcacattgctatgatattgtttgctttgggcctaagccctcattgatttgtttttgggcaccttcccaaaaggccttaaccaatggagttattgtccatccttatatacccataatctttttaaattctagccaatgtgggactttggttgcacacccaataatttttccctcaaacaaaggaccacattgcctccctcaaacgatctttcatccgtgcactctatcttgagagttcttacacttttctcaggccaactcctccatacacaccgtctgtctactagagcgcatccacggatcccattgtgagattattgaggctcatctcctttgtttggcattccgagaattcattcacatagttaattttgggatccaactctgatgtcaaatgaaagacctaagttctttagttactaagttcaagactaattattactcgattcattcattcaatttgcttcaaatgttataactataaactgatgaagctaaaacaaagatcacaatcaatttaaaagcttcccttgacactagaacaacaaccaggtttggcctccggtactatgcaggagagacgagaccaggaattaacgagccttgcttgggcttggaagaagaccttgagttggccagattcaaggaagctgtagatcgtgaatgcctaattgaagaaccatgcgctgtttactgcgatatatttgctcaatagagatgcgaattccttgaagaaccacgcgctactgactgtgatatattcccccagtagagatgcgaatcccttaaagaaccacgcgctactgattgtgatgtacttgctcagcaaagacacaaattcttgagatagatggatgaccaagggcacatccttcgatctcaccaggcagagttagatcgccgtaacagagaagccaacgatctaatgaggcagttcaaccagagaatcgatagaagaggcaaggatctcatcagagatccacttcaaggaagacttgttgataaatcaaggagggtctatcgataagctgatcaacccaattcctcatgaactaggacacatcttcccttgccagagggaggacagacttttccgtaaaggtaaaaaaccagcagcatcgggggccgaccagggatctcaggctcaacaagagccccctctatccatcttatggtcgaccaacctttagtaggagtccccatgatcagctaaactcctctagcagtccccatggccggccagataagagcactcccttgccaaggggagcgagtcacccaaagattaattttcaaccaaagaggactaggagtgggtggaaacacccaaaacaacaatttgaaaagtgaagttaatcactttagacagttggatccaccaaactccagcaatttgtgtgatctactccatgtcaacgcacaagctccaccagcttggtagagaagtgtgggtggttaggccctgcccagcttagggctggccaaccatgtactagcaccagaatcagagctagtcgaccttgaatataccttctcctaaggtatggctggccatgctttggccaatccgaggcttcagctcaatcaaagaaggtcaatcaaccattctgtgcaagcacagttggatcaaatacgagacatgctcaagggcctagctgatccaaaaccttcagaagttgagctagatagggcgaagggatcaccattcttagcttggaagatgtacacgggaaaagaagaccctttagtgcacctgaagtactttgagatccaaacagatctcctataagtatctggagatgtgcgatgccgaatattttcggtaactctagctgaaagcctaacaatggtatttcaagctggccacaggaagatttaattctttgaaagagctctcctgagagttctattttcagttctctacttcaagacaaacacctggctgactggaggatgttgtcgaaataaagcaaagacaagatgaacccttgaaggactacattaaacggttcatggctgaggccaccaaggtcacaggcctaacagaagaaggtcgatatacgaccatactcggaggtatcctactgttgagtgacttctagaaagatatcaggaggatctcaatgaacatcatggaggagttccttgagaaagctgatggcttcataaaacgggaagaagctgtccagaaggcccagacaaaatggcaggacaatgacgaataaacatagggtctcatagcgccccaaacactgtctagcatgctgaccagcgtagacaatctctattaattctcaagcaacgagattggtggaggcaagcgcaacaacgatggccctggcccacataatggcaaaagagggaattcaactatccctttatgccatgaagtccaaggaagaaggaggagaagtgtgtatgcttaactcttctatcaaaactcccaaagcaaggcatgactagacgtctcaacaaggtgggtcagcaataggcagtcaaaaagctagccttcatcccagaaggctggtgtccatcaccaaagtctggcccctacctctgaaggctggcttccatcccagaaggcttgcttccatcccagaaggctggcctccatctctgaagtctggcccctgcctccgaaggctagcctccatctccaaagtctggcccctacctctgaaggttggcctccatctttaaagtctgatctcttcctctgaaggttggcctccatctttggccaggcgtataggcaggtaccaccaatcctgccaaaatttccaatggtaggacactcaggggtcgttattgatggaccccatattgcaggcaagaccaataaagccagagaggcctacgctcgaacactcagtcatgagcccaaaagagacttcgtggcaggacaagaacaaggctctaagcaactaaagcttggagcacccacgatctctttcttaaaaaggagatcctatccaagacagtttctcgcacaacgacccccggtcgttaccgcacaaatcgagaatataactgcagcaagatatatggtggacaatagagcctccctcaatagccttttcaaaatcaacacatgaaaaaatgaggctccaacttgttgactgggcaccctttaatcaagtgatgtgtggcctctttggccgaagcatcacactcatcaggtatatcagattacccctcactattggagaaagtccaaccaccagaactctgatggtgcagtttgtcttaatcgacgttccctcagcttttaatgccatgataggctaactagccctctacaacttgaatgcgtaacatccatctaccacctctgcctgaaattcccaacaagacatgaagtaagatgttaagaggaaatcagtaatctgcgcgtcactgttacaacttagccttgtccaaagccaagaaatagaagatgcatccatcaaatcaaaagcatacaagcttcataatgttcaatgatcctattagctgcaacatgaggtgcgcgtggacgacatgcttgtaaagtccaaaagggttggggcatatggaggacctagacaaaaaatttcaaaatcccccactactacaacatgaaaaagctcaaacctaaacaagatccaagcccttttgaagatgaagttgcccacaacaattaaggaagtacaaagccaaacaggatgcactgctcactaagcagacttgtgtccaagtatacagacacatgtgtacccttcttcaacatgaagcgaaagcaacaacaaattcgagtggacaaaggaatgtgaaaccacattctaggagctaaaagaaacagattggctcagccacctgtgttgcccaaatccaagacaaagaagagctagacgtgcacctagtagtcacagaacatgctatgggtgctgccctcacaagagacgaagacatgtatagcaccctgtatactacaatagcaagagactgatcgacactaaaagttggttcccactcatgaagaagctgacccacagcttgctcttggcttccagaaagctaaggctatacttccagatatgccctataaaagtgtacaccgatcaacagttgcgacaggttctatagaaacttagagcatcagaccaactactcaagtgaatcattgagattcgaccaatataaaagcacctcacagccatgcatggacaccaaaggccatgctctcaccagtttcacggctgatcatagaagcatatctccccaaatctctaagagtttaggagaaaagtaggagccagagaagaagcaagagcgagaatccgggaggtgcattgaccacttgcccgatgcaaacttggcctccaaggcacctgtggggcaactgaggcacgaggcaacaaggtcagttacaaagcttctaacaatgaggctgaatatgaacccgtgaatgctagccccaagctagcatacgaagcgcaagctaaccacctcgacatgcaccaagactctcacctagttgtagattatgtcctgggtgaatatacagctcaatacaagaaaatgatggcctatcagagctgttaagacaactcaaaggctatactagaaggcaagcccccaaagacagcataactaccgacgtacttacttaactagccagttgtgccttgacaaccaaggaaaacttggtacctatttagttcttcaaagtactaagtcctgtttcaaaaagaacaaaataccacatcagatgcacttgcgtacctagcgagcagtaccatagctgacaaagcaaacatgttgcccatccagttcctagaagaacccatcattgttgtccccgaggaggtcgacatgctggatgacactccaacatggataactgttggtattatatttatnnnnnnnnntagatctactcacaagtacgttgatttaacaacctaa

SEQ ID NO: 164285 - DNA, 1361 bp, Cannabis sativa
ctataattgtagtcattagtcaaggtgcacgaggaaaaggtctaataaacccattcatacaatcttgattaatgataacataaaggatttgattagccaaaacagaaagataagactatagtgcatgttgtcaaataaggcttctttaataaagctccattgttaaatccagccagtaaagctccatagttgagaatataattccagtgatgtaacatttgacaagcattgttaactatagtctataaacaaaccattgttttttttttcaaagagaaaataataaaaattaatggttaatagtaatagtatattgattgattccattccaatgttggaattaatattgatggtgttatagctcttgctttttgttttgacactgcccttgaactttgtcactttcctttactgtggtccttggattttggtgtcatctattatgttgtcgtttttatctttgttggagttagtttcaatgactttgattttacaaaaatcctggatttttgggattttctatactattataatatgtcactgtaacaatattgttattgtaattgtaattgagctgtcaaatgacaacttcaatatgtgtacaaaaatactttacaatgttctagtgcaaacaaaaaataagttaagagttcagcttattcagtcactttttcatttcactttcttgattaaatttattgttaaataatgggtcaattagaaatactccaagatcatatccggattgtacaatgcttattttaagtaccaaaattaataagaaagcctcaagcaatgtaaacaaaagtattaaaagatttaatatttttggaaaacaagtttcacatatagtgaggttaaatctacttgacaatgcttgaatggttttaaggaaaactaaaacacaactctatcttttttattataaccatgttgattgaatgattcagttttggatttgattaacaagcttaattaagaagaagaaaaaaggaagttaatgttaatttgttttgtaaagtgatacatgcatggagttggtatattgtattgtgcgctgtatttgggatttgctatttttttcgtgtcaatcgtgttaacttgcacataatttttaaattctatctcataaaaaattaatatcgagtttgacgagttaaattttgtttgtcattcttaaagactggcgttgtacaaatagagaaaatcataaattagaatttcataattattatgaaaaaaaaagtttatatatgaaaaatttgaataactatacattaaaaactctaatattttatgcttaaaccaatacatttcaaaataaaaaatatatgacacttttatcaaaaacccaagaataa

SEQ ID NO: 164286 - DNA, 2400 bp, Cannabis sativa
gagagagagagagaagaagaagacctcttaaaggaaaaaaaaatgaataaaattttttttattattacttttgtttaaaataacattataaaattaaaatatttatgttgttaaaagaatttacacaacaacaaaaaatatgaatattcaagcaaagaaaaaatactcagtagtaattacacgagtactcacttaaaatagcgagtactcaaaatttaagttacaaaatagacaaaagcaagaatagaaatataaaataaacaagagaattatagtgatttagtcagaatttggtctacttagtccactttgtgcaacagtttcaacttagtttatttgatttggatcaccctttataagcaagtgtccattaatgttatgtaattgattaaattggactattattacaataactgcacaaaattaattaagataaacatttaaaagaataaatataaaaacagtttcatctgttcttgtcttaattacatcaatgtctacgacttgttaagttgcatatcgtccgtccatattccaaacacgcaagcatatttggaaatcatgtgttgacaacttagaacatatgagttcattacgagtcatcacacactcatcattcagaccaagcctatgtaaagaaacgatctttacttgttacaggagagacatacttgctcatcgcatataaaagacatgtgggaccaacattaatctctcacggccttgcttatcttttgattatactaggcatagtatgcgactagatcctgtctcgatttcatcatcctacaaattcaaatcattcgaggttggctctacgagaaatatatcattaacacgtcatccttttttttattgggaactgggtccacgtgtcaatttctcacgagactataacttgtatttttagataaaaaattgcacaatactgatttctataaaataattataaatttaagattcaaatttgttaaaaataaatttcactatttttaattgaatactttttgttacaatatttaactttctaacttgttcctacatacatataattataaattaaaacaaaggtaaaatctaattttatttgtaatgggtttgattttttcagttcttaaacacacatgaatagctaatgaaaccccccccccactaaaataagtagtctttttatttttaaattcaaataatttatagttagattatttattgtggtagacctacctttaccttaccataataaaatacatattattagacatacagggctcgtttagtacgtcgtattgtattgtattgtattgtattgtgtttgattgtatttattgtattgtatttattgtattgtattattttgttttatattatattagtataatttaatacaatactatatttggtattaacttttattaatagattgtataaagttatatttttaataaactcgatcccaacatcgactacaggtgaggtttgagtcctgggtctgggctctgggtccaagtttgagtctggaaatagggtcccagtttgggtcttgttcgggtccaggtccgagtttgggcctgagtctaggcctgggtctcgggtatgagtgttggtctaggtctaagtcttaggtgtgggtacgggttcgggtcccgggtccggttcgagttggagattggggttgacccgaatcctttgtaaatattataatacaagctaatacggaccatttgcatttggtatgtattaaaaaatacaacttacatccttagttgctagcaaataggtgcgaacacacctactataatcatcaactattgaaagaaaatattacttactagagtgagtatacgccttgtatggcccccaaagatcaacatgcacatattcgagtatcttcttagttgtgtgccttgctagattgaactttagctaatgttatttccctaaaacacaagcttcacgaactggtaaggcacaagaatttaaatttttaattatacattgtttatgcagttctttgaggccttgttcactaatatgtctaagtttgtgatgccacagttgcatattcgatctagcccttttaccatgcttgcttctctggttgggacagtttctccttggagaacatatagaccgttgatctttttacttttcatcactatcaaagaacctttagtgattctcaagcttttgtgcatggacttgtatccgtatccttcatcttcaagcgcacacagtgatatgaggttttgtcttaactctgggatgtgccttacgtccgtcaatagcttgattctaccatcatattgtttgacggtaacctttctagctctaatgaccctgcatgaatgatcattacccattaaaactttacctccatcaattgatttataataaaaaaaa

SEQ ID NO: 164287 - DNA, 1175 bp, Cannabis sativa
  modified_base (1129)..(1131): a, c, t, g, unknown or other
aaaaaaaaaaaaaaatcattccaacagccaaactacttacatattgtttaacatattaattacatagattcattgataagttggaatttagtcttcaaaatcatcttaacctattgtaggggtgagcataaaattcggaaaatcgaaaaaatcatttaaaccgacctatcgaacaccgttggaaccgaaaccgacgaaatcgaaaaccgaaaaaatagctaacggtttaaactaccattgaacggtcggttttttttttttttttgtaataaaacgaccaaaaaaactgaaaccgaccgttacatatatattaatttattaagtttttttttcatgtattatagttactaataatatataaaaataatatattattttttattaatattaaagttaaaaaaataagataattagtttttgaacaattaatttatatatttgtagttgtaaaatgtaaaataatgtatttatagaataaattggattattttttaaaaaaaaaaagaaaaaacttcagtttggtcggttttaagatatgttctggattggtcggtcggttttcggattgcaccaatccaaaccgaaaactgaattttgaatttttatatagaaaaaaaacgaccaaaccgactgatgctcagccctaacctgttgatatatcaatgcgatagaaccacaagaggcttctaaatgcatctattctgagtacaccaaacaaagtagactactgctgcaactgctgccgaagcaattttagctaccaagcctctccctatgagcttaaccaccggtttaactagtcagacaaatggtttggtcgaatagtcaaatcaaacaatttaaaaactacttgtgaaaattctcaaaaagttcattttgattgtaaataagttcttaactttgaaaaatagtggtaatagtctctaagttcgagattcttacaaatttgttggttctcattttaagagataggttaattgctcctaaaaatgttaagtgttgatattaaattacaacataagtccataaaaagtttactttaatgcagataaattcatattcttgaaaaaattacaataattgtaatgaccgctctagtaatttggattagtaagggcaattagcactnnnttttattattttattattatttgcgaattaatttaattgtggac

SEQ ID NO: 164288 - DNA, 2181 bp, Cannabis sativa
aattggggaaggaattctagaaaaagtaaaataaaagcatcaagatatgaaaattggagaaaataggaaacaaaactaggaagaggatggagtacttactggctatgttgaagtcaaaactgagcgtagggaatctcttcaaggggaagccggaggtgtaaaactagtagtctagaaagtcatgtctataattcatgaagctaattaggcatacaacttttttggagtagcgtcttagatagtaaaagtcaatcttctccttatgaaaggaattcctggatgtgtttcttgaggaattaccaggactaccacctcagcgaaagatagatttcattattgatttgatacctgtggcataacctgtttcaaaggcaccctaccgtatggctcccgcataattaaaagagctgaagatacaactccaagggatgctggatctagggttcacccgacctagtgtgtcgccttggggtgctttggttctgtttgtaaagaagaaggatgggactcttcgaatgtgtattgactaccgggagctgaacaagttaactattaaaaacaaatacccattgcctagaattgacaatttgtttgatcaacttaagggtaagatggtattctctaagattgatttgagatctgattatcatcaattcagaattcgggaagaagatattctgaagacagcttttcgaactaggtatggccattatgagttcctggttatgtcattcggattgacaaatgctccgacagcctttatggatctcgtgaatagggtattcaaggatttcctgaataattttgtaattgtatttatcgatgatatacttgtgtactctcgatcggaagcagaacatgagcaacatcttcgtatggttttacaatggctcagagatcacaaactttatgcaaagttcaaaaagtgtgagttttggctgtcataggtgtcttttttgggacatatcgtcaggaaagacgacattatggtagacccagggaaacttgaagcagtgaagaactggcctataccgagaatagttattgaggtacgaagtttcctcagtttagtgagttactatcgacgtttcgtagaaggattctcaaagatttcaattccattgtctgagttaactagaaagagttagcgatttgtgtggtcagataaatgtgagaaaagttttcaagagttgaaacaacgattgattacagctctagtcttagccctaccttctgatcaagagaagtttgtggtgtattgtgatgcatccagacagggtttgggctgtgtgttcatgcaagcagacaaggtaatagcttatgcctcacggaaactgaaggattatgagcaacgttattttactcatgatttggagcttgcagcagttgtgttcgctttaaagatttggcgacactacttgtatggtgaacggtgtgaaatttacaactatcacaaaagtctcaagtacttcttcactcagaaagatctaaacatgagacaaaggtggtggttggagttagtgaaagactatgattatgaaattttgtatcatcccgggaaagcaaatgttgttgcagaggctctgagtcaaaaagggcctgatcaaatgtttaatatggtaataatttctccccagttagcctttgatatgtctagggaaaacattgaatttgtaattggagaaatgcataacctgacacttcaatcagacctcttggaaaggattagaatagtacaattagaagaccctgaattggttaaggttcgaggagatgtcttagcgggcaaagctaaggatttctcaatttcgagtaatggaatgttgttatttaagactcgcatatgcgtaccaagtaatattgaacttaaaaaggaaatagtagatgagacacacaccaccccttattcattgcattcaggtaccaccaagatgtatcaagatttcaagccttattattgatggtacataatgaatagaaggaggacattgcaatggattttttggtcggtttgtttgcctaagaaagaccacagggatgtatgactcagtttgggtggtagtggattgctttacaatgttagctcatttcttgcctgtaaaaatatcatatatggtggatcagtgcactgacttatatgtgaaagagattgttcgccttcatggggtaccaaaatctatt

SEQ ID NO: 164289 - DNA, 5452 bp, Cannabis sativa
ggtccgcataataatccttaaaaaaaaaacataaaagattgagatggaagagaaagaacactgtttggagtcctccaccggtgccttctgctccttgctctccttctacacttagaatcctctcaattttcgaataagccccctttaaataaagccaaaaattgaagtttcccattttttctcactaaggtcgcaatcttgctcgcattttcctattttctgtactaatttttgcagtttttcgtttttaatttcttgttgcgacgactaatagtattttggtcataaccctctcaatataactaggaatcagacaattcaagatgttttagaaagataaaagagagatctagaactttcattaatttttcctagaagtgaatggatcatagtgaaaaattggcttgaagtttcagactttattttcaatcacaaaaggagcatgttgaacattcaaaacatagaaatttcaatttatttttggaaagtcatcactattgactcttgaccacgaaattaaagactgaaaatgcaatctttgacccattttaagaaataggaaattactcaaagctaaaagaagtttcctttcttcaatagattttctcatttttgctcaaaaaggcttgcagaacactaaaattattaaaattgaagatctccaaacatttttcctaaaaaaacaaataaaaacaaaatccaagcataaatctgcacaataaaataataaaaagactaaaacactccctaaattggactctaaaaaatgcataaaaataaccttaacaaattcctcaaaacttaacctttactcgccctcaagtaaagaccaagttaagctataactaaaaagaagaataaaaaacacacaaaagtaagctactattgttatttatactacattatttttcccatgaaattttaattgtaatttttaaccagaatttcagctcaactacctcaaagttcaactttaaagttcaatgagaaataaataataggacttacaaatgaccataataatttgaacttcaccatatatgttcaaatcataccaatcaaaatcacaatctaaatttttaatatgcttgcataatttaaccttctccactaatgccaacaacaaatgctttgaaaccaaaagaactttaatcagattacaacgttaggcttaggtaagggtagatgaaaatgtcatttaggctcaactataccataagctttttagattctaagcatctcaatttcattctaaaattatccatatccccacttaataaaatacactagagatatttatatttttgcaacccaaacccataactctttattatttattttttttttgttcggtacttcttcttctttttttttgttcttttctttttttttttttgtactttttaagagaagaatataagaaatttaagaaaatgattgcgaaaaattaaaacagtctctctcactatatttaagctttctcaaaacacaatacccaattacaattttctcccaaacttatttaaaactcatggtatagttaggacaaaggaaaataataaatgggtcaaatttttttagctcaaaaagtgtgtaatatatataaaaaaatcaatttaaggctcaaaagggttaaactatggataattacacaacaggtttgcttgaaaggcacaaacgttccaaaaaaatttcctaaattatttttcaaagcataagtcatcaaagaattcacctcaaaggccgaacaatgcaatttctatcaaattcaaacaatcatacttccaaccctagtcaagcatatataataaaatccaaaatattgtatttgtgaaacatattaaaaatttcccacagaaccttttaaattaaaactctaaaacaattaaaccaagcacatagttattagcaatttcttttgcacaggtaaaacaatgcaatatacacaaaaacaatggcttaacaaataaaaataataaaaaaaacttcaaaagtaattaaaattgtaagtccctcccccaaactaaagattcacattgttcccaatgtgactaatttttttttagtcaatcagtgaaatttattactccacaaatatcaatttacatcctacaagcatcttcatccgaagatctgatttccttctatatgtacaatatatgataacaatgtataaccatgcaacaaaagttgttaacaaatgtttgaaaaccaaaaagtatcagtcgggttaacttgtttgggccaattgcaatttgctcttctcttcacatcttcttttgtaacactaaccacttgctccagtgattgctttgctgaattccataataggtcatttcgggtcctctatagttgatacacaatggcagcaacagcagcagccaagatcgccttcctaagtctgctgattttggctcgttctatccaccttaacaacctgcataaggctattgctttaactctctagtcgagccaatattttacttgagataagcaaagattagagaaggagcaagagaagaaaagataatttgaagactctgtttggtttttgcagaacaagcaaaaatcttcaccaataatattgagtttatgtagcctttctctagttctgagcctatcttggactgcaatccataagcaaaaactgtgtctaggaatgttaagtatattccatacctcatggctccaattcactttcctttggaaaggacaaagtgctttgtaaccattaaagatcttgtattgaacagatgcaaattacttaatgtccatagaaggtctaacttgatatttgacaacaaccaatttcttccaataccaactagcttagggtggagctttgtagttccaccaattctcacccttaatatatacacagtgaatccatctaatccacaagttgtcttccttattcgtaattgcccacacatattttgtcatcgctgctatgttccattctgcaattattttcaaactgatccctccttcttcttttggttggcaaacatggtcccaagtaattggtccagagcccaaggacaaatgatggcctttccacaagtaagcacggcaaatggcttcaatatctcttatagacttatttggtaaaaccataacttgagtccaataagagtgaattgacataaggactgagttaacaagcacaacccttcctactagagataaattccttgaaaccatgttttgattctagaagtcattttgtcagctaacacaatgcattctttaccagatatacgtttagcacaaacagggatacttaagtatttgaaaggtatatattttttgctaaaacctgagttgtcaatgatacgctaactatcatgatcttccataccacaacaataaaatgtagacttgttttggttcggttgcaggccagaagagaaagagaaaagctttagacgttgcaatacataatatatactcttgaagtcaccatgacaaaagagtatgacatcatcaacaaacatcaaatggttcagtttaagctctgcacagctgtcatgaaatttaaagtctggtttggttccaatctttaacattattcttgatagatactccataccaagaacaaatagtaatggtgacattggatctccctatcgtaatccccttttctccttaaaaaatccatgaagcgatccattgaacataagagagaatctaggagtacgaacacaaatcattattagcttgacaaacttatcagggaaatgtaaagcctgaagtatttcttccaagtaatcccaatcaagtgtatcataagctttctgtagatcaagtttgatcatacacccagctttggagcttttccttccataatgccttatcagatcttgacagaccatgatattatgtgcaataaacttgccagtaataaatcccccctgattttgagctaccaaatcaggtaagatagcttttagcctggagcagattagtttagttgcaactttgtagataacattgcaacatgcaataggtctaaagtcactaactgtattaggacacttacacttggtaataagtgttaacatagtagtattaatttccttgagaatcggacttgagtgcaagaaagatacgacagcttcactaatgccatctccaattaaatcccagttatcttggaaaaaacaactagtaaagccatctggtcctggagccttgattcttgggattgcaaaaatagctttcttgatttcattcttggagaattccttcattgataaatcatcttgtgctttggagacaagaggcccgagtttcatgaccccagcactgaccttcctcctgctttccattttagaaccaagtaattggtgataaaaggaaagaaaagcaccagtaatttttcctggttcatcagttcttaccctctgctgatcttcaatggacaaaatcctatttagttttctcctctctttgatactagcatggaaaatggccgtattttcatctccgtctttaatccaactaagcttggatttctaatacagaaatgagtttaggccttttaaaagctgtccatatttaagccaagctactatttctttatttgtaagttcccaatgtgactattaaaatagagagaaaaaacttacttgagatacgcgccacatcaatatggcagagttggtggcggcagtggccactgatacaatatgtactgcatgagattagtgaaaaagctatccatggcggggttcaccattagcctctcaaccaacccatttagttgatccacctgaattttctcatcattatgcactacaagtcgcttagccttttttttttaatgttgaacaaaatgggatcttttctttgtcttcttctttttcctttttactcttagaccgtcatccaccacatcaactctacaacaagtgggaatatcagtggctgcaaaaacatgaaatgttacctctttatttttcactcgcaactttaattttcccttttatacatcaatcaatgctctccctagtataattgggatatttttatcttcttccatgtcaagaataatataatctgtaggaaagatgaatttacccaccttgactaagacatcctcaatcattcccctaggatgcataataaagtgatccgccatttgtaaggagacagttgtaggatgagattctcccaattttagcttccaaaagactgataaaggcattaaattcacactagcccccaaatcagacaaggcctttgtttcaactgagcctcctatagagcatagaatattaaaaccacatggttctttgagctttgggggtagtttcttttgcaagatagcactgcactcctcattaagtgctacagtctcgtaatcctccaatcattttttttcttcaataagattttcttcataaacttcacataacttggcatctgctctaaagcttcagcaaaggga

SEQ ID NO: 164290 - DNA, 1535 bp, Cannabis sativa
tggtcactctcagttagactttatatagtgaagctatctacatagcatcataaaaattaggctcatgggctgatagaattaattacctgtacatctttcaacaaagagactctaaactctttcttttctaaactctttctttttgttagtgttagagttagtcttacattggtaatcgataacttttacaaaatataaagaccaaaatggtatttaccttatatatttgtgttatgattgtctcactcacaacctcttttcattcatctctaatgaatcccattccaatattgtacttgttacatacaagattatttgttgttaaaaaaaattggatataaattatagatgaaaatttcttcgttcattataaattattatatttaaatttgtaacctcataaatttacaccttattcagttgcacttactagtaaacatgtgcaactattcatgaaattcatatattttaatgtatagttgagaaatgggagaccgttcttagtattcatgtttatatataatatttacttcaaagtaattttaacacatgattaagttcagatgatttacaattgataaacataatgaatgtgtttgtgagagagatcatctgataattacatgtgcatatataattattggtaattaggtgtaatgtattagtctctatttgatgcatgctttagttttatcgtttatgtgtatataaatataaattttggggatcttaattagtaggccaaggggaccatttcacatatttcatgtctcctctttagataaaaaaggaaaaacgctataaccatatatatctctatagcttttctattgagctttacgcaatctcctccaagaaaaataaagtcccaagtttctgaagcaagcaaattcagaatcatatctctaagaaactttcttccatgcaccacaaaaatcccatattgcttgctattatatacttgctttaactctctctctctctctctagcccaataaccaaggttaattattcgcattatcctagcttttaagatcaataattaatggtccccgaaatgcctttccccattctgagtagctaccttaattaagcttcatgcatgaagactatgactaccaaatcaacagatattaactaccgttcaatgcccaacaaatcattttcgttgcccaaattatttatatgaattgagaagattatatatcttcttttctaatccataatcaatcagtggcccatgtttgtttgaatgatctcaaaatggacccgttgatatttgcacgttttatttgtggattgcatatatagatataaatagggttgttgatataaatcggaagaccgcggtttaaatccggaccacaacaatctgaaccactgtaaaccgtaactggagaaactgtttatggtagtttggtcaatctatattgtttacggtagttaacggttaaaccggaccagactgtttataataaataattaatttatatatatattttttatatatgactatatgtataattttaaacttt

SEQ ID NO: 164291 - DNA, 1258 bp, Cannabis sativa
catcacaacaaataagctgtgatagttaatttataaaatttaactcaaaatcatatgaaagagaaaaaaaatacacaaagtatacatattgttctattttacctaaccatattttttagagaattctaattaacacttttatgcaacttattattatatttattattattattggcgtattgtagtaaatattaggttttcataaattttaatgtcaacctgataattaagaatgaaacgccatattagtatggtgttaattaacttaaagtgtaaattgtaatatttttctaagctaaatgttcttagtactggctttattataacatatatattttgatttggactttataataatggcttgagccaggtttgttctttagtgggtaattaggcttttctttatgtgcaggttattaacttcgctaaatccatcttgtacttctcacctaatatgccgaatgaggttagtggcttgtttgaacaaatattaaacatgctaaagaaagatgtcattgaaaaatatttaggattgctaatgcaaagaggaaggtataagaaagaaatttttagatcaataaaagataaaatgtggaatcgactacatggttattaagaaaaactgttctcgcaagggggtaaagagatttcagaaaaagcagtagtccaagtgattaaaacatatttgatgtcatgtttttaaattccagaagggctgaatgaagagattgaaagtttgatagcccgatattggtggggttcagtggatgcaggactaagtatctattggagagcttggcatcaactgtgtcaatctaagagtaatgttggattaggtttttgaaggttcagtccatataatcaagccttacttgcaaaataatcatggagaatttgaactaaaccatcatctttattggctcaagtgtgtaaagcaagatattttagagactcttctattttggaggcaagtgagggttattattcatccatgacatggagagggattgtgtggggaagagatttgttgctgaaaggattaaggcactatagtggtaatggtgcttctacgaggatatttgatgatctttggttaccacgaccgccatcttttctttcaagtacaaaagcctcctttaatgtaatcacagttaggggtgttcatcaaaccgcccaaatcgctcaaaccgcccgcaccgcaaaagaaatgcggtttgaaattctttgcggtgcggtcgcggtttgagtttttcctaaa

SEQ ID NO: 164292 - DNA, 1482 bp, Cannabis sativa
atatgcctagttgctcctgaatccataatccatgaattatccaaaggagattcagagttatgagacaaaacgatacctgaattacctgaggaagtgcttggttctgaggtgttcagatttgattgttgagatgccagcagattaagtaattgctggtattgtgttgtggttatttgaggaagcaatgcatgattttcttgctggttactgccattttcatcagcaatttgaacttgatttgcactggattctttggacttgttcttgttgaaaccaggtgggtaactgtgaattttgtaacacttctcgatggtatgtcccatgatgttgcagtgtgtacagaatggcctatttcgctttagaggttgattcttggattgttgattgtctgttttctgtcttgcatttttatttccttggaaggcaaaggccatggcaggattagcattattattagcatttgaaacattacctttctggtgttcttcttgggtgacaaggtggaacacacgacttacttcaggcaaaggatccattagaagaatactccctcgaacttgagagtaagaatcagataaacccattagaaaagacataatgtgttccatatgataatgatcttgaagtctttttaactccaccacaagtacatccattgcaagtgcaagatggcctaaaattggttagttcctcccatatagttttgagtttagtaaaatacatactaacagattgattgccttatttgagattcattaaatcttttctcaaattgtatatatgggggccatttctttggtggaatctgactttaagatcattccagatggcagaggcagattcatcatagagtatacttgatgaaatttctttggataccgaatttaaaatccaagatataacagtgttgttatttcttatccaagcattgtaaagaattgaatcagaaagtgagggtttagaaattgaaccgtccaagaagccgattttgttcttgactgaaattgcaagaagcatggctctgctccaggacacatatttgtcctgtccagtgaggggctgagagacgagagtgtgccctaggttgtctccatgatgaagaaaataaggattcgcaggatcttcaagaggatttcttgaagctaaaacttgcagaggtgcattctgagtgtctccaatggtggttcgaatcgtagtttctccctgagattcttgagttgatcgattatcatctgtaggcattgcagaagatcaatcgagaggggaacgatcgaatttgagcaagagagaaggagaagaagttgcagcggaggaaaacacagcttcgtcggagatgaagaacacgactatggctggaacagatcggacaggaaagcctaactttcctgctctgataccatatcacgaaaaagaagtaaagacatttcattaatttgagaaagttgaaattagattacgggaatgaagactaaggactatata

SEQ ID NO: 164293 - DNA, 2798 bp, Cannabis sativa
aagtgagaagaaaacatatttgttattattgggaatggcatatctgaaaatcactggtaagtaatcatcccattacattatgttattacagttgattatttttaaatattgagctagttataattaacattatattgtattgtatgtagtgttggtatgggtggatatactggcaatatatgcagtatcgacattgataacatacttaacagatgtttggaagattaattacacgcatgctgctgcaattgtcaatatgttttggggcttcacagccattatgcctttcaccatgcaatacattgttgatactttcttaggcaatttttccatggtttttctctccaattttgcctattccattgtaagtccaattccctatatatactcctacctacctcatttaatttattattatatataactttattagttaccattgtcattggaatataatttagttgatcatgaggaatttattttatacaatggcatttaataagtccagtttatcatttgttgaatctttaaattcctaatatttccctccattgttatttttttaaaaaataatcatatttacgcccaaaaatatatttaggtaccccatttattaaaaatgattgaaattaaaattaaattattgtatttctttgttcttatatatatatagtttcttttatatatttacatatgtttttcctaaaaaattaaacatgatttgttagaaaatatatgaaactttaattttttacaatatatggaagagtaagttttgtgaatttttattttttattaataaatgagagtagccattataaaatttaatagtgtgaagagaatgcccacttctaaaattgtttcagatgtataatataattaaataccaattatatcctcaagtcaaaacttacatgttcaaattaaatttggtgtaatataaactcacatggtattgttttgaaaatacaaagtaatatatttttcttttctagaatgccaaatagcaagaatttatacaaactgaaatttctttatgtcacacatttattgtcatatcaaatagtattaaaattttgattattataatataatattatttaatcgactgaaaacagggtttagggtttttgtcaatgtcaacaccaccagttctatccaagatagtaggaaattgtgatgagtacaagcctagctgcattggcaaagagcaaaagattctattttatacaggacttactctactagctttaggagtctctggtcatttaacctctttacccaaattcattgaagatcacaaaactcgtgatggaaataatgcaaaactttatttctgttgtggtctctttgctattgttctagtccctctaattggagctatattaattcccatcataaaatcatggtcaattatatttggcatcacagcaatatgttcagtcttggccacaattatattcttaactggaattacaacataccaacgtgacaaagcaagaggaagccccttaactattgtgtttagggttttgattgcatctgcctttaaatcatttcaaaaatctccaaaagatgcctctcaattgtatgagcatcaacaaaataatggcattagttacaaaatatctcacactcatcgcctcaggttttttatctcaaccctttttcaaattctattttttttctctttccatgcaaattaacacactaaattattctacaaaaatgtaggtgcctagacaaggctgctattgtgttaccaaaccaatcacaacacaatgttaatatgtggagagtttgtagtgtaactgaagtagaagaaaccaagaccatcatatgcatgattccaatgtgcaccactttcttccttcttggagttgtgtcttcaattgggaatacctactttcttgaacaagccaaccacatgaatcaaaaaattggtaatataagtgttccacttactacacttgtattttttcgtgatcatgcaaaagcacaattcgggaaatgttatgtaagaatagcttcgaattatggatcatcatcgaatattaggtatttagccagaattgggatcgctgtgtcgatgatatttgcagtgaattgttgtataacggctgcgaaagttgaaaacaaaaggcttgatgtggtgaacaatcatgggttgctctacaagcctcaagataagattccaatgagcatgttttggttgttaccgcaatttcttcttcttggaggacttgatgggatttcgaagaaaagtattgaactttttgttactaatcaagggcctgcttctatggataggtacatgactcattttgctatggctgtgtttggagtgggaactatgggaagtgttgtatcggtttgtttagttgataagattagctcaataggagaaagtcataatagttggttccaagacaccttgaataggagtcgtttggataagtattattgggttttggctactttgagtgctgccaattttgttttgtacattttattagctgttttgtatgatagtaaatatttaagaattgatgagcaacaaatgtccaagtctaaccaaagtatggaatatggagatgattgataaatcaacatttggttgtcatagattttttttttggaaaattttagttttgtttgtttttaaagaattgattaatggttcctacattgttatttgaaaaatatctctatctacttctatttctgatttttttctttacgctagttaggattttttccctccaaactttgacatgtgtcaaatcatgccccctgaa

SEQ ID NO: 164294 - DNA, 1864 bp, Cannabis sativa
tataactatataagccttcattgctgtcaataaccaaaacatgtaaaactattcacatacattgttttgatgagatattgatgcagtttttgtatgatgtcaatgatagcagtaatcttgtcactgacatatttgaagaaaacattgaaagacgctaaccaatttcttgatgtttaccatgaaatttcctaatttatgtttattagtcttaaaatttatcaatatacttgaatatgtatgttgtatttgctttgccttaatcttgtacattgttggagggtagagaaattgaagctaaatattttatgatggcgtttagcttcaaattacaggatctaaattgtatcgatagctaggaattccagagcctagttctctcccataaaagaggttacaatcccaccaatttctccaccccctctactgactcacaacattacttttattgcatactaaggtgtactgtgtaccacagccactctagatactaaccccactaaccaacttttactagttacaattccctgctgcactaaccacctcacccttgtgttgcctaccgtttctagcgtttacaaaagtgattggaggtctatcagtgtgaacatactcttctgacacttgatttatgctcaagttcatgtacaacacaatagtacttttaattttgttggagtatcataaatctagtttaattgtttgttattgcatggttctacgtcatatatgtttgcacaactaatattagtcattattttattataatcaataaacatcaaaagatttgtttgacagattgacatggtgaatgatgaagtgataagaaggggggcaaggagagtgtctttcacgtttcgtaaggtgcgtaatttgtgagatcgcgtgctttgttttcacggtagaaccaccataaactcttgcatgctttaccttttcagttcaattcttacttattactgtcgtttattcgtctttggccaaatctgtcgtcaacaaaactcatactcctaagatattaacatgaacacagaaatttatagtctttttattattcttcatggtgatggctgtttgatactttaataatcttgttgtattctctaaatggaggagtaaaatgtattaatttaattttgcactctaaaaatagaatggttccaacattgattcatgattgtcttgtattaaaggtagttaaattcatgtacttttcaggttagaacaaatccctgcaattgtgactttccccatcattgtgattctcagagagacagaacaaggtaagttccttgggttggggcgagcaacggaatcaatttattccattgtagaagaggattcatcaaccaaagtaaacttgtctcttggatacttgaaaataagaaccattttttggctcttttatttatttattattttttttttgttgagaacaaatgttattattaatgaatagaatccattataacagcagattatcttcgtccagtcgatgagcaaatttagctaaatcatgtatggttgagagcatcagttttggttttaccgtagatgtattgtttttaatatattgagaaattatatttttttttatatatgatgtatattagaattatactatgcattcgataaatttatttgagatttttacgcttgatgtctttttttacctttttttgtacatttttatttattctcaattatttaaacctttttacattttttatttttcaattttactttttcaaaagttcaataattacaaatatacttttactatgcatatgttatgttttatccattctaacaccccacctcctccataactgctctattcttctttttttttttctctgtttctctt

SEQ ID NO: 164295 - DNA, 1214 bp, Cannabis sativa
taatatattacaactgccatttagttttctaatttccttctcttgtatgcatggctccaaccaccaatgccaagaatcatgatattttccatatttctttaaatcaaattgttatattcatttatatttttattaaaagaatttattctctccccttgaaccactcatttccttctacaaattttctacgatttattttctaatcttcactttgactcaaaggctcgatcactactcactgcaactctccaccaatttttgatctgaccttccccttaccactaccaacactggaactcttcaacacgcccaatacctgcaggactttaggtacagttttttgtaattaattttaataaataataaattattttaatattttagttttagagttctttgttgagatgagttgaataccgaggcattatttactaatttaatattttaatcatagtagttatattgtttgttaattagatagtgtttgtgtcttttttttttcattttagttttgtgaagaaatagagatttgaaaaggaacaacacggtgttgatagttgcagcaaaattgttgaagcaaacccaattactactgctacatcccatacacctgtatctaagacttccaaattaaacccccattggtaaagaaaaactgctaggctatcttcagaagtttgagatcattttaccaacccaaagtctaaacatgataaccaaaaagcactctgtaattattatgggaaaagttatgtgcatgaaataggaattatgggactagcactctatagtatcatctaaaaaatcagtgcatgaaatatctttatagggataaaagtaaaggtgagaagagagttttatgttcaacaaaattggtacagagggtggggctaataagcttgtagcagttaggtttagtcagtttgcttgtaggacaacttgtgctaagatgattgtgcttgatgaattaccatttagatttgtcaagaaagaagattttaaatatttttgtagcgtgccatgtcctaattttgaagttccatctcgatggacaattactagagatattatgcaaaccttcctcgatgagaagaataaattaaaattgtggttacatattccattgcagaccgtgatgagattttgtctggtggatacactttcttcaacaatcggccagtgatcatgagggcgtgggatccaaacaagaattt

SEQ ID NO: 164296 - DNA, 1710 bp, Cannabis sativa
aatgattttctagtgtaacttgggttggagtaaacttgaataggaaaaggattttactattatcttcattatgaaaaaatagataaataaataaaacctattatcaccatcatcaacttttccttttttatctctctcgaaaaagcctagaaaactaagagaaaaaccctattttcaaccagagttctacctcttttcagctaggagattttgttcaaagatagaactaattgaagataaatcaagataagcttagctcaaactttccttcctctatgaaattttgaaggaaatcaagttttaagtttgaatttttcatgaactggttctatatgattagattagtgttagagcatgtttttaagctctaattatcaattagtaagttgtttttatgcttgtgctattggttgaaaatttaaatttgagttcatggaacttaagcttgagctctaatgatattttttttttcattttcatgtttttgggataattgaatggtgggttatgttctaatcatggcattgtactgttctcgaaagtttggcagaatttggagaagtattggtagggttggtattgtttaaaccacgtttagccatttctacatggaaaaacagttacagtttactataaacccagaaacccagacaacgatgaaccgtttggggtgtttttttccagcacttaagtttttatgttttatcgaatttagagtattaccacgctatttatcgaaaggaaaatttctagttttgagtttatgtcctagaacaggattaattgagttatttattgttttaccgttgtcgtgacatagggcccaagattgtcgagtgttgttctacttaagttggcttacacacctaaatttgaatctgaggtaaaaaaaagttaattgtaccgcattgcatgtcaaattacgatacagtaattattgttaatacgaaagagttattactctattttgagactggtgttagatttcttacttatcggttgtctcattagacaacgatagtgacattagttgtctcatttggaaatgaggaatagcctatacttatgaggtatctggagtagtttatcttattatacaaataattgaattgttagtattgtattatgctgaaataatatgtttgaatatatgtccggtgacatgactattattttattgccatgcattgtttataaaattgtattttctgcttttcttgttgagtctttatgattcacagtgctttgtgatgcaggtaaaagaaaagagaaaatagattagccacgagttaggggttttcgagagaatagacacatcagcctcctcatctgtcgtgctcagttgtcgggatcatgttttgcattattttgaatatgtatgaatatttaaaataaaacaatattctagtactttagtaaaagattataacaatggatccctaaacccaataacttttgaaggaatgtaaattatatttcaaaagtaattagtcaagttttaaataaaccatgattttttttttcaaattattagtttataataatttataaaagaacacacgtggtgtccttacgggttaagttacaacatggtatcagagtgatcaaggtttgaaggtcctgaagactgactggatatatacacaaggctggccctgaaaatatatgggcccaagaagaattaagttttggggccctcaaaaatatata

SEQ ID NO: 164297 - DNA, 910 bp, Cannabis sativa
  modified_base (876)..(879): a, c, t, g, unknown or other
ttttttttttttgagagaaattaataattaaaatgttgaaacgttcattttcacgtgagattcgagaagacttttctttttttttgttagaagtgagaagggttggtgcagcgtgtaagtacctatatcaatgattttgtcaagtgttaggttgaatttgtggtagatcttacaatcaaaaggaattgtggtaggctggtagcgatcgatcaaaaaataaatgaaagggaaggtacatttgtttgttttacttttgtctttatatatttatgtttatttattagtttatattttctttattagattttctattttttttttaaaaaaaatattggtaaagacttaattaataatagtaatctatatctatattttacatatagacaaaaatacaaaataaattttggtgacattttgtgtattctccatagtatataaattagtcaaacagactgcgctttacatacggctagttataaaaattttaaattatatgtatgaatatttattgaataataaaatcgtattaaaataatttcgaatttatttttatatataattttaaaatatatatttattaaaaaaaattatatatagagaactctaaagaatatttttttttaaaataaaattcatcatacaatttctcatatacaaaataaaatacataaaaaatatcttcaaatatatattatgatacaaaaaaattaaaaattgaataatactcacacaaaatataaatctaaaacagaaagaagaccataaatttattgaaaactcattatataattttaaaataactgtcattaccgtatcacttatactcactactacatttaatgatattatcaccgtactgttgggttttatgccctnnnnaaaactctatttcaatgtaatccagattatt

SEQ ID NO: 164298 - DNA, 989 bp, Cannabis sativa
tatattatatatatatacatacattgatataaacacgcgactttatatattcccaccttgtagatgtacatccacacacatatatatgtaagtgatcatgttataattatagttacagattgcattcatatatagtataaagtgtggtttaaacttaattatttaattatctttgttaactataataaaatttattattattatttaacggaatactcttaatattaactttattatatgtattcagcttagaactacaataattaaaaagaagttaggaagaatttacatagtatataatttaacaaaataaataatcaaaatttaaatatactatatcgataaaaataactaatgaaatagcattgaagatcaaaaaggaaatatataaacgaatttaacagaaaactttgatgtgcatgcatgcatatgtacaggaaatgtgagtattattattagatccatcaataataaagataacactatatatagttaattaatgattattttaaaaattatttaattaatttatatatatgaaatttttttttttgaaaagaaactttattaatcaaagctcaaaactacaaagaataaaagaggctagcttcacaaaacttagctaaccactcaggaaaagaaatgagaaaggattgagtcaaatggtactcaaggcttctcttagctaacatatgtgcaatttcattatctttcctatacacaaatttgagctttgtacaacggggaaacctttggtggcgcttgatcttattaataaccgatctgtccattgtgagggaatcgctcccaccattgaactcatccactaactgcttacagtccgtgcgcacttcaaactggttgttggtgtcaatccggcagctcgtcaaggcagccaatattgcttcagcttctgcaatggttaccgaactgcaatgagggagaaagcacatacctgctgcctgaattttggccttccaatctgtcca

SEQ ID NO: 164299 - DNA, 4105 bp, Cannabis sativa
  modified_base (855)..(855): a, c, t, g, unknown or other
  modified_base (1489)..(1501): a, c, t, g, unknown or other
agcacgccataacagattcttaaccttaggcgggatcttcaattgccatagtttacgccagaatccagaattatcaggtcttgaatgccgaggtttatttttctggagcaggagataggcaattttgacagagaagagcccagtatggtctcctgaccacgaccaaaaatcagagtcaacatttggaaacaaaggaagaccaagtattaagctagcatcccgattattgaacaaatcattgatgacatctgaatcccagctacgagtatccacagagaagagggaactcacattattatgcaagagagctggatgagttgaagtaacaagtctattgtcaggatcaggaagccatggagttgaaagtattctggtagtttcaccatctccaatgatacgaacagccccctgacgaaccaccttttgagcagcccagatactacgccagacaaagctgggattatttcccaattcagctgagagataatcactggtaggaaaatatttggctctgaaaatttgccccaccaaagagtttggttgacacaagagtctccagccttgtttagcaagcatagcaatattaaaatcatgaagatcagttttggagtcgccattctttcccaggacatccatatgataccacgacccttgcttgaactgcttttccaccaaaagctagccataagcttctcaatatcctcacaaatgccaagcagaattaaaaagacactcatagcatatgttggtaatgattgaatcacagtcttgagaagaatttccttgccagctcgagataagaatttaccatcccaactattgatgcgagacatgaccttattctttaagaaaccnagaatagagttcttgtttcgaccaataatattaggtaagccaaggtacagactaccatccgacgcttcaaccatcctaagcacagaacaaataccagaacgatgttgcgcagtggtgttaggactaaaaaagatcgatgacttagagaaatttacttgctgaccagaagccatttggaaagtatgaaggagggtatttacactcatagcagcttctgtagtggtctggcaaaagagatagctgtcatctgcaaaaagcatgtgagtgatagatggggcaccgcgagccaccttgcaaccttgaatagcccgtcttgcctcaaacttattaataagcgccgtaagtccttcagcacacatgatgaatagataagtggatagaggatcaccttgccgaataccacgggatggagtgatagggccaacaacatgaccaccatggattaccttatagaaaaagcttaaaccttccatcattataaaaaaaggttagcagtagccagaaaaataaccatatggcttgtaggtaaaggctcatttgtcataagctacttagttacaagttctactaatattaaaaaaaaaaaaaaaaagtaaatagtagtataaatacccaaagttttatgtttgtaagnnnnnnnnnnnnnatgtttatttttagcggcataaatacccaatgtttgcaaaactgtaatttttctctaattttatcaatacagactttgatattgtcttaaacagggcacatataagacctaaatttttgatcatcgggtttagataaaaatatatattatcatttacttctaaatgctcttttaataaatttaaaaaagagtctgtactgacaaaactgaaaaaaaattattccataaaagtacaatcacaggacaaaatcatgtctctatttttatattgtaaattattccgaatttcttaaaattttataaaatatcttaaatagctataacgtaaaaattagactaaaaaattcttcttaataccaaaacaaataaaagatgcatcaatacatatcttttaagggggtccattgtacaatcactcaataatatttgataaacttgtttatcacaatcctgcatgcatcttgaaagaaaaatgttcttttttttttttcataacaaattttacggtataatcagggcttagggacagtaagaaatatataactgattaaatacatgtcagcagataaaagcagatattgtgtaaaaaaaaaaaagattaaaacacagatattgtgttcaaatatataactgattaaatatatgtcagcagatcgttcactaattatttctacctaatgttaacaacattctgtattacaaataggttgagttcagtcaccaccagttccattctcttcatcattttcatcttgtttgctttcactaccttcatttttatccgataacggttcttccaactttcttttctttttcacatccttagtttgtgatgttcctttctttttctcagcgttcttctttctaaactctggaaaagggccagacaaacaagattagtagatctccaagtaattaaacaagacaaaaacattcaaaaaccagtcaattggtgtgcactattgtggaagatcattggctaagggataaagccttagcaataggttgagtgatattccttggaaaatcagattttgggaactggtagttgcaaaagtggtcaaggaactagaccaggttgaaacggctttttctttttcaatgaggatacccgactcttacttaatgggcactttacttttcaccaattaatatttatcctctatagcccccaaagtcggttactgtgatgtttagaacgaattaacaaaaacctttggtgggacagaggatatttattaggtggagatcacttagttcgctcgggagcggtgtgtaggccaaaagcaacaaatgtgaaatgtggacttggaattggcaaaagaaatacacagcactcctaatgaaattgttatggtgatttcctaatgaatacaattcactagggcgcaaagttgtaaagagaaaataaggtttgacaaaaaaaccagtgagcttcaaagagggggaagccatttcagctagatgacattggaaagagaatgagtaagattttggaagggtatatccgtatatggatagcaaaggctttttcctaagtcaaacaggtgagtccaatttttttcttttgaaagatgacgaagatatgggagaaaggtgatattcaaaataaggatattcatttcattagacatttaaatgataatttccaattttgatagactttattgtctagagcggagaaaagatgattttgcagcctaataaaagatagaagggtatgaatgggtgataatactaaaatgttttcgagactatattcagctgtcctctctttacaaacatcttatggaattgcccagctccgtcaaaagctagttttcagttggctggtagcttttggacacttcaacttatattcaggttggtgtgtattgtgcaaacaaaatctaaaggccaggagatcatagatcacctcgctatacaccgtaacttaaagttttctgtacagttgtggtttaagttacttagtttaatttggaatggtgacaggtttttgaggttatgggaggtagtatgatatctgcaatggtgcttcatcaatcttaattattagtacttgttccattctactcttgcctctttgtaggatatgatctagaatgatttttaacttccctttatcatacccaaaatcaaacaagagaatgtaaaccagagattgcaacaaaacttaaagagcaacagagaaaaagattctaaaactaagacgagaaccaaatttaaaaaccaacacagggaaactgaagagaatattccagtagagaagttatcaacttgctagtctcctctagaaaatttgaaaaaagaaaaaaagttcatcctcaatgtcctttttccatcacttctgaaagaaataaatctatatcctatacataaatttatgtgcataaaaatatcaaaggatgtttccttaacactttgttcatctgtgtttgcacagtatctcacttccttaaaaaactaaactagttctgtggtaaaagatgctaatatacaaatttaataaaggaaaatttacaccctatactgatttttcccattttatttcttttttactgtcacacggcaattataacaattttactgtgtgtatatatatat

SEQ ID NO: 164300 - DNA, 1563 bp, Cannabis sativa
ttagcagtaaatttgtttagggtttcagttgtgtggaattcatcccagaacacgtacgatgttctgttatcacatgtagtacttgaaggaatacataaaccaatattatttgtttcacaacaactttcggatacgttagtgagtcctgaaaaataaaattacaactaaatttcaaaatataataaaggtattaataataagaaaattctagagtaaagattttgtagtcctatttagagatacctctagttttagcatttagaaaaattataactcaaaatttttatatgactttttacattgtagttatagacacattccacccgatttaaaaaaaaaaattgaataatttactatatattgaaagtagagttcaaacatttagtttatgtgtacttattttttcttacatagaccaaacttcatctatttttgcaaaatgaaataaaaagagctcttttattataaattcgacagtgtaaatttttagttgtagttgtaaattaatagtaaaaatctttttctgattaatataagaattggaagtggaataaaatttataatacatgaatatttagattctgcatgcattaattgatcaatttgaatattattttttagtatagtaaattattcaaatattttcaaaaataagtaacaaaatacctaccataactgtaatgtgaaccttcaaaaatgggttatgattttctctatatatcaaaaacataaatacttctattttaaatgtattattaaaaagagattaagggtagagatatttaccaagagaagaaagatcaccagattgtattccataattgttgacataaataaatttagcatcactaaatttggtattaagtttatgaacaagtgatatgagattttggttgaagagttgaactttttggttgacttttgttataccatttattccatataaagcaataactgctggagttgatcctagttgccctaatccaacaagagcaaccttccttgcactagaattactgtacaatctctgtaaaattatcaattattaattaactaattacaaaaattaatataagccaaagataatataattaatcttcatgcagattgttaaccagtaagaactaacaaaacttatgtatgtcatagtcaagtgcgatattgggcataagtaggttaatcctgtgtttaaagttactataaaaatattacttttagtcacaataaaattcgtaactaaaagtaaaaaagttgtgactaattaattataaatgatcattcttatgttgtggccaaaagttacgtggctaaaagtattagttacaaaaattataatttgttgtgactaaaattaaattagtgataacttgtatcgaaatactatattttaaccacaagtatttttttgttgtgactaaaagtcaaatatatgttgtgattaaaaatttgtcactaaatgtattttctttttgtagtgggcccacctaacccaatggcccaaaaaaattatccttttaaaaattcacttatattttttgtgaaaattgcattgtatacctactt

SEQ ID NO: 164301 - DNA, 2363 bp, Cannabis sativa
  modified_base (2294)..(2300): a, c, t, g, unknown or other
gaatataattgagtatttaattcataatacaatatgagttctgtttcacccaaaagtttctcgagcagctaacatatacatccactcgatcattttcttcacctaatacattgacttcttctctttttctaatctttttgttataatattcattcaagtgccatattatttattagtataccatactttttagatttccacacaaatatatacaaatatttgttttttctatgtatcaaacattcaaagaaacgaaataaataccaaagttgtaaatgtgagtgaggaaaagtctactattaagtaaatataaggggtaccatgccatcttacacttaaaggggcaaatcgtccctgctttacacaatgtcgtgctctattcacgccattacattttgcaaatctatactcaattaattattactaaagaaatatggtaaaagggatttgattcccaagttatccatacagaatgattaatattttaaaatggcatttagtaacatttttatttttaaattttttaatcacaaaaataataataaaatttttattattaaaatttaattttaaaaaaacaaaaatgtgttctgtaacttgtaacatcctacttaaaggaacgttatgtatcatgatccctagggacggacgtacacttttgataatttgtatatagtgatctcgtttgacaagatcaaacataaattatgaatatgatatattttataagaatttacttttatttatttatttttataaaaatctatttgtttcctttattctttttaagatatttattttcttttttagtaatattaactcactttgcaagatatgcttgattgtttataaaatataatataaacaacacaaattattataattttatggggttaaggcttagtagctactaagtgtaatataaatactacaaattactcacacaaattatcgtttctatagatgtcacaaagtgatctttttcaactatgaatatagtgaagactacactcttcaacaagatggaatgaatttttaaatgattgtttgctagtatatattgaaagagaaatcgccaaaaattttagtaaaaattcacttattaatgacttttgtaatatgtaagaaaaacattttgtattttaattttaattatgaatttaataagggatatttacggtgaaatctccttaacatttgcagttgttacacatatgaccataataaaaaaatagtggtaagaatatgttaacttacaattttgttgcagtcttacttttaagtgccaacttagaaacacatagcaacatattattagatcacgtactaaataattattatttatcctatttttaattaaaaatatacaaatttgaatagaaaaataaaacaagcttttcattaattaaataaataaataaattagagaaaaacgttaaagttttttttatttaataaatggtctaataatatattatcacgtgtttctaggttggtacttaacggacttagttgacactaaaaggtacagctacaataaaatcgtaaaataaaaaactttttccgtcattttttttattaggatcatatgtgtaacaaatgcaaatatgaaacgagttttgtcgaaaatatctcatttgataaagtcttttcaaaatatttattaccaaaatttataatatagtttggccccctctaatttcttatcctggctctgtccctactaatcctgttaatcgaggttcataagctaagtgatttgaaataaataataaatttaattaaatatataacttgcaataaacatactttaatataaaccaaaaacatttaaagttacgtaaccgagattttgtaaaaaatattttaaaatattacaagttatttagtacaggccgacctaagcggcaagagtggaacttctatacaattccctgttggacccaaccctcgtattctagcttggccgaaacatgtacaagtcatcttgaaaaccctcaaactcatggcttgccccatactgcttttccctttcctacacacaagagcacccgtgagccaagactctgcaagacaataaaataatacaatatgaacagttataccaatcatatatcatatgtaacgcctctgtgtataataccgtgctttcgcactatatatcacattatttatatgtaataatgtcatcacacttattgtctatataacataggcctacgtgttacactcatacatctcgtttatatttaaggccttaatggggtttatcttgttggaatatattttaccannnnnnngatttactaacaagtatattttttaacattctaatatgaatttctaaaacgatgaaaataaac

SEQ ID NO: 164302 - DNA, 883 bp, Cannabis sativa
cgtaccattactactactttgcctaaggccatatttcatggcacactaaaaattcatatattgtataattttttaataaaatattcaaaccaaactctaaaactcatcctattttgattgaaatcaatagtattccactaataatagtagaatactgtagactactatcttttttttttttaatgttttaatatattaattatttagtataataataaaaaatatactttttaatgtaatttctatggttagaattcaaaaacaattaatagtaaaacactattttttagtgtaaatttaacattaaatttaaattttatattggagatatatatggccaagcattaggtgtggtcaaaccttgcccatattatatttatataattactaggttgatgttacgtgcaatgcacgtataattaattttctttttaattaagttttattagttgatattaaatgcaataataatgtatttttttcaaaaaaaattgaaatgaaatttgacattttgattttcaagaatttatttttaactattgcggcaatattattgtatatatgcctcctatcaataattagtacttcatataatcatgatatatcaagttttacttatcttacaaatatagtttgacttaaaatattttcgattttgctattaaatgataatttatataaattatatttcaagatcatgtgcctttaaaaatcatgtgaaatgcatagatccataaaatcataaaaattattaggtttcagtccacttatatattgatggaaaagaaagtaaaaaagaaaataaataatataagcacactaactatgaccagacgactctaatataaaatatttacaattaaaattttcttatatagaatat

SEQ ID NO: 164303 - DNA, 1246 bp, Cannabis sativa
tttgttttcttttcttcgcattttcgaatacaattgaatttattagggttttgtcggtgaagatttgtggtttttattagaatcttaggtttgtgattttttattgatttaggtgtttagagaagctgaagtaccgattgtatgggaagaacattatgttggaacggaaattgatccaaaaacacagagctttttaacgtgggaaagtttggaatcagtgcgtcgaaacaaggtcgggttgaaaggtccaatggctacaccaattgggaaaggccatcgttctttgaatcttactttaaggaaagagcttaacttgtttgccaatgttagaccttgctacagtctgcctggctataagactcgttatgatgatgttgatctcatcaccatacgtgaaaacactgagggagagtacagtggacttgagcatcaagtaagtgttcttctatatgttttgatcttaattatatatcttgaacgttaaggagcctatggaaagttacatatgataattgaaattgtggtaattagtgggaactaacaagttagctatgtaatcgatgactctcaagtatatatatactctcctattcatgggaattgatacattgtgtaattatgactagatactattaattttaaatattatactttctgctttgccatacatgaggatgagatatattaaatgcaataaccagttaccatttaaacacactttttaaatacacggtgacttacaaatactctttaagttattcttcatagaatttttgcgttgcttgtgatttactataatgaatacgtttttatcaaattgagtaatttgtttatgctgtttcaaggtcgtgagaggggttgttgaaagtcttaagatcattacgcgtcaggcgagtcttagggtagctgagtacgcttttcattatgctaaggcgcatgggagagagagggtatctgcaattcacaaagcaaatattatgcagaaaactgatggtctttttctcaaggtttgctttctcttcttctcttttcatcaaggggtcgatttattgtctgttgctcctagtattcttgtactgaaatctgaaattggtttattttcacttgtagtgttgccgtgaagtggcagagaagtatccagagattcgatatgaggaagttgtcattgacaattgctgcatgatggtacgaacaatatgtacggtgtgcattgaaatcatcaacctgtgaaagcgtttaaggcttg

SEQ ID NO: 164304 - DNA, 1363 bp, Cannabis sativa
aaaaaaaaattacaataatataactaaaaaactaaataaataaatatttggaggagccaagtaaattcccccataacatgcatgtaactcttgtccatgagacttgttatgatgaagatacagtattacgttttcaaagatcaatttaaaaaaaattaaatttcaattcgataaccaaatgaacttctctacttgttaaaaaaattattactaacttaattttaattgatcaatctacaataaatattaaaaaaaatacccaaatcttgtaaaattttctattgtcctatcaataacaatagtttatcgatatttttaaaaactaatttaaataagagcttaagaacttaaataagtaaaaatggaacggagatgatgatttttacgtggttcggatgctaattaatcttagtccactagtcaatgtgttaaattgaatgactttgatgtattacaataagatattacaagtttaagaaccctagcttcttgctatattttttcacttaggtttttctaacttagagaaaaagaaaacttaaaaagatgtgaagtaaatcgtccgtcccctttgtatgattgtttaaagggatatttataagctaggatttggatttaggcatacccataattcgttagggttttgtgcaaaatggaccgactattagggcaaatacatgactttgaagcccactgacattattctggctcgtgaagtgaaagtatccatacaaatggggaccatgcggtctgggacagatgtcctgcgagtgttgcacctatgtactgtggtgtcagatgcgtgctgttggatgaaagggaggttttccctttagtagtgtgtgcactaccatgttatgatatacgagacaagatttgatacagtgggactaggcgtcatcactctacaaatggcttcatttattccgtcttgagaaggctagggactttctaggtctagatgagcctcacctttggaggtgagccttttgggcttcagaagggttcataccaatctttcgtttggactggctcttccctcgtggaaagactttaatccaagccataaaggattaatcatactttggaaatgtcgcgtttcccccttccggaaacacggataataataacatttatttttaaaaaagaaagtgatatagtaggatttttcattcctaaatttatagccacaggaggttttttttttctttggccaaacccgccagtcttccttgagcataggtccagcttggtcggggttgtatttgttggtgattattttactaagatctagatttactaaaatatatgttgtttaacaccctaaatatgaattctctaaaataatagaattaaacacata

SEQ ID NO: 164305 - DNA, 1304 bp, Cannabis sativa
tcccacacgccaccttaaggctgtctaacaccctaaggctgtccaacaccttagactatccaacacttgagttttgccgggcattgattgtaatcctaagggtactatagcagatcccacctatagtgatctggatagtaattcccttggtataatacaactaaaaagggagtaggtcattacccgctatcacaaggaggccaaacctctataacaaatcctattgtctattgcttttcattcttatttgtgcacatgcgtggcaagcatcagatctgcaagaccccgctatcggttgatcacttttcaaggtcaatagcttggtgctttcattgagagcgtggatatcgtaatctgatcaaatgccatggtgaatacaagaagaactcttgtcacaccatctgtatctttgggtctccctcaagacccatagattgcagatctagacactcgggttccagtcacaactggaatccccatgaatactacatatgtcgtgaatctcatcaccacaacatgtgcaacaagtctggccaccacagctggctaacctgacgcaagcatcccggtggatccaagtggtagaaccacgcctccaagagcagatccaccattggtgcctcccactgaaggaaggacccaggggcaatagcctcctagaacaacaagtagacatcaactccagttctatgctgaggagacaggcctgggagtgggcgagacagctattggcgagcctcacctggacctaggagaagaccttgagttggccagactcagggaagctgtaggtcgtgcaggcctaactaaagaaccatgcactgctgattgcgttgtattcgcttagtagagatgcaaattcctgagatggataaatgactaggagtacatcctttgatctcaccaagcagaattagatcgtcgcaaccgagaggccagtgatcaaataagacaattcaatcaggaaatcgacagaaaaggctagaatctccttagggatccacttcaaggaagattgtctccaagttccttaggaactaggatggatcttcccctgtcagagagaggacaaacctttcttcaaaggccaaacgatgagaacagccagatcttgggaaccagaagcttgggaggtcagacagggatcctggcttaatagcaactcccactgtatagccactggccggctagccatcggcaggagtacccatggccggccaggtacaacaattccttcccaatgggagtgaggtgcacaaagatcgtgttaactcaaacttttcgatctccttgttttgatgatt

SEQ ID NO: 164306 - DNA, 1698 bp, Cannabis sativa
cattttcgatgaatcacccacaccgacatcttgttcttcatcatcgctatcactatcatcatcctcaccgtcctaaacaaccatttggaaagcaaatgaaaacataattataaatgaccaccattcatcgttagaagtttgcaaggtgatgaagggctcaaacgaaagttacctgtttgacatgacgaacgggaactctccaatgattcgcttcctttagagcttcaatggacttaaaattaccatccaaacattcttcatgcataatcattaacttctcagctacctatttataacccacaaaaggtgaaaacatgacactgaataattcaaaaacatgtatgtgtttagaaagtcaaaatgcaattcgatttggatacattcgatttaaatgtaattgaaggtaatttcataatttagtatatttgtctgaacatgtaattatactataacaatataattagaggtaattaaaaagttctaattacactctttaattctaatggccttctatgagaatccggtgtaattacaatgtgtaattactaaaatcttttcattttatatatagattactataagatatgaaaaattcatatgcaattatcatctcatattctaaagtgtgtttagaaaatcacagtataattagatttgtatgtaattaaatgtaattatacaatttgacatgtttgtctaatcatctaattttattataaccgtgtaattatactaattatactatataattactaaaaaatcattttaaacacaactactaaaaaatattattttcgcactaattattttgtcaagaattcatatccaaacacacatagtgtaattacttaaactcacctatgcggaggaaagcttttaagtttgaactacgaaatcaataaaaagacgaaattgcatataacttcaatacatgaaaattatctatgaattatttaaccaagtcatacatacatacatacatacatacctcttcaatactgccatcatcaacctcagtattcaaagattgcaaaccttgaacaagtatctcttctaaatcatctatgtatagaggttctaaagcagaaaaagaaacaatattaaaatcgaaatttgcaatacaaatgtaatcatctgcttcctattatattacaaaatttagaataaaaaagagagctttatttaccctttggttttggttttgcagaagaggtagagcgagtgaaccaagagaagatatcggaatggagttgttgtgctttttggcgcgattgacgaccaccccactcgttctctacagccaattggagcgccgaccatcgatacaaaactatcccaataccttcgctgaatatggaacctgactcttccgatagactcttctcataattcatggcccaatacttgcaaaacccaaccctaataaaagagaaagaaagggtttataaataaaattgggataggtgaatttgaaagaaaacgttaagctttaggtttacacagtctcttctctcctggttttgttaggttaagcttcgaagaagaagatgaagtgagaaacttttattatattttatttttcaaattaaaataaaagatgatttttcgaaattaccataaaacccttatcaaaatcgttgaaatacaaggctataatagtaaaaatccttttattatttaatatttatatttatttat

SEQ ID NO: 164307 - DNA, 621 bp, Cannabis sativa
ctcgttcaataggggttttgctcggcttactacagagcaatcctgtttcctttaagagatcaagagtgtatatcctttaagatacataaataactcttttacctttaaaatgttctttgtccaaaaaatatctggtccaagattcttgactttgaactcctttccttacatttctctgatcaaatttattattcggtattattaccattgacaataatgttgtcaatatatacaaccaggatagccattttttcttctcctgagtgtttaacttcagttcatcatattgtctgttgtcaatggtaagctgtgtgttaatcctgtattttcaggttattaggtttttcggcttctgccagtttcttgggtcaatttagcaactatcttcttgagttttgttcccattgctgttttgcacataatcatcatggggttctttacattcatactcactacttactatatatgggggaaagaaagttaataagcttactgccttgtataaagttaatagaaaataaaatgatgtgtgttagaatttcgggataaggtgaatagggttccatctcaaaaccaattggctatgggaggaatagtccattgatcttatatatcacaatt

SEQ ID NO: 164308 - DNA, 1363 bp, Cannabis sativa
tgattaatttacccctatttttatcagaccaaaaatattcctctcttatttattaatttctcttttgcgggtcggatattacacaaactcagatcaatctcaaacattaaaacaacaaaataaaagaaaaatagaagaggaggcaatatttaagtctctaatccatacataccacggacaacattaacccaacccagctatatatccataacaacataaccaagatcagttgtactaatttactctcaaaccggccttgactaatgccacgtccaaacacaccctttatttccagctcatacaatggaagtcaaagcatgagaatgatgggcagtcttgatctcacgtcgatggttgttcaaatccttggggcagtcgtctcggatagcggtcagctcatacggcgacgtatcggtggccagccactgctctatggtaaagagcttctgattgcagtcgatgtgagcccctgtggttgtgacctcaaggtagttgcagtaccacccgtggtgaggaccggtcccgtcggaggttaggttcagagcacagatcggagcggtcaagcaaggaccgcgtccgctgaaaatgtcgagattgcccctctcgaagtagttgtatccgggacccattaacccgccccacgcctccagattattgatctggactccgtacccattcgagtcgtagaacctcactgtcatttttgagtctgtgcctcccttgaggatcgaaccagtacgaacatagacggtgtacacacaatccggatccgaatcctgcaaaacgtgattattcatatcaagctcggaaaatataaaatagttattaattaattacagattaagtcgagagagagaattcttaccgaaggtacggcgatggcgatgaaggagagagtgaggagaagagagaggaaaagggtgctccggagatccattgttattggctctgcgtagtgaacagttatggaggagtgaagcttcgtttggggtttgtgtgggtagtgtatcgaggtttatataatcgattagatttagaggatgatgatagagcgatgactttccttgggttgtgattgagtgcgtccttcaagattgggatatacgttgcaaagtaaccgtagcttaccacgtgttattttcattctttatatattataaagggagtggttagtattgtcatttcacaatgtcatccagtagacacgtcagtaagtaaaacctatctttcatatataatatagagaaattttataatgaaccccttaaaaagggtatatcgatacatctttatctgatttagtatctgaaatatttttttagtcaattttttttttttcatggtcatgtaaattatggttatt

SEQ ID NO: 164309 - DNA, 1231 bp, Cannabis sativa
gcagaacaaccattcccaatcgaatgaccaggaggaccactcgcaatcgttaacaggtttgtcattcttgaaaattcaaatttcaatagattttaatcctaagtgatattaaaattcttatctctttcaatttggtatctcagacaccaaatatttgtctcttccccctaaatatttgatcgaggcaaatggtgatgttccaccattgaagctatcttaggaaacccagttctcttttccttacctctacacccaactttgatctctctttgtcttcattactggtctcaaacatgattgatcaagctgaatcttttttgccatgtattcaagtttattcttaacgattactctttttctcttcttgtcattttgattttgacttggaggatttattgttttacgacatgatttagttttatggtcattatctctgattgtttcttaatataattttgaagaatcccttcactttattgtgattgtctctgattgtttgttgatgtaatttccttgtttactattatcatttttctattattttagttgatgccttctacatttcagcagtatgaccttttcttaattaaagttttttattggggttgaattaaaaactattatttgtcagttctatttgattcagaatatttaaggttgaaaaatgtggtgcaacagtttcaggaagtataagttgcatgcttgtaatttttgaaatgatttcataagtttagttattaatttgttgatggctttttatgattgttaagcttggagaatcgttcaatcaatatgggtgagtcgttatgtttatagctcaagtgttaatagttgattcccctcatcaattgataataacaacttcgtttgaaatattttttagggaatgtttgctttcatcataatttctactaatctagggagctttgatctttgccaaagtgagattcagggaaaattagtaattggtatcattatgtctaccaactttatattttgtatgttatagcataatacttcaattaagctgggttaagattgattttgtaggttcaagtcaacacgtggacacaataaaaatgaaatggcaaagaaatagattaggtatgactatgcaacttccttgaatataaatttgacttttgactttagtatgtgtatggtatagatgaaaagtgtagttaaattacttgataataacatagtttgaatgtaacaccctaactacctt

SEQ ID NO: 164310 - DNA, 2925 bp, Cannabis sativa
  modified_base (675)..(680): a, c, t, g, unknown or other
tggagcaatactttagggtcgtgcatattgactctgaagaagcaaaggtagcaacaactaccatatatttgtctggggacgccaagttgtggtggaggacgaagtacgaagacattcaaagtggaaagtgcacaattgagacatgggaagacctcaagaaagaattgaatgcccattcttgccagaaaatgtcgcctacttagcccgacgccagctgagagagttaaagcaagttgggatagtccgagattatgggaagaagttctctgaattgatgctcgactttaaagacatgaataaagtagacaggcttttctacttcctcgaaggactcaatttgtgggctaaacaagagctacaaaggcagtgtgtgtcagacctcgccactgctcaagccgtagctaagcggttgactgattacacctctgagaatttgcaagagaagaagacgaatccccagaccagctccaacaatgctgggagtaagaattcggggaattagaggccgagtaaaagtgggggaggagacaagaggactcctgaatctagctcctcctctaagagtgatgctgcaacagggaagaagccccttaagtgttggctttgtcaaggcccacatagggcggctgcttgcccataccagcccaagttgagtgccataaaggcatccattgnnnnnnaggagcaaggatgtggggaagatgatgaagatgaagactgcgcgcacatgagcgtcgtttgattgttgaatgctctcaagaagcatggcatgggaggtaagaaaacccttgggaagggactaatgtttatggaggacactttaaatggaaagtagaccaagagcgtgttgattgacactggcacaacacacaacttcatttatgaaatcgaagccaagaaggtgggcctaaaactggaaaaatatatgggtcgcatgaaagcagtcaattcgaaggccatggccacgattggagtggccaagaaagtgaatgtcaagatcgatggatgggacgggcaacttgatcttgcagttgttcgcatggatgactttgatgtggtattaggaatggagtttctagcagagaagggggccattccaattccagcgataggaatctacttatcatgggcgagaatccttcaatggttcttgctaaagtgagacagcctccaaattcaagcttatatcggccttgcaataggggtctgtagaagaagaggccaacatttgtcattgctcccgccgtgtacaatgcaaaagtggaagagtccactccacctgaaattgagcaggtgttagagaattcaaagatgtgatgtcggataaactcttgaagagactgcctcccaggaagggagttgatcacaaaatatagctggtgccgggtgcaaatgccccaactaaagcagcatatcgatcgtttcccccagaacttaaagagttgaagaggcagctaatggagatgttggaggcaggattcatcaagccatcaaaggcaccatttggtgccctcgtgttgtttcagaagaagaaagacgggaccttgagactgtgcatagactatcgcaccctttacaaagtgactatgcacaacagataccccattcccttgatcgttgatttgtctgacaagctaagtggggcaaaatacttcacgaagttggacttgagatcaggctactatcaagttcagattgctgaaggggataaaccaaagacaacttgtgttactcgatatggggcatttgagttttgcgtcatgccatttgggttgataaatgcgccagccacattctgtacactcatgaatgaagtcttccatgaagacttagataagttcgtggtggtgtacctagatgatatcgtagtctataatgccactttagaagagcattgggaacacttggctacggtattttagaagttgaggaaagaacagttgtatttaaagcgggagaaatgctcatttgcttaagaaagtattaagttcctgagtcatgtcttagaacacgggaagatccgaatggatttggaaaaggtgctggcgatccaagagtggacgacgccagccaatgtgaaacaactacgctctttcctcggtctagcaaattactataggcgatttgtagagggctattcgagaagagcgacacccttgacagagttgttgaagaagggtgtatatggacgtggtctgataagtgcgaagaagaatttcgaagtttgaaagaagccatgattgaagatcatgtattagccctgccagatgtatgcaaaccctttgaagtaaagacagatgcgtcagattatgctttgggaggggtactcatgcaggagggccaccctgtggcatttgagagctgcaaactttccgaggcagaaaggaagtatacggtgcaggagaaagagctcctagcagttattcattgtttgcggacgtggaggcactacttgttggggttgaagtttgtagtgaagacagacaatactgctgttagtcacttcttcacgtagccaaaaataacccccaagcaagcctgatggtaggaattcttggcagaatttgacttctactttgagcacgaggcaggacgtttcaatcaggcaactgatgcccttagccgtgaagcagagttggcggctctaaaggtgttagcgggtatgtcagctagccaagtggatacaccaataaaggagcgcatcaaggagaacctggagaaggacccactcgcaaagaacatcatggctctcgcaagaaaaggaaagacaactcagttttgggtagaggatgacctcttgtggaccaaaggtgggcatttgtttgtttcgaaggcaggtgatttgaggaggatgctgctgagtgagtgtcatgacacgttgtgggcgggtcatcaagggtcgcataggacacatgcccttttaaa

SEQ ID NO: 164311 - DNA, 708 bp, Cannabis sativa
tagaaccattttgtctagttttttcctttctaattttaatttaacacttttaattaattggaatgaagaatgaaaatttatttcttgtttcgactaatttataggccacatacaattctaaagaccattagatgtcaacaaattgttactaaatttaacttttgaatttttcaaaagagtgatccatcaaatactcatcatgaaaatgaattaactatttttttttaggaaaatatatcataatatccttttgttagattgtgacacatttttactatatgcaaataatattaatatttacaaataatgccattagttgaataataataataataatacatactttatatattatattattatataataggttgtagtagtaattaaaattaatcattatttgtagtgatttgtttagtctagatcttgatctaatggttgatattatgaataaaaatattaaataaataatttattttttaaaaaaaaaacacaaataaataggtaacttatatagatagttatttttattgaattatatattcacttccaataatgattctttattttctttctaattcataaataattctaaaattaaattattaaatagggagtttttcaatattatacttaaaattgattttatttacaaaaatacctttaagaaaattatttgcacatataccgttgtgtcacgtcagcata

SEQ ID NO: 164312 - DNA, 2451 bp, Cannabis sativa
  modified_base (2399)..(2406): a, c, t, g, unknown or other
aagtgtcaatatttattcactagtatacttaataaagttttagagccccaattgataatatttgtccatgaccaattacaaaataaatagttatctcgtaatagaataacattcatattttctcctaaaccaaattgtgaaatgaaattatgcacaaagcccacaataatctttgaaaatctaatttatcaaagttacataattttcataatttaagaaaatactataaaaatgatatattctaagcaatcaactattttcacatcgagattactaaaattaagtactataaaataatagtcaatattttggttattacaatttatcctccttaaagaaatttcatcctcgaaataatttacttttacccacatattgtcggggtatcattccctcatatccttacccattcacaattttcctgttagaatttccactctacatacaggaccttatctaggggtatactcttatattttagttcccttttctaccacgcctactaacgtgtcatataagcatctgtgtgggatcggatacgtaccttcttcacattgagatattgaatcagttatgcatattcactatcgtaggtgatagcgcaagtctatacactatttggccaacatgtgtaaagaacttatttatctcaggctttactcgcccttcctcttgaaatccataacatttctttattgaagtaaccttcaacaacatacggtcaccaacagtatgtaaccttttatcatttctaaatcatcatcatccgttagagcggcgagcatactaagtcgtatcttgtctactatttttgataattcttttacttcttgcagacttataggtggtacctcactccaagtaaatttagcactcataaaacacctcatagggtgccatacatgttgtggccaaccaactgtcatcataagagaatattatcaactacaaacactaactctaacttaccaagaagtatactatttgtaacatctttgcttcaagcctccattaggtccttacacccacaaaatgatggctcttatacacgagtacgtcactttggctacttcctggatgatgcttctgctagtttacatgacttcatctggttctctaaaggtttgtatttgagtaacacttgaaaatatactaaaattcaaattgagatcaccttctttgggaatgcaaaggtcgtatcggtttcattagttttcttaattctctgctcttacatgctggcatgtacgacgtctaatcacaaatccaatttccaccttctgcatattcatccaccctttacctaattattgtaccattttacaactgactcgggatgcatctaatgtggtgtaggttgtacttctgtcattctctcgaccttatgtttccattgcagtacgttttctccttgcctccgagcagcaacactaacatagttgctttcctagttacaaattctggtcatatcctttgtttcatactctccttgaggttcgtcaaggtgtaagctactacatattaggcctaggaagctttcagtctctcttaggtccttgtgcgccgacaactcttgaatattatcatgcttgtaggatcaaccacaagttctgtattaagaaataagcattttctaaaagccagctctttgaaccaatagctttgatcttctaatcctccagttcagtcaagtcttctaaactcagtttgggatcgtatctaggtatctttaaaatccttccaaagattggagtatggaaaacataatcaacacttcgactacaaattcttccaccaaatttttgaacactcacaccaacctttaggcattgaataaattaagaccgaattcctaatgccccggtgtttgagtgttgcttcagatgtcacattcttttgcacttcttgttcttggtgtctagtttaagtattattcccgatttaagaattaacattactttattaaaaagtagattcctaagtacaggcgaactgacttccttgttaattttgtaaggagttattttggtcataagagaagaatttgattgaagaaaaataaatctttatttacttaaaagcgtactaaatctctagttacatagtcactagattattagaataggaacaaaaatatcttctttggataaaatttgacaagttgaaagagactattattcgtcctccacgcatgactcggcttcaaattcttcttcttctaggtgttcctcaaagtttatttccatttctacatctgctggaattggtgctggcatgtcctcgaattcagagtctgacctatcaatttctacttcaaaattaaaatcaggtatgtcatcttctagttcatcgatgttggttgttgtgaatggatctaagttgtaaagcccgcttagttnnnnnnnnaattagcagttgtttatgtttaaattatgaaattatttatagcta

SEQ ID NO: 164313 - DNA, 2847 bp, Cannabis sativa
  modified_base (1954)..(1958): a, c, t, g, unknown or other
tctctctctctctctctctctctctctctctctctcgatgggatcaacctggagtaaaccccaaactccgacgaccaattgtcgaaataaacaacaaaataaaaatttttgtcccccaaaaactctatattcgcccctctctctcattttctggtggagatgcactcacaaaaaagttatcggtggtggtggagatgcactacgacaatgcgtttggaccatgaaatcgagatctacgcccccaaaaatcaggtcctcccaaaaatcatcccttttattttccctctctctttctctatgtattttcttatgcaggttggacgaggaggacgatggggtttgtggctcgaaagggatggggataggtttgtgggtttgtggttcgacggggatggtatgggttcgtgggtgtgttgtttgatgatggggatggacgggttcgtgggtccgttgttgcgcttatggtgggtgatgggtgatggtgggttgtggagggtggtggtggtgatggtataagtgaaagtgaaaaaaaataataaaaaaaaaaagattgaagaagaagacaaagaagaaaaaaaaaattaaagtttttgtttttgaaaaatatgtattttttaatttatagttttttattttaaatttttaattttttaaatatttttttacgtggactaataaaattgtgtcatgtgtacaccgtgtctacgtagatgtatacatggacagtccaacatgacatttaacacctaaaatggatggaaactgtaaattgctaacagtttcctaattttgggggttttaccatcaaaatttgatttttgagggttaagtgcaacgaacgtgaaagtattgggggttatgtcgcaatttacccttaaaaaaatcactaaaggacaaataactcaaatggcaaaagactaatttgcccttgcttaagccaaaaagcacccttaccacctaggggtattttggtcaaacctaatacctcgtataatcctgacattcctaatgcctatctatattgccctgccattactaaaatactaaaccatataagaaaatgtgactctaccggccaaacatcgcgttccactgttattgggcataaaatatgaaaaacatgaaatttcatatatataccataaataatacacctagaattcaaatatatcttcataaatttataaatcataattaaaagtctaattttcgaattaaaccctaattatctgctaattttcatatccaaattaagcggtctttacagtacatgcccaccataggaagtcaagtattcaatgatagtgtgtaagactgtgaagaatccaacacctaaaagagaatcgggctcagagcttgataatactttgcgacagaaaggaacaagggttagagatctgaatagaaggagacatattattctgatgcaaacaatgtaaggttttttaactttatatgtgtttaaattctattgttttagataattcacatttagggtgttaatcttagtaaatctagatcttggtaaaataatccccaacagttacccatttcctaccaaatcgcacaagatcatgaattatctttccaaaatctcgaacaaagatcatatctttttaaataaggaaaaaaaataattggcaatcaggtaattaatacgtcattaactaaccacgaagatagaatacagttttgacaactagcattgtgttgtggcatccacatcaccatacacaaggcaccccatgggccggtaggaatggcaattatacttgcgggttcgggtacccgcgggtacccgtcccattaggggcgggtgggggttgacttttgggggcgggggcgggggcgagtatgggtttaaaaattcatacccgagtcaaaaacggggcgggggtgggggaatagatactcgccccgatatgatatatgtatatatttaagttttaaaatnnnnnctactacaatttaaataacttcatgctttaggctttttattgattatactcttttttttactatacacactatttcacttaagtttattgttttactaagtttttatgattattttttttttaattctctttgaaacatcattttttttttttcaaaaatatatatgtaatgggtacccgatgggaatccttcccccgtcgagtaatctccgccccgcccccgctttaatttaaacgggtattggatcgggtatgggggtgaatttaagaagcgggtataggggtgggggagcaatccccgcacccaccccgccccgtttacatccttatgggctgggctttaccagataagctcaaagtcaatatattatttgtaaactccctattagagaaaaaaagataattgatatgacctttatgcactataaatattcaataaaccttacatgcaaagggttgaaaattcttagttcatttactcttggaagaatcgagtgttcatactttattgtaaatccttaggcttttctagcctctgataataatattgactcgtgaattaaggcttgttagcgccccaaacatgtaaagtccttgagtgtccttattttatttcctttgaattatattcttttggctcatatatttaaattattagtttttaaaaatcttggtaaataagtataattaccgaaatgaatgttcaatcatttattgcctttagccaagctcatagaaaactatcgttttacttctaataaacatagaagctatacatgttcatatctatgatcaggcccgactctttaggtgtgcaaccagatctattgcacagggcccacacaacaaaagggcccaattttctctaatctctctctctctctttttt

SEQ ID NO: 164314 - DNA, 798 bp, Cannabis sativa
caagttgaagtcatccatagactggctctcaagaatcaaccgggccctcctacagttggtcgtcgtgaccaggtcccccacgttcaactcttcctttttataaccagcaaacacttgtgcgtggtttagaaagtgttgagtgggggcagtgcggtgcataggaaaccctgacccagtgtgtcaggaggtttgggagctcaaaggctttgaagttggaggaaaagaaaaaccgatggtggtactctttcacgttcttctgaaagtggaaaggtactggaccctcattggctggatgggcctagagtttatgaaaaccgtctttaaacttgtccccttttttggggactgatagaagttcataaaagtacaaaatctcagccagactgggcggggccaatttcctggcaacataaaaaatatacaagctggataacaggccgtaggcttgtggaataagttggtagggtgaaagatcaacgaagaccaaaaaatcaatgaagtaattcttaagcgaaagcatggcgccggacatcaagtgggtctggctccacgccccgaagtcgttgtagttatgattaggcatctcttcgtccctagggagacggtggtagacccccaagctggagggcttgattctagaaaaagtaataattttttccaggtggtgggcacaagtcagtgtcgaatgtagctcatcaactccccagccattagggcgacatgcaaactttttgtagactactgggcccatcattacttcatccaaagtggccaactgtttggttttatgccttaaat

SEQ ID NO: 164315 - DNA, 770 bp, Cannabis sativa
gaaatgctcctttgatctccgccatctcgtcgctccacgctcttttgccaataatggtgatctacagctcagtaactcctggccaggtttctttctttgatttcgctttcattcgtagatcttgattcactcctcttaatttctgaattgcattttttttctttgttcttggaatgataatgcttgcgttggagttgatagaagagtgtttgttgttgttgttgttgttgtttgaattatgcaggtttcgtttttgcttggacttgtgcctgtgattgtggcttggatttatgctgagattttggagtacaagaagacttctgtctctcctaaagcgtgagttcaactcttgaattgttcagctatgtactataagtctatgtatctctcattcaaattcggatttgaacttttaatgtgtaattttattaacttggctttgttcttaagcaaacaaggatgaaaaaactatacttttttttaggtttttatttctaatttgattgccttgagtcatttttaagcaagtaatggataaaaaaaagtgtttccttttcctttttgagttgtttttctctattattgataatttggctaccttgattctgtttttaagaaaataagggaaaaaaacttacaattttgctctcattggagttgctttgttgatttgattacttcgaatatgttttcaagtgaaagaatgaggaagaaaaaacttaaatttttgttctcattgaggttgctcttctacacagtaggcattctga

SEQ ID NO: 164316 - DNA, 1592 bp, Cannabis sativa
aaattttctgtgctgttaaaacaaataaaataagtaatttagttttaggctgcgccaactacaactactgcacgtatgtctacttttattatcaaacaactcaacagcactattgtaataatacacattacaatattaacaataataattaataaataattaaattgtacttttttttagtgaaaaaggttaagaaaagacggtgcacctttttttttttttttgttctcttttttttttactttttcagtggaagatttgtatgcataaacataataattttaagttttaaattaagaaagaaaaaggttaacaggatatttagctataatttagtagtttcacaattcacgctacaaaagatgagtaccaaattcaaatctctttaaaaaaatatattataagtaatagataatattaaatcaaacacaataatattttgaattaagaaagaaagttaagaggataaacataagtaatagataatcaaagataataatgaacgtaaattctccttttaaaaaaataaaaataataaaagtgaatttaatagttcagattcttattttattttatttattaaaatattcatagaaaatggcagatctgttttattaccgccaatccttttgcaaatccaaaaatcctctacgctacgttataagataaataccatgtctttatcagtaattttcaaagagagattaaaataaaaaaaaaataaaaagagagaaagagagagaattttaaaaatatataaataatattttatataatatatagataaatgcatgcacacgtgacaaaaaaaacaaagtgaggtagatagaatcaccaagttataaaagacatttttaaagagtctaacaatgagctgaagtattatatgtaattcaaacaaattcattcacatccaaattttgttttatcaacgcatatgtgaacaattacaattatatctgttcacaaactattaactaatgaaattgatttgaattttgtttttattgattcttataatttataatgttattcttttgaaagaatttataatgttatttgcttgtgaaatagtgtgtttagtgcgtagcatgcaaatatgtataatatatgtctaattgaaaaatattttggttttgtttgacccttaaaaaatgtatgctagaagtctttgtaggattctctacctaatgactcaaaattcatttttatttattatttattattacttattactttggccattccgtcagtcaaagaatcaatttacttaaaaaccaaataacttgcataaataccatacattactattaaaattgatttgataaggcttatgatacactcagttaacttagtcgtttgtggagcatgttttgagaagttttagtgtttggaaaaaaaaataaaaaagggattgtcttgggtttctcaatgtttaaccactacctcattgaacattggcttgaatagcaacccaattggttagatatttccttgtgtgggcttagataaggtcactccttatcctcctattttttgggttaatttcacaaatgcacaagaacaacaaaaaaataacaaaaatacggttt

SEQ ID NO: 164317 - DNA, 1437 bp, Cannabis sativa
  modified_base (1278)..(1280): a, c, t, g, unknown or other
ttggtgaaagaaatattttgttagtacttagaatgaataatatataaaaaaaaacattaattacaatctcttattatctttttcaatttttttttataggggtattcgatatagttacaatatcattccggtaaatttttgaaaaattccgaatagtttacgataccaaaaatagagttattgatattccagtttaccacgtgcgttcaaaaaacttaaaatatatttttggcactgtaaatcattcgaaatttttcaaaaatttacagaaatgatgttgtaagtataataaacactcccgtgaaaaaaagcatacagacatgtattttcgggcatagaggttgactaagaggttgtaacaggaggttgacgatagcactcctcgtaaaaaaaaacataaagtgttaagggcttaattggggtggttttagttatagggaacatatacctcagtttgttttaattgagtgatcagtagtcactttaagaattttcatcacacagacaccacctacagcaaggatcaagctttttttaattcttttttaaaaaggttgtagtaggtttcgaacccttgactcaaacgaaaaagattgtcagtaaagacaattcctaccactacactatacaacacatggtaattgtatgaatttgaaaacaattttatatatttttaagtgttaagggctaaattagcatgttttttttttttatcttaatcaatggacgaatgcgcaaaatgatgagactaatgtaggagagtataagatgttacctgttaaaaatatgattaagattaatgtgaattgtgaatgcttctgttgttagtggaaatgatttggcattagttgggtagcgcgtgggcatgaagaaattgttattgaagttgattcaaagttattgtttaaagtttgattgtgtacaatcgactatggcagtaatgtgcgagtcaaaaatattcttagttggatcaaacattagaatctttctcaaattgttattgaaactaattgttaaataattgtttatgcaattagttatgctctccaaatgactttttcatttggaatgattatttcaattataaacttttactttcttttttaaataatagtttttttttgccttccttaaatgatttcctattaaaacagtcaattatttcgctcgtggtgcttatcttttttacattgtcaattcaatagaagatttatcttgattttcatactattaaattttttttttgtttggcaaaagaagagttgacttgcttcaaannntgtaacatcagctagaaacatgcttgatcaatacaaatttgctcaggggaggaagggccttgcattgtctcctttggatgatgggggacggaactgtgagtgttggattgcacctgtgttaaataagattaaagttaatgttgatggggctttattt

SEQ ID NO: 164318 - DNA, 816 bp, Cannabis sativa
tattttcatcttcaggcaattcagaaggctcagaaaaagagtgaatttttgtttcaacatcagtaaggtgtagattggcagataaggtatttgtaaggtcatccatagtgcggtgcaaaagtggtgagacaaaagtaaaggtgggaaagttttcaggggaataatctaaaaggggtaagaacagttgaaaagcgtgtggaaggtttggagattgacttcctaatttataggggttaacattatggatcagtatctccagagggggcttcgcagagggagttaaatttcccatgtcaggtttagcaatgataatggctaagacctcattgactcctagtttaaaattaggggttctggcaagattgtaggggttgcctaaaggagaaagggcaatgattgcccaggggggagcagatggatgtgagatgcctaatttggtatctagtaaggtataaattgaatgcaaattgctaagcctaaggggaagagataaatccataaaatagacgatgcaggagcagttaatgtcagatgggacgctaatggaagagtaattgctgagttgagggatacctgttttgagtgtgaaatctgcattgaagccttctttgcatgatttgacagtcaccggcttcattaagagctgggaagaaaaacccaccacaccgccactgagatgaaggaatccaggacggacgattacgctgatgcacagcgacgacgacgacgacgagatctgacgaaccatggtgaaccttagagcttcgcgtttcagtgggagagagagagaggaactatgttgattaacaccctaaa

SEQ ID NO: 164319 - DNA, 1013 bp, Cannabis sativa
aatatacattagattggcctttatccaaatctagataagttgttttcttgatttttaaggatttaaatgctatattaaatgagtataatactattctcatatgatttataatgagttagaatgtcattagcaattacttaaacaacaaaatgggtttttcctctattctttggaagcaattgttttgtaatttaaagtatttttggctaaaaaatgaggagcaaaatttattgatcgaaagttgaagaatgtgtgttagatagtcccacatcgctaatgaattgaaatataatagaatatataagagaaatgggcttgtcaattagttttgagatggttactcattcatcttattccaaattctaacaaggtacaataattaaagaatttgctatctgtttgatatgttttcaaagaccttctcgtttcaatccaccacagagttggtaaccatcttcacaacatttaaaactaacaatagttcactacacatacatgtactttaagatagaaaaaggtaaaaaaaaaaagcaatgctatccattccgacccataatagcatcttgaagactcgaaccacgtggttcaattagattggttgggatgggagacttataatgttgtcgagcactaagagcatctctaatggctggccacatttaaaataattttaaaattttaaatattatatttaattaaaagtattaaatcatagatgataaataaaacataatttaaaaagtaaatgagtaccgtgattttttttgaacaatttgtataaggagtttatattaaaaagttaaagttgaacaaccccaagactcctactattagagtcgaaagagtgcttccataaaattgctaagtattttggaaggaaaatggttaattagtaagttgcatttttacccgagtatacataaataaataataaaaaaaaagaggcatatgattttgggttaagttgaaaaatacctcttttattaattaactaatcaaatttacctctaatt

SEQ ID NO: 164320 - DNA, 3846 bp, Cannabis sativa
taataatatggtcgactcatcatttttctaaattttattttttatccaatccaatcctatcaaaccccactacccaaacgtaaccaacgtccacccaaaaaaaaaagcaaatggagctgcaatccgaacaggtataatatcataatgctagctcggttagtgaaaaacaccacattttaaaagaactgcatgtatttcaaaagcagtcttaccttccaactgtaggaaacatttttccagctggctgaagaaaccgatctcttgcaattacataggactccagcattctttcattgactaataaggttcctaaagacacaaagagaaattatatatgaactcactccagcaaaaatagagcttacaatacccataacccactttaaatcaacactgttgataattttatattctattttcctttttctggttttccttattgcacatgttctaattaaaccccttaaaacaatgtcagaagttttagaagcatgagaaacatattaaaaaacataaatgataaaaaaaaacggtaagcactacatattaacattattagaagaaatcttcagcttccctttaaagcaaggatgaaacgccatacccattggctctgagatgagaatatctgctttctctggtaattcaacatcctcaacttttcctttgatcacctaatatttatacacgttgaaatttatataactgatccacagatagaaagttaaaaataatcctaagagaacaaaatagagaacacaatgacctcaaaagtaaaagattgagtatcaaaaaattctcaccgtgattcgttgactcaaagctggattcccagcaattagtttctgagcatattctgccatttcagaagcttccacggcataaacatgttttgcaccagcctatcaagaacaaataatatagataagtaaggtagccctaaaagcaatagagaaaagaaaacatacgaagtcattatttgtctttccatgttcatttctcacggatggaaaatcccataaacttagtagggggatgagcaaagggtacctgagcagcaaagagtgataagataccactaccagcaccaacatcgaccaccacacgaccataaaaatcaccacggttttcaatgacagcagcataatatgttcctgagaaaatgttaccaagatttaaaatgatcttcatttcatggatcattgttattcacagaaattcaatattcttatctactacagattcaaagcaagaaacagcagatataaaaattaattcagcaagaatcatataaaagtcagctctaaatcctaaatcacacaatatgacagaacgttcacaattgaagatcggagagcaaatttgacagctcattcaaattacctgtcctaacgtaatcttgtaacatgttttgctgatgaagcagttgtccataataatggaaatacattttagcagaagatggttctattttatcatcgaacttgcttttagaaactgatgtttccccatttggtaatcgtcctcctgcaagaacaaaataaaggcgggaatgttaaacaggtacacaaatgccgtcaataaaaataaaataaataaaagttaggcagaaggaaggggagaaaacagacactctttcaactatataatatctattaaggaaggcaggaatgttaaacaggtatacaaatgccatcaataaaaataaaataaataaaagttaggcagaaggaagggggggaaacagacactctttcaactatatattatctattaaggaaggcgggaatgttaaacagatacacaaatgccagcaataaaaataaaataaataaaagttaggcagaaggaagggggaaaaagagacactctttcaactatatattatctattatagtctcagtagcattattgtattttacatgtgagactcgcaaccattcaatctcaatatatcagatcaagtagttacaagcactaatgacataaaggagaaggttctcccaattcaagtctccctaaagctagggagcatccttttcgcgaaattcctaaagctaaagggcaccctgtttcatgtttcaaactagttaagttaacttaattatcgacgtcgatgagaaacaagaaatctctagagccaaaattctaaaatagcaccttgattaatgaagttttccttcagttgctcaaatgcacagtggaaggcgctgttctcagcctcatttctaaactggatagtcacccccttagaatacttctagtttggaagtaaaagaaataatcaatatctattaggaaatttagtcttaacactatcttataaactttaactgatcggaattggaaactttgaagtacaaactcttatcaatcttaatagtaataaataattaaatattacctctttgctggtatcagacgcttcggatacacaaacagaggtcaaagggcccaacttgaatagctgagcaacaaaataagcacacaaaagcatattataatctttaaagtgatcattcgtattgtgccacaatatgcaataattaatatatacgtgtaggattagcgtaaaacaagtcatgaatttaaaaaccacgaaaaaatattcaaaaacctaaaaacagatactttaacagtaaaaacaaattcgttctctgaatcagcttcttttctttacccttttctacattgttaaacctattttataatattctaaaccattggactagcactctattcctcagcaataatcctttgtgataagaaaaaaatctataaaactaaacaagtcatttgtaactaagattccaaaagatccgcgtcctcctgttattttcactctttcaatacatttctctcacgttctcggaaaccaaacgaaaaatgaaaataccagactcaataaaagaaaactgacctgagccactcgaagatcaacattgacaacggcaaacgattgagattcttgataaaaccgaagctcggggattccaccatcaacgctgaaccgagcaacaataggcgaagaagatagagcagaggaggaagaagaagaagaagcgagctcagagactgaagccaaagcaaactcttgctgtttgtgactctttttctccgcagaagcctccattgccgccttctccaaagaatcggttccaaattcaatttccaagaagaaacttcactcgcgcgtatacagatgtatgtatataggtgtataaacaagtcctccggaagaaactagggtttcgttgaggagctgaagcttcgaaatccagaggagccgccaaaaagttggagagagagaaagaaagaaaacaataaaaagagagaaaagaactctctctctctctctttctttctcttttatagtgtcgttaagagttttaatggttcagtttaaaagcctgtgatgtgagtgtgagagacgactctactagacaatttacaaactcggggacttcggtgaggggaaaaaccacgtgactttccacgcgccattcttgttttatttttgctgcatatatatgcagtggtgacgtgtacgtaccttattggatggattatatggactcagggtcaggaagaagaatctactgtgttggattgggttaggactgtgggcccaacaaacatcattgcttgtaacaagagacaggaattgtaagtgtgagcttcaaataattcaatcctccatattttacttctagtatatccaaattttatacagataattggattagtaccggattgtgagtagtggccgaactatggagcctattgtgcctagtagaggtctacgacaaggagactcctatatctccttatctttttttggtatgt

SEQ ID NO: 164321 - DNA, 1619 bp, Cannabis sativa
aacagtagcaaaatctaaaaaaaatatatataaataccttttatataatgaaaatgtagttgacaaaaattcagaggttttgattgattgtttttcataatttctattaaaggaataaaacatataataccttttatataatgaagggtattttaggtattaaaaagtaaaaaaagacatttgctttattattttagaaaatggacattaactatctatagtgttagaaatgggatcatttacttacatttctcgtaaaatattcaaaaatcagagaatgaaggagataagagattgatacatttagagtgatattatagtgccatgttaccgcctcatacttctcctttatatagatatatagattcgcccagttctttcctttgtgtggtataccatttttaacatcttttttcaggccaatagagttctaaaaatatgcacattcttctgaagtaaatcaaataactgcaaaaatgaactatttgtgattggtaacattttaacttagagtttcttttaatttatagattcatacatgtttttttttatgatggaattacaattttgtatgaaaaagtcatactgcaattaattttaaattgacatataaattggtctttccttgtgtacaataaataggtgaagaaattagtttgtggtttggtattattcttgggtgtgagtatttaattagaattataaatatgttaattgaaatatgattaatttgtattttgggttgtaatcttatttttatgtaggttcatatagcaaatttatcatgcttcacgttgtttcaaaatcagattccaaatcatactcataaaatcagtgccgaccctgaattaaaatggactatagagaatttttttatttaaagctcctactataaagataaatagtatttttaaaaaattattaaaaaaatatgtatatttttaaaatatatttttttatttgagcccttaaaatgagtgagtcctaaacgcgagtctagctcgcttatgccttgccgacccagcataaagaatatatgaaaccttcattgtcattacatacactcataaccaattaaagtgagtttttcgcagtagtactaattaagaagatcaaagtgtttaacgtatagaaagactatcagtccaaatattcctttatttgatatgaacttcagatgaaaagtctataaagctttggaagtaaaataggccataaagttttaaaggatataatcttttatgtgatgaagtgatattcaatccaaatagttatgacatttataagttagagtttaagatgaatgtgaaatactagctatttagagatatattttttcttttgtagtgttttgatattgtacatttgttgatatgtgttactcagctatcttttaaaggtattgttgtgttgatactaatatttattgtcacaattgacttgctagtaaaacagtcgtaaaattatgtgccaagtattgttgtgttttaatctaatgtgagcaggtctgatcccaggttgtgtccacttctaagggtttagcatttgctgatgagtatgggaaaaacaaggtctttctaacggtaattagatgtcacaatttcaaaaaaaaaaaaaaa

SEQ ID NO: 164322 - DNA, 2370 bp, Cannabis sativa
gagctaagatccatgagagattgaaaatgttatggtggaaaattcttgccaatggtcttaccaccaaagatagattgtgtccttttattccctcaattgaccctagctgtcccctttgccgtggcgagatggaaacttcaatgcatctcttttggagctgcgatttcgccagagccgtctggtttggctgctgctggcagatccgaactaccacgaaccactttgattgctgggaaagttggatcgattggttctcggtggaatcccatcgaccacaacacatccatctcaaccttttcctaggaggagctgctgtaatctttgaaagtatatggcgcgagagaaataacctttctcatggaggctctgctactcccatttgttccatcctccagcatataaatataagaatcggcgagatctcggaggacttaaggccccaggatgtggagttgaaagcgtggctccccccacctccgggctgggttatgtgtaattcagatgtttccattagcaactcccaagcagtcaaagctgttgtgttcagaaatgaagatggagccttcattaactgcatcaccttccgcctcactgtctgcgatccgctcctcggagagacaatggcgatctgcaagggagcggaggaggcaattaagcagggataccggaaagtaattttccaaagtgactgctgcaattcagtttcgactctgaaggctaagatactggacattggatcactcaacttcaacatccaggagctggtgcaaaaattcaatcgtttaaagggcagcttcactctttcgaaagtctcttggatccccaggaacttcaatggtgtggccgattcggtggccaaatgggcaaatcacaacaactcttttgggcgatttgatttgtcccttgagaatagtcccttacgctcggttctctatgagcttgatgacttgaattctccctatctttattctaattgttagctgaactgttttttttatcctctttgcttattttggtttagtgttttattgctggttttagtttgcttctggtttgtgtcttgtgtctttgccgttctggcagtttgtttggccttcgtgccttgtttgttgttcgcgccccctggcgcttccaggggttctctaataaaaaaaatcacgtatatgccaattaaagaaaaaattaataactatcaaaatattgacatataaggaaatatttatatataataaaatcatatgtattattatcactatcttttctgtgtaatttattagtgtaaatataattatgatgaataaatgtttctaaatataattagaaattaatcatttaaataatatatttaaattttataaaaattataattttattctgtaatttttattataattacattttttttagtttttataattgtgtctgttgtacttggttaatattattggtaaatttctaaaaaaatcttaaataatttacaatgatgaaaataaagttcaaacaactgtttaccatatatagaaaaataattatgactacaactaactatttatattttatttttggcactatatttttttttttgaaaaaaaaataatggtggtcttaaataactgcatacgtacacgattataaaaatactaaaaaaatttctaaatgccgaaatgtgtaccaaactgacctttttcggagtgtgtatattataaaaaatattttcatacgtattacatgttacaaaagttattagttaattctattgtacatcttttaaaatggtcattttgatccatttttcatcggttattgcattcagaagaattttttagttcatttttttatttcatgattatgtacgttatatttttctagaatcacatgtaaatttttaaaaaaattagaataatttataatgtcgaaaatacggttcaaatattttattacactcgtgactattttttaagtatggtaagtaattatttgaattttatttttacactataaattattcataattctttaaaaatttataagtggtcttaaaatactataacatatgtgatcataaaaaatagactaaaaagttgtccctaaaataagtaaaggtggaccgaaatagtcttttaagaggtgcattatagattttattaaaaaaaaaaacgaaaattaataattaactgcttggccccttagtaattgaatcctggctccgcccctcgagatataaaacaatattaatttattttattttattattaattatgtgaaaaaacaaatattaaaaaatttaatataaagaaataactaatttaaaataattaattcaatttacactatttttacttggattagattctagatttgaaatctcca

SEQ ID NO: 164323 - DNA, 953 bp, Cannabis sativa
gagaacagacgcagaaggtccgtagatcgtgggagtgtatagcattccaagagcagcgacaaatgagttcaatgcaggaactaaggttaccgaggttggtgctggagggaccccaaaggcttgctggtaagcttcctctaagctaatgaagccttgagccttggccatgaatttggagagggtttcaaccctcttcctttgcatttctccccacagtagggagccatcggtgagcccggactgtaaggcgacaagcttcatatcatcgattactttagttttggcggtttcttccatcatatattggataaaactctttagagtttctcttgcttgtttcttgatattggtggtaaaccctattttcaaattgtattcgcgagcagtcacaaatttattccagaatataaattgtaagttcttccaacagcgaattgatctgggagttaaccttttccaccaatcttctacagacttggtgagggtcaatgacaagcacaagcacttggcatcatcgctaactttggccacttgaatcatcttgttatacttggctaaatgggttttaggatctcagcctccaccatacaactcaatttgtggaattttaaagttcttcaagaaaggagcctctgcgatcctcttgacataaggctccgagtcttcatcttctggatagtgaaggcccaactctgctttcagatcaattttgttaaggcatctatctgctcttctaatcaatttgtgtcactatctgaaagactctttccacatgccttgtccttcaactggtttttgaggtcatcaccgagtgacctttcattttttatcttagattttttgtattttacatctaaacaccttctaaggtctacggtggaccaactatcatcgtagtactactcatcggacccatcgtcctggtttattgaatcactagggcaatttttcct

SEQ ID NO: 164324 - DNA, 2575 bp, Cannabis sativa
tattactttgtttttcggagacattctatttgatatgtgtgccttaattattctaattgtgtacgtagtgtaataatcttaattagttgatcatgaatattgtatccttcttcttcctcatatatgtagttccaaaacaattttaatatggtgataagtaatatatataatcctaaaaaaatggagaaagaaaaactcatatggaaggataatatttccatatatattttttattttaaaaaattaaaatcgtatttatgtattagcccgttacggattcaaaaaaattgttctgtgaaacttgattgttataaaaatattaacattgcctttaataggtctgtcacacatcattgttatttgcaccctttacttgtataattgtaatttgcaattaattaagtagcactatgaaaattaaacacatgcatagaatgaattaataaacacaactatatatattgataaagttaattttttttttctattgttgcaattaatataggaatatgaatgtattgtcataatatataataatataaaaaattatgaaaaccacgtacctgctaactaattccaaccgaataatttctttggaattagctagttaattccatgctgcttgcctggattaaatgagcaaataataataataattacaggtatatatattagaaagaagtaaaggctagagaggggcaaaagccagaagtatgatataacagaattacataaatatctgaaaataatggaaattgcatataattataaataaactaaagtgaaacatataggttagatgatgagggcaaactctgtttcttacacattgtttgcttttgtttcttacacatgatagagttgtcaaaacatgcataaattaaagtaattctttagaaaaaattgtataattaataataataataataaaaagaagtttttatatatataaatggtataagaaataagaagagagaagggggtgacagatagagggagggcacgcatagcttcaagcatggtctacgttatatgcaagaaaagatccatgtgtgcccactctcttctgtcaccttccctatttatataatctattatatatatatatgcataattattactaaaggcatgcagaagatcatcgcccagatattgatgttatgagagagagaagcttctgatttgatttttgattgtgttgaaagacaatatatagatggggtttatatagaagattaattagaccatgaagggcctggctttttattattaatatatatttgtacattattatggaatatttattatggttaattaatacgtactcatgataatctctactatatagctagtagaagcagcatatattaaagtgatatcattcataggtctataattatatttaatatgatgactagtgataaagtggtggttgtatatatatataagtttattgattcgatcggtttatatccaaactatatatatagcttttgtcatgatggtattggtcggtcctttttcttaatataaatatttgatgtttatatatgtttatatatactgtatataagattattgtttggtacttaattaattatgatgcgttcaataatgttttagatgtgttgtaacccaattcaaagacaagtagagttagattcttaattaagttaatttatccaaactagattctccaaccactatatagaatattactaataatatatgtaaagaatatctagtgacttgaaattctataaacatatattaatcaataatcaagtccaaaactacagaatgtaaagtctactttcaaatcatgaaagtaaggaatattacttcatgaaatagtcttttttttttcacgatcgaaatgttattggttaatctgtacctgagttttcgaaacatcattggttgataatatgcttcatgagtttaataagtaataatattgattttttttttttttggacataatacaatattatttactaattcatgtattgttagtatatattaggcagtagtgcatgtccaatattatcttattattaagatctgtatatagataattgtttaataactttttataataattataaaattaatatatgtgatacttgatatttttttttaaaaggtaattttctatatttaatcgcattagtaaaatcctaacaccttaagataatattgtacactatataacaataacaatttttctttttttgatgaattatataatagtcttggattttattttcagaacaaaatatatatagataatattacatgcttttaaaatatgtactcaaatattatgcacatctaaagcaatataagttacaatttaagtgtgtgatttatacaaaattattatgtgaatagtacatgtattatttatgtactcagagccatttcatataaataaacatttaattagtaattatttcctttataaaggcatcttcaatgagaaaactcaaatttggtgttaaatcaacactaaaaaactactatttcaacactaaattttttttcaattccaaccacaacactaaaaattaca

SEQ ID NO: 164325 - DNA, 2271 bp, Cannabis sativa
  modified_base (89)..(89): a, c, t, g, unknown or other
tttacagcttatattttttgtgtgtgagctcatcactattaggctcaaatttggttaacgataatctgcgttaacaatttggtgctttnattgagagcctttgtgaaaaaagctcaaaaaaaggctcctaacataaaattaatgattgacaacgaataagatagtcctcatgaagaaatcaatcatcgtcttggaacgagcctctgagtcttcagggaacttttgattcatcactagaaccggccactggctctaggaatacccagttttaggggctcagactcaaagggcctaggataaacaacggccgatcttgtcctaatcaggttgatgaagatggcgcctacgacccaaccaggtacatacctatcgttgagttagaaaactgccatcttagacgccgttggtggaagcaaactggcgtaacgccgaactagagcgtgaaatagtcgtagtcaaggcggcacagtagaatagttccaaaaatcaacctgaccttggagaaagagattcacgaggcaaaccttgcaactggcaaaccaaggggtaggagacaaccaaaatatattcccagaactctaaggagaggcaacctgagcaaactggggaaagtctgggaacacaacctaggacatgtggaacaccaatcgaagatcgccaaccctctccaagttcataagaaaggagttctcacaaacccctatagggaggaacaaggtgaattataccttaagaggaagagcagaacgagaagaggtgaaggatactgcgaggcatacagtatctcataatcgatcaaagtgaggaggagggaatttcatcgcaacgatgatcaaaaaagcataatgtagcatataggaagagcaaggtcagacagctgtcacgaccggtgtcacctaggagaacatttgagctcgagaaaacttgatcttcatcaatgacttggtccaaaacaaaaggatttactccatttacgaatgggcaagttagagaataagttcagaaggcaccaagtcaaggaatccggaacgcgatcggggtatgattctattgaagaatttgagtcagaagcctcaggatcaaagaggggagacgattccaaaaggctgctcaaggataagaaacagaagaaacacaataaatatagacccctttatgctgaatatactaagcttaatgaaactcaagaaaatatatatcttgtgcatgtacaggaagtcatttttaccgagacaaaaaccatgagacatgcgagacgcaaaaaggacccaacaaaacgatgtgaataccatggagatattagtcacaccacagaagagtgtcgtcagttgaaggatgagatagaaggtctcatagcgtgaggacacttccaacaatatgtaaaggggtagggcaatgcccatgataagcttgatttgcctagtaactcgagtgactagggattataaccatcctctacaggaggaagggacacttcagttatctcgagagggaacacgtcacaagaggacaagtggcagttaatccggtaaagcaattaagtaaaagaattgcaaaatgaataaatattggcttgctatggtcgtcaacaagaagcatttaaagacaaactgttaaaaccaggagtagtttacctggaaccccaagatatgacaaggattgaccctggatattggaacaattgtgggagtatgtcagggactgaacctaaacatcaaaacacattctatcaaaactagatgcttttggaagattgataaaataaacaattgaactggagaagttattatgagattaatgattgtaaatcgcatctctgatgtaatattttgaacttcagttgtgaataaaataatcatttctttcaacaagtaattataaaacgtagaccctttaaaattacttgagggtcatatttgtatgatgaatcggaattaatctagatatacataatacaatgcaaacccatcacttcaaaaaaaaaaattgaaaaacattttaaaaggtcctcgaccaaaccattttgacaaaagagtgtcaaactcttataactccctgactaaagctttttgacgagagaggggtcgaatcgttataacgccttgatcaaaccttttaggagagaaagggatcaaacaactgtaatttttggtttaaaaactatctgacaagaaaggaaaaccaaaagttataactagcacataaagctgaatactaacggctcgcactaagggaaagtattaaacgagacatcaaagtgtctttgaaaaa

SEQ ID NO: 164326 - DNA, 791 bp, Cannabis sativa
ttaattaattgattatttttgtttgcttgactagtctcatttaatttagctttgtgccttgtaatatttgataaaatttctttgaaaaaacatagaaaaatgctcatatataatacagatgaagattttgcagttgtaatagtcaaatggtcacggacgggtcacctttaattttacataaagcttaaagggctcactagattattcattttcagattattttggatatatatttttttgaactgagtactgatcatgacacttaaagatgatatatataatttttggtcaaggtccatttaaaaggtaacattatttaggaaccgcttttactgagtagtacgatcatatatttgattatatttattgcaaagggaagtagctttatagtttttaattacccaaattactttcccaatttcttctcctttattattgaaaaataaaagtatgtaatttgcttaaagctgagtagaaaaggtatttttgatggtacccttaagatgattttttgcttttttttaggtagggaaggtaggtcttctcatttgtggtgatctgttttgagtatttaaaagtggtaattcaccaaattctttggaaagtatataagggttttgaagttttgttagttgatgtatacccaattaattaattagagactcatttaaataaatatatttatatttatagggatgtgattttgtttcgttattgtactttcacggattgtaatctgtgatgtacgtcagccgtcagatgagggtgttatttgatctcacggctgagat

SEQ ID NO: 164327 - DNA, 1989 bp, Cannabis sativa
ttcacgcccttccttgctaacattaagaaccaatacaacatcttgagtacgaacctaaacaaaatagccatattcagctctaaaatatgtaaatcacaggagaaatatgtatacacatactagtaatgtattacttttgtactaattgtaaatgtttctattttcggtaaatggacaggtatatatatatatttttttatacgtatgcaattaattattttgaattttatttttaatactataaattattctgatcttcctgagatgtccattataactataatctacaacaacatataaagaaaattaaaaattagatatgaatttatgtaagtgtaaaaaataaaaaaatgctcctacgatcccctacctataaatattttcatacataacataaattgactcgagattaattacctcagaagtaagcgaaaaatcaagagcttccaaaactatgatgggatcaggagaagatgtcaatgaacctacaagacgaaatagaaacaattgccataaagataaatatataatccatgtttaagcatgaccaatattgttcttaatcaaattctggattatacttagaacccgggttttctcttggcttagatcactttctctgtagattttcaaaagggagtcataacccgatctgttcttctcgctagttctctgcattacagctacatatgcagcctgcaaagttcaaaccataatccataatgaacaaatatataatgttgttatttagatatgcttttaagttacattagagacaaccattctcaaatctggaggaaggagtggtgtgtttctgtcaattaagtattcattgaaacgcctaattgcttcagttagagtttgttcatgtccgaatacagccaaggctgtcaaaatttctcctctcaacattgcatctaaatggctctctccatctttaggttgccaaccaccaagagtcctgatacaattttggaaaagaagaaaaaaaaaatgagaaaatgataagaatttcgtcttctttatgtgttaagggaaagcgccaaactcgccctcccaattcaatttctctgtgatttttctaccttagtctatctttggtgttgtttggctatgagtaatgaaaaagagaatgagaatgataacatgaataagtcatgaaaatgcatgaaagaacttactctgcagcaattcggaataggttgataaaaaattgtttaatggcatccagaagctcgggtatggcggaagctacaattctttctactttatagcttacctgtgaatagttattaaggtaaccagaattagcagactaaggtttataaaatgaaccgaactgaacttaaaacaagatttagagcataacattacagtaatcaagttagaaagcacagtataatcaagttcgtccgagtaagaactcatcaaggtaagtaaagagctaagagattgttggctagccatacatagcgcgaacgcatcatccaaaatccctgtgaaaacaaacaacacaagatttaagctacttaatttcgaaaccaacaagataaaagattgaagtgagtgagaagcatccacaacaataccaaatctatctgttgcagttaagtacttgttctctattgcatatcttagtctctctgcaagatcctcgtcgtatttcacccgaaagaaaccagtttgattgacattaagttttatccaaccgagtgatgaaccgcccttgccttcagctgttgtggcctctgcaaggccgaattcattcatgtcgagagctccagactttgattctagtaggaagtttatttggttgtcgtatgaaccgcagcatagtgttattgggacaatccactttcccaccccatgtgaaccaacatacaagaatcgtgactacatttataacatacaagatctgtaagttcacaaacagtagaatagaacttaacaaactataataagagacaaaatgacctgttgaatctctaa

SEQ ID NO: 164328 - DNA, 869 bp, Cannabis sativa
atatatattattacactaggtctcatcaaccaatcaaacggccaaatctacttttcaagctttcggtgtcgagtttgaccaaaactaggtatagctacttacaatttcccaaaacctgtatgtatataaatactccattatatattgtagccaagtgtagttgagtaacatgattgttggttaagtaatcaagtataagatttgaccatgcaaattaaaatactatagttttcgttttttggaccttattaaattttttagcattactattttttttaataatttctttaccattactattagctaaacaatttaaatttgatgtgaataaaaatattaaacttaaatttaattgtaatgatcatagaatttgtgttttcaagtgaatactattttttaaattaaaatagtagtaatgttaattttctaacacttgaatttcatatttcacttcaagtctactccctccgattttattctcttcaattcaaactcatataataaatatcctattaggtgtcgttggttggaaggaataaaacatagctagaataagaatgacattccaatctatttcattttattaccttcaaccaaataccacctaaagtaagtatcagtatcttgttcatgacggtctaaaaacaatatgagatatcataattaattattactaaaaaattgtcaaccattcgcaagacaataagatcatcttcaatgggagatgtaaaagtttagctatattttgcacaaaaagtagttttgtaatatttttacataaacttttactgttgtgctctaatacataattataaatcttgatgtaaatttattatgttatttaatgcttacttaataatttattaaaa

SEQ ID NO: 164329 - DNA, 634 bp, Cannabis sativa
aaaaaaaaaaaaaaagcataaatgtaagcttattttaccaaaataatttaaaaaaaaaatgacaaatcgtagaactcaatttgaaaacaatatactgaaaattgagaaaaacaaattaccctccaccgctaataacacaaaataaatatacattatattatatagtatatacaatttcggggacagtttagagcactcataataattaatataaaataagatttttttaaaaataaattttaagaaccaaactaaatttattattttaatttttctttttatgtgtgaatatatgttaatattatatgtctcttctacgatgcatccacaaaaatgagtgtactaatgtattttctttgtgtttctgaatgtagtgataatcttaattttttacatgataatgtatattgtagttattcaagatatcttgtaaaactttaaagaattcaaaataatttacaatacaaaaagtagggttcaaataacttattttgcacgcctataaaataaaagaaggaagtgtgtacaaaaatttaaatttatttttggcatgttaaattattctaaatataatatgttagaaaattaatgatatacccaagatctatttgtatataacatagaacacaatagt

SEQ ID NO: 164330 - DNA, 1554 bp, Cannabis sativa
ttggttcaaagcttttatggattgacatactaacctgaaagaacagcttgtaagctgtccataaacactgagagacatatgagaggagccatgattgcaatataactaacgacctgtttctcattggtgaaagcataacccacaaatgaacggcagaggaagagactaatgctcactgttactgcctctgttgctgctataaacattgctgcccatacggccaatcgcgctgcttctggtttaccagcacctaattcattcgacactcttgtgctgtgtaagtataacatcaataagaaatcaactttgtttcactactcttcaaattttccatccctttaatttctcttcatgtttcaccaataaatgacacttattttgttctacgaattacaagatcaacagggtgtattaaataatatgacagtactatcatatatatgtagtgttgttatacattattagagtttcattcctaatataatgatcacatgaccttttatccttcaaaaacatagtcgctacatgttcatgaaatgtaaggtatatatatgacatgacatttttttttaaggtatatgatattattttaaaattactttactttaaacttttttttcttctgtagtttttttttggtctaagtgtcagcttttgcaagcaatcgttctttgtttttttagttagattaagatggttcaaggttttattttcatttaaaaataaatcacagattatgttttacagaacttttaattagtacattataatagaaatttttatattttattatttacttaatttcacattgatctatctttacttttgtagatgttaggaaggagtgactcctaattctttctccctccttatttttctgttattgtacctaagctatgtagttcttaggacgttagtagtcttagttattagtgtcagttaagttagtcaaaactcactttccaccatacctaacaaaacaagttctagtctatagctatatatagcaatcttgtaaaggtacggaaccaactcttatatagattttgacacaatttcaaatagaaacactttttttttctcgtttaagttgtttatacttgtttatttcgaattggtgcagtgagttttgatcaagctggagtaattctcattctcaacaaactgatattacagcgaacaggggcaatttcgagttcgtaggtgaaggttgtgatctcctactgctcgagaatcaatcctgggaacaatgaggaattaatgctaagtttgatttggagaagttcatgggatagaacaacttttgtttgtggagggtatagatgcaagctcttatggtacagaatggacttctgggcgccatagaaaatgaaagtcaagaaaaagcagagaaggagatgtttgaaccgctggaaaaggctcacagttatgtcttggatttaagtcataagagaacatatgttaatgacatacatatttggacatagaatttagcaagtaattagcagtttattagtaatttaattattatttataattagtgcattagtagaa

SEQ ID NO: 164331 - DNA, 1149 bp, Cannabis sativa
tagaagtagttgagataagaaacaacttggaggaaaaagttcaactaaaagttcactgcaaatcgaaagacgatgatcttggtattcgaattctcaacttcaacgagagtttttctttcactttcttgcgcaatatttttcagacgactctcttcttttgtgggtttagatgggaaaacgagttccactggtttgatgttttcactcccgatacacctacatgtgtgtaccctacaccgtgtttgtggtttgtcattgacagtggaccatgtaaaatagagtacgattcgggtgctttgtatagttgttatccttggaataaagactctttacgttctaagatgattgaatcaaaacttgttcctcaatcacctatttctactgctcctactccgtattaaataaattataaataacgggcgggagcagttttgcagctgtattgagcaggttggaatcaaaaacccaatatatagtattagtattttgatttttatttttggtatttatttctcttgcaaatcaaagacttgatcatggatgcacattattgtactagtacttttgaatgggaaaatttgttaataataagaggataaatttccagaattaatattaccttcttcttcatctcttcatttgattatatgtttaggtcatggagttttaattatgaattctattttaaaaaaatatatatataatttatgagtttagtgtgtgcattatactttattatgtcacaaaattaagtgttttttttcgaaaaaaaaaaggattaagtatgtgtttgctagaatcatgtgtgaaatggaaaggctatttattcggtttggctagcgaatctagtactggtcccaaagctaaatagaacgtggagaatgtgcattttttcacagacttgaataaaacttgcccgaaagattgtttttcccttccgcgaatcgatcagatggtagattatgccacatcaggatatgaattgttaagttttataaatgtgtattccggctacaatcaaatcaaaatgcacgtagcagaccaaaagcacatcaattttcaaatggataaaggactatactactatgttatcatgtcatttgggctcaaaaatactggagcaacatatcaaaaattggtgaacaagat

SEQ ID NO: 164332 - DNA, 782 bp, Cannabis sativa
aattcaatcttgtatcttttttttgtatgcataaacttactattcccccacacttaaattgttgcaagtattcatatatttctcatcgaattttttatcttttcttaatgaaatacttagaacttacaaacattcattctaagggaatagtaattttttttatcatccctaatacataaccatcaatatttttccctcaacataagtctcgcacgtttaaaaatataaaacattaatatactatagtgtgaaaaatgatgaataacatatatttttttctaacctcaaaaggctcatgtataagattaaaatttcaatatttaagctccaatttagtaactagggaatcaacaaataggttaggcttgaaaatctcaattgatccaaagaaattgcctatatcatatctcaaaattatgtgaagtttattaattttgtctcaaatgatttttaaacaattctagagtgatcgagattaaatatcagcaatcaaacatgcattcatctttctaaatattaacaaatatgatgattcaattttcgtacaaaaaaattaaaaatcaagcttgaggagtagttaatcatgaactaaatacacaaatcatgtagactctaccatttattagaaaaattaataatctcaagatacaaaattgtatacaatgtagaacacataataataataataataataataataattaggtatgcgtacctgattgatccatgataattttaacaatttgatagtacaatactatcaactaagtcttcctccctag

SEQ ID NO: 164333 - DNA, 847 bp, Cannabis sativa
atttttaatataaaaatattgtataatttagaaaagcattagttacttaataaaaaataatattaaatcgaataaatatatatggggtagtgaagagaatgattagagtattcgatcttatggccgtttctcgcttatatatatagttttcatccaaataaaatgaatttaattatcactccatttaaattaatatcaagtccatagttttttaaggaaagaagattcaatgaaactaaaagaaaggagtaatataaaaaagaataaaagatacaattatgaatagatgtacattagaatttcaataccaatttcataacataccttgaaacgatatttaaatattagaagttgaaagttttttaattatatagaactaatagaaacaaactaatatttctaaatggaaaaaaataacatgataataaataataaaaaaagcatgttagacttgaaaaaaaaaatgtaattccaaataagtgaaagtttaaaagtatatactttaccaaaaataaaataataagagaattgcatatagagtcatagactatcacattctacttaatgtatccatgtatcattattattataatatataaaccacatatatatgcataaaaaaaagatagagaaagaatagaacatacttgaaagcttgaagatgtgtgtagaaaattatgagaagctattaatgtttgatgaagagaattggctcatgaatagtgcgaacagaagagaataaataagtatattggttagggacagggccggccctaggcataggctagggcccacactttccgggggcccaaaataaaaaaattaaaaaaattattaggtttttatt

SEQ ID NO: 164334 - DNA, 1184 bp, Cannabis sativa
ttgaccttatttattttcatatttttgtactgaaaaacagttataaaatttcgtaataatgatatttttgatattaaatctgtgataatgttaattttagtattaaatatgtgataatgctattctttacattgaatatgtgataatgatattttctatttccaaaaaaagattaatagttattttttttaattactttcgttactttaaatttttgattttatttaatttatcttgttttgtaattgtcctaaaaaatgaacattgtcttcagtagtaatagtatagagtaagagttagtaatacatttgattgttatggagttgacagatgttccaggtttcgaattgacaaggtgctttaccttttctgagtttcattgaaatagattagtgggtgcttctatcagaaggtgataaattcaagtttggtttaatttaattttaattactcaattgcttataccctatatatagggttcattgcagtttgcaaagttggtggtgctagttctcatcagttcagtgataaattagtctatccaaattgtaaacaatgatggctttactttgatagaagttttttatattgtaatgcaattttgttataagattcatatgcaactattttggtgttgtaatttgttatttataatacattcagtaattttgttttctgaattgcagggaatcatcctaaactcaagatattttcctggaagtgaagactgttgttttagtttgtgatcgttaaggaaaattttaatagttattagcttttttttagacttaataatgcttgtaactttatatgattttgtttatgtatgattattttaatttaatttgttgtatatattttgatgacattcagatttgattttttttttaattaagaaataagggttgtaacccaacccgatccaacccaacccataaagtaaaaaattgggttgggttatacataaaatatgatgtgaatgggttagatttttgtaggccgacttaattgggttggcccaataaaatgtcctcaatccggccaacccaacccatgattagccctactcggcacacaggccagtaggtcaatatgtacatagctggagaaaactgtcacctcatggttgatctagcttttctttacctttacctgcaccacatagcacccgtgagtcacaagga

SEQ ID NO: 164335 - DNA, 1266 bp, Cannabis sativa
tgtctatagtcatattttacatcaattaataaaaggtctaaatgtcaatccacccttatttttttttttaaagcaatgaacaaattcattgaaactagaataacatcatatagctagttatgaatactaaacatgtcatctcatgttcatcaaataaatactaaatatggcataataatcaaaataatactatattctaacaaaaataaaaataatcatatctacccaaacaagttgtttatttatccaaaaagcatgtgcaactaatctacaagcaacataaattaggaacactcatggaaatttaaataacaaacttgtaaaaacttataataatgatcacaaaatcatttgagtaaaggactctgatagaaaagcaatcataattgtaaaatcttggtaccagacaacaatctattgtcatcaccagcatcacgcaaattgttttaaaaactcactattctttctctaaaagcttgacgggactaaagtatcttagctgcacataaacaaactatacattagtgagataaaaattaaaaataataagaaaataaacattgcaaatttatattttattttcactacaaataaacaaaataaacatcaatagatagaatttatagaaaatactaacaatagttactatataaaaaagtatttccaacagaaaaattataaaaaaatgtaaaatgacttatcttatcaaatgcatattagtgtctcaaggaggatccacgagtactaattcaatcatttaaataattattataatttcaatgactttataactcaaatattagataacttaaatcttttaattaataacttaaattatatttgtaataatttaatttaactactgaaaagatttaatgatagaggtttcaaaaagaatatatgatttgaagaaatttttaaaatgaataagactatttatttcataaaaaaaataattaaaaaaacaaactagtctaatcaaatgtgttcatttttaatgatttataaataaaaatactaataaaatcatgtgtgatttttgttagagtatataaaactaattctttaattagcagctatgaaattatggattactgatgatgtagttgcctacttattcctttaacccgaaataattagaatatatgtgtatgtgttttgggatagatcgatgttcataaatgggcaccattcatgatatttggacttttatgaatttataattttttttagggaaacttataaaaatattagaatttgggttaa

SEQ ID NO: 164336 - DNA, 1830 bp, Cannabis sativa
aataatttaaagaaaataataattaagtcaaaataaaaacttagagaatttgattaggccatcagggatgtaaaagagtaacaacacgcattctaggacaatctttaagtggaagatgacatatattttcaatgtcacacttattctgaccaagaattcgacattgataaatcttatttgaatgatcagaaaagaagaatacatctttatcatctggatgaagagcaagcaagtctatactttcaaatcgcctcattatcattagatcgtgataatgcaccgaattccatttaaacatcttattgttcccatcttcattataaatttcctaagccataaaagcatagttcttcaagaaggctaggacaacttttcctcgaaccactccaacatataccttcaactctttacaactacacctaacaacacaaccacaatgtaaggccagtggaagaccaatcaattgccattcttttgtgataatattaaaaattgcaatagcttcaatgtgaaagaatgaccctaatgtccaatatacaattccattattattacttccaacaacaccaccttgatgattccataaatgaaagaatacaggaaatttgatattagttgaagaggtccattgtctagtcttagaagaaaaaatagttatatggagatcgaatcgaactggagaaattcttaccttattaaaaacattggtactaattttgaccactttgtactcaagcttagtactaatattagtatcatcataatcccttgatactactaatgcatatctataatatttatggaaggcatttggagattgaggaagtgaaatacattgtttggtaaacggattgcaaatgtatgtatgttgagaagattctaccaataacaaatcttcgaacgaagaccataaataaaaataattgttactatccttcgaatgcaaaaactctaaagcccttctttgtccgtagtcaaaaatctttgatctctccgaaaaaaaatcataggaaaatgaacaagtcgatggagtaggacccgtaaataataaagtgaaaggtagagacggggatgataggtgggaaagtgtattattaagccttttttgacgatgataataattggatttttgcctcaaataagatttagaatgattgataatcgaaaaccaatatttacacacgcgcacatgccaaattgatttttctttttacttttaatatattatttattaacaatttaacatgatatcaatcttattaattgtatatgtatggtcttggctgtcatgcatattaaattatttattacgtagaattaacataaatgaatagagtacttgtttcacgaaaaaaaatattggagtggagctttagaatctatctatctatatatatataaactaatcacaatgtttagaaatagtaatcataatagaacaatatacaacacactaacaaatgggttacaatcaaggagaaaattagtaccttgtggattttccaacatcgtagctaggtattcattgaatatatataagggttttagaagtaaaaaaatggatgaaattaatgtggataagagcttgagatgggaagaaagaatgattgccaaaaatggagatagtaagaatagtcaaccgaagttaatgagagtaattacgagagaaagagggcgagagacccaaaataaatatattctcttgttcaaaaagaaaaatgaaaaaatattcttgttcaaaataaataaatcttttcagtattatgagttattgtaattaaaaggtaaaattgttgagagaccatcggtagtgacaaaggagaaaagtat

SEQ ID NO: 164337 - DNA, 2063 bp, Cannabis sativa
tttttttttttttttttatggtttgatgttgtttttggatattctatttctaagaccataagaatatagagatattcattgtatagaataagaccttgattcaacctactctatgtttcttcttccctctcctctgtcatcccctataagttgatcaataatttataattttaggttttgaacttgactgacatagaatcatcatgaggttgagatgaaatctttttttttttttttgacaaagagatgaaatcaaattttggtaacaaagaaaagaatatttgttcatcaatatcttattttgcagtcattgacttatatgttaaatttataattttttaggttttgaatttaactgacaaataatcatatcatgagatgaaatcttattttggtaacaaagaaaatagtatttgtttgtattctcttggagtcattcatttgtatgttgaaatctgacttttagatgaggatgcgatttttgttttttatttttgacatgtttgaatattccataaattagtaggtttcattacttgattagtgtcatagggtatcaggaaaagaactggaaatattatgcagctcatatcttactctcttgttattgggagcatcttaattatttccttgccacttctcatcttgataaaaaatagaaactcttttagtgttatataaaagatggtaacttggaatgggtgttcttttaaaataactaaaaagaacactaattttactttattgtggcagctgcttcggggagcttgattttgattgtctaagcccaaggagaggatcgatggagcgattgattctgttcagagaacgctttaaacaaagatctctaaaacaaaatattcggattcatggaaagcgtaaaactaatgacattttctttttctttttaaatattttcactaaattaaatactattgaaattttaatattgatttttcattataatacatggcataattatttgttcattctttgtgttattttttcttttgaggtatcaatctaatcaaaattcactttctttcacatatatttcatatatttatcctttaatttctttgtatatgcttttgaattttttctattatttacgtgcatttgcactgtttttgaagttctgtaaccatataaatattttattgtaaatatatttgtcatccaaaaactgaagggttataaggtaaactttatgtctgtgctctaacgtttatattgttaaatttaatgtttcatactaattatttactgtgaaataatgatttttaataatattgattggttgtgggggagttaatctgcacagaaagttaaaaaaatatatagatcttttttttttacatatttttatgattgaattacttggagaacgatactttcaagcatcaactggcttcagattatgtgtgctcaccaatttttccaagtttactacatgagtttgtaacattgtttgtattttatgttgtattgtttgtaatgccgggattaatacctttcatcacactccaagtagggagtggtttgaaacagatgcaatgttgcgtgttagtttggaaaattttctcttcttcaccatctttgaagttatgatggttggtgtgaaaacatggctattttttttcggatcctggtcatttgatattcattttctttttatgcaaaatcctttagtaaatttttgttaaacaagtcgttttttatagtttttttatttttttttgtttgatttcagttactcattgagttttttgatattatcaacctattcttatactgattattagtcgtttctttctttggtttaattgctttctaactttgatttcgagttctttttgaactattttcaggttaattttatttgattttccttcgatctcttttgcttttctttcgcatcagtagttccaaaatatacccctaatattttgaacttctaactaattgagccgcttcacatataacaatgagtggtcatctcatgttcatctttaaatcaaatcccatctaacactttctcatatttgtttttctttactttt

SEQ ID NO: 164338 - DNA, 1213 bp, Cannabis sativa
aaaatatcaatacacataccacaatttgcatatactatacatgtaaatagatagcgattattgaaaaaggtacctagaaataataaagggatcaatgcaacaacataaatactactacactaaactttatattgaaacaaagttagaaaagttgggagaaaacacaaaatgagcatcgaaatgaatgagcatattcaataagtagaaatgtatttttttttagttatagaaactatttagatcataatttccacctaaataaatgtatctctatatatacatagatgttgattactacttgtcatctcaaatatagttaacataaacaaagtgataagcaagaatggaattagaaaaaacgtacaaatgaagatttgttccattactctctacccattatatttaatgaaacatatatacatatacatatattatagtttactttaatgtgtatagttaatactgacttggttttgtgtcaattctagctagccttgggcttgagagttgaattgaaatttgtgagaaatgacttgcccaatgggctacttgggcattaaataatattgcagtttcaaatgcagctgcataagtagatcaaattaaattcttctccccattaatccattaacactgcaaccaactctcaatgcttatgcatttattttactccatttaattctttttttaataccacaaaaatatgccttcgtttcgtgtcacccgaccaagtatatcatgtccacattttctgcagcataaccataaggagtaagtacttgtgaaatttcttagtagttagtaaaatttgatgatgattttcttcctccctagctagcattctcatttgattctctcaatatatatacataaataattacataatcttcatgaagaaagacgataaattttacttcaaagacatgtttagaactcaggattggactgaaaaagattaaattaaatagacaatattaaattatgttaaaagtaatcttattacttttttaaaaaacttatattaaaattaaaatatataataataaaaaaaataaaaataaataattctaagtaaaaaataaaaaggaataataaaaatgattaaattataatataaaagaaaatatcatatataatcaaatatatatcataaatatacaataaaataatttatcatatttatatttaataaataattacaatagtaaaataa

SEQ ID NO: 164339 - DNA, 1494 bp, Cannabis sativa
tatttatttgaaaataacctatataattattaattaatataaaacgaaaaactaaaattatttgaaaatcgtaatctaccatatcataataataaaaaaaattattttaaatataaaacattctttctcactactatacataattaatttttcattacttttctctcatctttatctccacaagacatcttgagaaggttgatgcatcactcatacaacaactattttaattatttataaatattttaggaaaaaaatataacataagagattatatttaaaaatacacgatcaaattcgtgatccaagtagtacttttctttaacacattttgctagtaactcttctgcacggtgtttacaaaatcgctccaaaaccatcattctttttgttctctagttctttttatttttataatttatattaaattatattaaaatagataaattaaatatttatcaaaaataaatatttcaaaaaatatacttctataaaaatagactcataaaagaaaattaaaaaagatataataatttttttttacaacattttaataaattaaaagtattatactactaaataataaaaaatgatgacatcaaacgagatatggtgatataataattgtgactacaagtaagatatgttgataacatcgaaccgaacgagataaaatgatgacaataactttgaatgatataaaaataattcattttggataagagtattaactaaataataataataataataataataataatagtctacttttttttttctacactaccctatccatttatttatttattaattttttaatcatccctattttttgttaacttatattttctaaattatagctcatttttatattagaaatttaaaatttattttttacaacattttaatgaaaaagtattatattactaaataataaaaaattgtttagagagacaaatttaacctaaaataataaaaatatttatatttaataattatcattgatattaataatattgtgaatatacataaataatttcttcttatttcataatttttttatataaataataataataataatatgaaattaaataatgtaacgtcagtactattaaatattaaaatatttttttaaagttattattattatatcaatataatgtttcattttatattaagaaaaaaaattaaaagtctcacgaaaagcggcctatactacatagttatatataggtggacatacatagagccgagagaggacctaagcacaccctcaaatttcagaatagattatataaaattagagataaaagcaatatataattgttaggcaacataattggtgtaaatatttgttcgttagttggtagaattagttttgaatctgattctccttagttctatcttctatttttatttatatatatatatataaggaaggggtttcaatggttacatttttattgtaatcatcatggttacattttt

SEQ ID NO: 164340 - DNA, 504 bp, Cannabis sativa
ggttgacattgtcgtcaatggctctgatactaagtaaaacttttacaaaatagagaaatggataaacactacagctcaaattatgttactgttttattgaatatatatataggccgatacaagatcattctagaaaagggagacattattacactgaatacaaggcataacaataaagggaatattctcataaataataacatgaaaagattctctttgctatgcaacgattgtttatcatgagctattaggtacctctttgaattctaggtgctgagagggatgagtgacagggttaccacttggctgctaagttggacagaagtcactagtaaccatttcaattcttaacatatagtactaagataaagaaagaattaaggtatgttaacgtactaattaacatattaaaatcaaagtgtaagtacagtttttagctttaatttatggatgtgattatgaatatattttcctatcaaacgtattattattattgttattatt

SEQ ID NO: 164341 - DNA, 1624 bp, Cannabis sativa
atttagagtgttttagggtagagtgtttagcccttttgtcctctcttccaggatggggagcagtgttggagtacttcaacgaagtgttcgactgcgggaacacaagtccttctgctgaatcctctttgtcagacggaagcctaggttccctgttggtagggtcaatgtttgatggagctaatgctttcaccgctccactgccccccctccaggggtcgtttgagtcttggaaggctctctaattctaagtgagggtgtcagagggtccgaaacttgtttggacttttgggctcgggtgttcttctgtttccccttgttgttagccgcaacatttactcttttgatggtgttcataaggtcactgagcattttggactcaagtgtatctggaagaattaaaagcaccacaaacaagaaaattagataaaaggaaaaaaaataacaactcaaatcacataaattcaaagataaaaaggcaacatgtgagtgcaactgcgaagcgtgcaactatatgggtcccctcttgcaaacatgtttacattttcccagttgatgaagttatcatgttccctgaagcccaagaagaacatagtgaggaaagagcccactttaacagtgtttggagggaattctcgatggttgaagtgcctaactagttggtctaccctatcgatgtaatccttcatgggatacttacaaggatctaaatataagaaagagtgatggaaatccccttggtctaccaatgacatttgagaaaggctgggggtacaaatcactcataagggttgattacctcttcctgacgtactggctccgaaagtgctggctttcgggtatgcacccctaaacctggcccgaatctcttcttcttccgtgagggggtcgggatgatggttgtcccaggcagcagcaagaagttcctcatccttggctgccttagttattgctactgaaaggtctaaagcaatttgctccttaaggtcactgagagtttgaggttgtcccctaccattgacatcgtgaatacgctggagggtggaaataaggccatattggtgaagtaattgggtaatgactaacccctcgacttgcagttcttccttggaaaaaatctcgtagaaggcgattctttgccttaactcttctgtgagctccattctgggaacaggttctgcaaaataggaagacaaccaatgaattaaagttaggttttgcgatggaatcacagtacaaatcatcaaaacaatgaaaatgcaaaggactgaaggatgatacctggaattttaaagtccaacgagagtgctggaacttgcctcatggggaagccagtcatgaaaaatcagtactcccagtagtccatactgcgagaagaagtacttgtgggacattcaacatttttatacttctggagatgataaaacccaatcttggtgggatgtcctcgcatgggttgggattttacctcataaaaatacaaaatttcttctggggtgggagctggttttccccaagatttacaaaatctaaaccattctgctagcagcttgtatgctaccggtaggagatagaagggggctattctagctttaacgcaaaatttggcaaaatactgttggaaaat

SEQ ID NO: 164342 - DNA, 980 bp, Cannabis sativa
atggtccaaaaccataaccccgatcactcctgatcttctaaatgtccactatctaccccataaaatcaaaagttgtaaactagaaccaagtgactctataggccgcacgtcgcattccactgttaccgagcataaaacatgaaattcataaaaattcacatataacataattaatgcatctagtattcaaatatatctctgaaattgagaaaatattttcctaagacttatttctgacaataagccctaattcctacttaaaaatacaaaattacataataattattgaacctcttaattttctgctaattccgatgatttaactacgcagtctgtacacattcaattacaatcgttatgctgcaaaaattttgatagaattaggataaatttttatatattatatggtattttgtatagggtccactagctcaacaaccatcaagacgtgatttgtcgaaaggaaatggtcccatgccttgttaaaaaagcagtggtgttcaagctgatctattattcactctaaagatcatggcgctaatccctagggtaatcaaatggatggttgaagaatttctgagaatcgaggcaaaaaatgtgataatcccaatttaggtactacgtggattcatagtccctcgtacctagatcacgatatcaagagaagattcgcagcaggtggcattgtgtgacttcatcgaaaaccaggcaatgcttttcagaataatgtgtactcttctttaacatagttaatcttatatatcaatttcaagtgaaattattataaaatattaatatttacaatttaaatgcaagcacatttgggaggggttacatgatttgagatgaattttcaagttttacgacccagagcttctcacagtgcatggtaaaaatgatctagagaaggaagagtcttttaatgttgcatcagaaggattggctcattggttatcattgatgaatagccaacaccaaat

SEQ ID NO: 164343 - DNA, 1911 bp, Cannabis sativa
agataccaagtagatagagattcatcaagaccaccgttaaccacatctttgggcaggtatattgttataaatatcattacccaaaaattgatgagttctaaataatatattattgacaatttttattaaataggctaatctcaagacgaagaacttcccaatgttgtggatacttttcagaagttctaccacaagaacaaaacttggcatagtgaatatacgtaacgaatgcatgtaagtaatttggactttaaccatatcgttctatattccatttctattcaattgtaaaattttattaatatttttttaggcccaaatagttgagagacatgaatctcgacttgctccgagtgattaggctcgtttatacaatgtagataccaccctgttctcacagacttgcctattttgaaacaagtacttggtaagtggtcatgccacctaagaggtattggccctttgcctagacttagggcaagaagggcaaaaaggaaaacttcgagggctggttacgttccacctttaggcaacctgctatcaacatcgaggaatatgagatgttgaagtgaaaggtggaagagcaagattcacagaatgattatcaacaacaaaagatgcagactcaacaacgatacctgacgacattttaggagcagttcaggtatttttttcgacatcattcttggctacaacattccaaaaatgtctctgattccaccatttcatcctcctagcgttggatcttcatggcaagctgctccttttgagctagaacgacgacgatgcgaatgatttataatttgattattattttagtattttcaatgtagatattatgattttttttatagactatgacaccaactttttaattatttttctaatatttacttgaattcggtttaattataatatgtactcatgattaggctaatgtataattttgaattattatttatgaaattttagttttaatttaaattaaaattatttacgttatacgcatattacgccggtaatgaaatcataaacaggtcaatttaatttatagattagacttatcacttgtacatatatttacgtaaccaacaaacaacaaaatcagcatttatagaaattatgcaaatgaaaacatctcacatgcatgttttgaagacaaagaaaaacgatgatggtgccagctagtccagtaacttttatgttttatttcttctttttcattttttaattcgtaattttaatggtttattctaacacaatacccaattgagcaccatatttttgacttgcttcaactaacaagtcccatctgttatatttatttatttattttgagtgaccatctgttatgttttataagtactaaatagagatcacacacgttaacatttaagttttaataacatatacaaatatatataattaagggtgattctggaatacattgcttatttgattgtgttacatgtattttattgattttcatgtttttactttttccaacctatgtttttattattattattattattattattattaaactgtaatttttgaaatttttacataaaaaatataaaatacaatctttattacactaatatcactatacggttatatcaacttttttactcttcttctttattttattactattttaccacatgcacactcattcaaagcatcagtacacgtgctgacctatgacccctatcaatcaactatccatcatttctttctctttttttctttttttttttcccatttcttttcaatttttttttaaatagtactcttcatagctgaatatttccttctccacaatcccaactctattttctctcttttttttgttcttcaatttttttttcaactcccattaactgaatctcataatcatttttcatc

SEQ ID NO: 164344 - DNA, 2216 bp, Cannabis sativa
ttgagtgaagagcttgagtccaacaagtttttagcattttattgttgtttgtgttgttattctgtatttattgtttcttgtagaattattcattcaggttgaacactttggataacaagttcgggagaagtcttgttcatgaggaaaagtacaagttagacactcttcagaaggaaaattgcaagtgattcactcttccaaaggaagagtgcatgcgtttcgatttgaagggagtttaagatggtagtacttcagaaatttgactggaatagtagattacaacagttgcgtcaaattgaaagaaggagtctttatttgtataagctaattcagttttataattactttgacattcttctaataaattttattctctaggcgtggctttgtggactagctagtagcaattcgaaaagattattgataccacgtataaaatgttgtgtcattttaatttctgcatttttactttttgaagtatatttttgttctgtcaagattgtgtctgatattatacctttggaaagtggtccatttaaaattttggaaggaaagtttattcttttagagaattaattattagactaaatgaaacctagaaaaatttgtattgaccattaaaggaagtttgaagtctagacatgtggtttagtttttaatagtttatgaaaattttatttttataatgtgatgtgtttaaaatataataaaagtagattataaatttgtgaaatacggttggcaatttatatatacgtttagagtcattataaagtgtcatatcatcattttatatttaattttatatatataaattacttcttgactatatgtgaaggacttcttaacatctcaaatatttaagtcgtataaataccatgtaatcactgccatggctttttcttgttacgtggaactaaactttcccacatgatctgccaaacaaacataacatattaaatgagcatgtgcatatggatttccatcttcccaccctttactatcaacatatattaaactccccatccttcatccatggacaaaaataaaggaagaggaaccaatactcctcctgatgaatccgccgtggtgaaggctgccgcctgggcatggtaccaccacggctcgggatcagaaggcggaaactcggcccgcgaatacgacgtcgcgatgatggcacgccacgttcctcggccctctcgatacaagcaagaagccacaaagttaagggcaaatgttgatcatgatgtttcatcaaaaccaacggtagagtgcttatcactctttgactcgtacgagctcagaagaatttcaatgcagttggattctcttatggattgctctaatgatgaggaatcattctcggataatgatagtgttattagcagcaatactaggaataaaaagaagatgaatttgaagaaactgataagaggattttgggtaaggcatgctgtggcggtgtgtagcactggagaagatcaagtggtggacttgaataagaggccggggtatcgacaccgtccatcgcgaccggtgacccgtatgcatgcatcctccaacaaatcgcccctagaattatgatatccatggatactattatttgatttgaacatagctacatattttgtctaataatttcattgatagtagatctacatatctacacttttgtgtgcttaattgtaagaaaaatttatataatttaatttttacatcagttagtaatattctctaaaaattatttttttaaattagatgagaatatttagttacactaataattttatcacactctgaagaagatgctagacactaataataccattaccaattctataatacaaattacatattagaaactttattattattttattaatacaacagtaagacaaacttgtgacatcaatagcacttgaggtgcttgtgtcattattacgatcaagcgatgaaataacatttcatccttatttcttacttttcaagtacatgaagaactacaagctccttactcttgcagcctgcctgatctgtattggccatctaataaataaatatctataaacaacatttctatatatatttttatatatactagttaggacactcgtgctagcaccgtgagatatatttatttttaaaaaaaaattaattattttgaaggaaaatataatattaatattattattaaaatatttttttaaaccaaaata

SEQ ID NO: 164345 - DNA, 1982 bp, Cannabis sativa
tctctctctcaccatactgctgtccccactgctgtcaccattcctctacagccacctgcctcaccaagaattgaccccaatattcccactcaacctgccttgcccgtttccatccctaccaatgctcaacatgactcaagcaacacatccaaacaccctatgaccacaagatccaagtctggcatctttaaaccaaaagcccttgcagctgagttaaatgactatgaatgttatctcaaagaacctacttctttaaaaatggcattaaacaatcccttatggaataaagccatgggggaagaatactatgctctaaagaaaaataatacttgggttctagttccctaccatcatggcatgcatgtaatagacaataaatgggtgtatcgaatcaaactaagagctgatggaactgtagaaaggctaaaggctcggctagtggcaaagggttttcaacaaactgctggtgttgattatgttgatacttttagcccggttgttaaagctagtaccattcgcatcatgtttacacttgcagcaacctatggttgggacatacaacaaatagacataaataatgcctttctaaatggtgacttagaagaagtggtttacatgcagcaaccacaagggtttgaagatcccaactatcctacatatgtgtgtcaattaaagaaagccttgtatggcttaaaacaagcacctagagcttggtatgagaagctcaagagtgcattattagcttggggattcaccaattctgtctcagatagcagtttgtttttcagcacttcaaatggcagtcccttacttgttttagtgtacgttgatgatattctcatcactggtgccaattctaaagctgtcaacaaagttattactgatctacaagcccaatttgctctcaaaacactcgggtcagtgagttattttctgggatttcaagctacaagaaccgacaacaccatctctttgtcacaatcacaatatgcattggatatcctcaaaagaaccaacatggacacctccaaatcatgcattacaccagcaaccccaggatacaaattatacactgctgacagtcccttgttcgaagatcctactctatacaggagtaccattggctccctacaatatttaaccatgactcgacctgatcttgccttctcagtcaataaactgagtcaattcatgcaaaagccaactgttgcccaatggaatgcatgcaaaagggtccttcgatacattaaaggcacacttaacatgggactgatcttcaaaccagcaacatgtcttactttagaggccttttcagatgcggattgggcatgcaatttggatgatcgcaaatcgacaacaggttactgtgtaaagcttggaggaaatctaatctcttgggggtctaagaagcaaaaatcagtggctcgatctagcaccgaatctgaatatcgatcactatctaccactgcaacagaggttgtatggatcatctctgtgctaaatgaattaggcataaaaccagcaagaacaccagttatatggtgtgataatcaaggagctcaacaactagcctctaatccagtttttcattcccgaacaaagcacattgaggttgatgtacactatgttcgagagttggtcactgaaggcaaacttactgtctgctatattcccactgaagagcagcctgctgacatcttcaccaaacccttaactcttcctaagttcaactttttatgtaacaaactgtcactgggccaatcccagtacagtttgaggggggatgttgagatacagagtccatatggttaggaagttagttaagggctgttatagttagttactaacagttatactgttgtacagttagttagtgtgttttctgttattattacttctgtataaataccaactcttgtatcataacagaacataacattgaataaagaattccttttctcttcttgcttctctctctgttt

SEQ ID NO: 164346 - DNA, 2153 bp, Cannabis sativa
catactgctaaataaggcattgtgcaaatgcccttggcatattctcttatgtggctgtttgtaaactgtacaaaaaatcttgtagacagttttttttttttttttgatataaatttttaaaactataagcaatttcagtttctgcatgcatacactgcacatcataaattaaactgaaattaagtgctaatggattcttatgtcttgttgatgattatttgttaagagaagtattttactttgtcttagtatcttttcttttcttcatctgcataataatagtatcgtttatgtgcatttctgcaattgaaagcttagttgcttatcaaaaatgctcacaggttttggttccgcacatttagaaaacataatcttttactagctgcatgaaaaagcaaatgaactattctataatgtcttctttttggcttcagggatgattacctggatgcccatgtgaaatttttggagggtcagggtatagctggagttagccatcacagtttactcttctctaaggcagcccctgcacgagacgtacacgaagaagaggaagtgactaggtgagctcatttacttttttcttacccttcctacgtgtagtctaatgtaacagtatttggtttttgagaaagaaaagaaccaaacttgaattattcttaaagtaattctttcaatccccactgttgaattcatattagatctttgcaagtatttgactcgtatgaacttttatttagctgaaagtaatattttgtgtcggaaactgtgaaaatgaatcagacatctatctacagttattaatatgggcttgttattttgagcacagaaaggcagggtctacatatatgggagcttcaaagtcaagttcgtcagttgaacggagtgttgatgggtatggggaccgtgttttgtatggaccatacgatgatctctgtatttagtaattgatttttttattatgttgttgcattatggacagtgctgagtacgccttcaatcccaaggatgtaaagttaaacaagaaaagttcttcaccagatagtggtggcaaactgacagaatcagagattaaagacaagatctttcggctatctaaaactcttgcaaaccaggtacctcattcattttcttttcttttacacatttttatttttgcactttctccccgagtatatataagttgtatattattacacagtagcttaaaagaaaaggaaaaatgtcatctttttctttatcgaaattaattttaacaattggaatccttaacacgaattaaatcaaataatctatacaggctatgatctcaagattaccagataaaggagagaagatacaaatgcatattgtggaattgaatgctgaacttgacagaattaagatgggaaaagaatccgaaaagaaaataattagtttggatgatttaactgacgaatttcagaaggtgataaatgtatagcgtattgctggacaatgtatagtaactattttgttgagaattctcttctcaatccatgaatcaactcaattcttctccagttaagtcaatatgttggtttttctcctcgagttcaatgttttggagatctcgcctggatattcaatgctgtctggcacatgattgatgtgtttatcttttttactcgataaatgctgtttatggtttcatcgttttccaaaattcttccacagatttatgttcaactgtcaatcttacaagtttgtggtaattttttttgtcattaataataatcacaagggaaatttgctgcaaaaatttctcaaaggtttacttttatgcagattagtctttaatttttaaaaatagcggtaataatattcaagttatagattgttgtatgtccattagtcatttttctaacgattctttagttccaaaaaaaggccatgtgttgatattttattgtttcaaattaaattttcaattaaaaataattaaaaacacttgttaaaaattaaaaatgagcatttatcaatctcgattctcactccaagccatttgagcaaatttccaatgaatgcttgcctaaatgaaaccttgatgtgagattcctgcagcccaaagcttgaaggtacctgttcatattttttttcttcttctttttgtttttggttctctctctctctct

SEQ ID NO: 164347 - DNA, 2025 bp, Cannabis sativa
ttagtaaatcccttggcaacaagtattgctttgtaccttagaccctcactccctggtaatccttctttttgtttgaatagccatttgaacttgattactttctagttttctggtttgttaaccactgtccaagtcttgttctttttaagtgatagtttctcttccttaatagcctgcagccaagcttcactattcttctcagtaattgcatatgtgtgactaaatggctcagcactatctatgccttcagcaacactaagagcataggtagtgaattcagcatagccatatttattaggagcttttgtggctcttctttctctatctctagctagttggtaatttttgaggctagtttgagtgtcacttacagtgctatcttcagcaaggacttcattaatctttattggtctagatgagggtgtgtccacctcaatttggtccttgttgccgttgttttctgatgcagtaatcataacatccctttcataacaatttcttcctcgttgaaaaccacatccctgctaatgatgcatttcttgtgccctaattctaagcaccatagcttgtagcccttcacaccatcagggtagcctagaaacatgcattttagggctctagattgaagtttatcctgcctctagtgagcataggcagtgtaaccaaataccgttaggtgatctagcttaggtacatgaactgtccaaacttcttgtggtgttttaaacttcaatgggacagatggacacatgtgcactaagtagcaagctgtcttaacagcttctccccaaaagggtctaaaccagcaccctttagcatacactttactctttcaataaaagttctatttatcctttcagcaagaccattttgcataatttgaaatttaatggcataccaaatcacgacattcgacttaaggaaggtgttccattaatgctccttagaaatcaaacataaggcttatgcaatggcacaagattgattgttacacatcttgggaaatggtccattagagctaacattatttttggaataaatattggtgaaaacgtcacaatcctaagaattatcatgtctcccaacaaatcaaaatggtcattcatgcttaatagaggacaacttccattagcaccatgttttgctatgacaataaataaaagccaaggacaatctcttaaacatattggattatatctccctaagcaagtatttacccatggtcaattatatgttgctatctctcgagtcactacaaaagaagaatgattgatcatactaaacgatgatggtgagatgaaagatagaaccttcataaaaaatattgtttacaaagaagtatttcaaaatattatttaaattatattttatcataatattctttcataaaaattaataacaataactaaaactgaaatgtatccttgaattagcttctttactttttttttttttttttttgagtttatttatagtcaagatacataaataaatatgttttctttttaaattttaaatatattagaacattatattctattctaaaaaaattcatgtatatgtagtaataataataataaatcattggtaaacaattaaagaaaatgttaaatagtagaaaatatataattaataagttattattttattttatttatcttctatatgtataaatttaatttaaagtgttaattttttctaaatagttaatttatattttataatacatactttagattatgtattattagagactatatatgttttatatattatttatcatttattttgttttttgtgtatgtataaaattaacagggtgtataggtgtatatatgttgggaggccatggccactcttgccatggttgtggctccgctcctagacaagcatgatacaataataagttttgtcactcttaaattaaaaaatatgttattagtaaacgggtacatatatatatttggaacacttttaatgggtattactcataaatagttattaacaaatttaactataaatatt

SEQ ID NO: 164348 - DNA, 1832 bp, Cannabis sativa
tcacttctctctcagctcaagaacactggtttacagagttccttcacataaatatctacctatgtataaaacctatacggtacaactattttaaattatttaatgaatacttatattgtataaacccataaatatattaatatatatatctcatacaaatattttttaattatggatgacatcaactgattcaagaaaaaaaaatcactccaactgcccaagtatggttcccgacgataagattagagttgaagggatttatagtattgtcgttgctccagttagctcctttattaagccacatactttggttctctaaccttagtatcttatattaatctctctattcttcatctatatatataatatgcttttcttagacatgtagtatacattattgagcttcacttattttaagtaaatagtataaatttcaacccttgatcaattctttaatttgtgaagtctttgctttctattttgatcgagaatgaatgtctaagctttggtgttggatgagaataattgtaaaaaaaaataaattttttattttgttttgatagacataatcaaacccttaatacatatgtattttttttcctatttgttacaacttaagtgtaaaaatcataagtttaggttttatctagaattttagttaaaaattgtaaacatatacatatatatatattgagaattcatctcttaaaacaatctcacttatatttgccaaaggttcatctgttcctttaaattcattcgattatttattcttataggtaatatttatcaagtgatatatttatattaccacatgttcatcttttttttttttaattcattaggattgtttattcatataggtaatagttaacaattgatatattatttaaatattatatgagtgtgatgagtgcacatttgtacacttattcttagtcaattattagatagattagtatttatttttgtatagatttgatgtgttttctctaagtgtgtaggtttgtgctaaaaagatattttgggatggattgagatctttgagcccatttttgacaatgatttcatcattctctcgaagagcttatgaagcctaaaatgatagagctcattcccagcttttcaaaacatgttaaatcatctcatttggagtctggacgcaaaagttatgcatgatttactgagcaaggtcgaagcagaaaaatttggtgttgtgcgctatagcgcagggggtctatgctatagcgcctggctagaaaaaaaatatttttttacgagaaaaagataatttcagcatgacttcgggattttttctcttaggcgctatagcgcaggatataggcgttatagcgcagcacttatcatttttttttgaaaaaatcctaattttaagaggattgatctatctttgttggcctatataaagaagcatgtaaatcatattgaagaacgactggagagatagaagcaagcaactttgagattagaaaacacattgaagagcaagagagaagagacttcaagcaatcatcattaactttcatcattaagagtttttttcttcttcttcgtctttattctttgtttagttatttaattatgaacataattattgtggttattatgtttgtgattatgaactaaacactcattttagagtgttgatggaactattttagattatgaatttaagtttttagattatttccatatttgttcttattattaatttgtttatgcaattttgtgctaattatcatcttcttaatgttagggtttataaaacacttaagaaatatataaatcatagatctaaacatattcctaaa

SEQ ID NO: 164349 - DNA, 2831 bp, Cannabis sativa
aaaagtgcgatatgggcaagtaaacgttgtcttctcttaatcctaaggtgcaataatagctatttggtaatacacaaaatagccatctaggaaagagtaatactcttaacccaccaatttatccaacatttgatcaatgaatggtaaggggaagtgatccttccttgttgccttgttgaatttccgataatcaatgcaaattctccacccagtaacagttcttatggaattaattcattcctctcattcttgactaccgtcatttctcctttctttggtaccacttggactggactcacccacttgctatttgaaattggataagccactccaacatctaaccatttgaccacctcctttctcactacttctttcatgggcatatttagtcttctttgtgcatcaatggttggtttgactcctttctccattaatattcgatgcattatagttgaggggttgatcccttgtatgtcggccaatgtccacccaatggctctcatgtgcttcctcaataccctcaacaacttttctatctccacattagaaagggaagctgacacaataaccgagagtatcttgttctcacctaaaaactcatatcagttattaggaaggacttttaactccaattcaggtggcttctcaatgaatggcactgactttgttggaatcactctgagctcttcaaattactttctgttcaatggcccataagaatcaagccacaaagcatattatatcgcctcctttccatcttggtcaaccacatagtgtcgcactaaagtcaaattgagagggtcttcaataggcttcctagtttccaccaacttgtccaccacatcaaccgaaaaatagttgtcacttgttcaggataagtatagccttgagtacattgaacacaatttcatctccttgtactcttagctttaactcacctttttgcatatcaattaaaacttggcctgacaccaaaaaggttctcccaaggataatgggaacattactatctttctccatgtcaagcactataaagtcagttggaaaaataaacttgtccaccttgacaaggacatcttcagagttaccccatgttgcttgtgtagagcctttgaagatgagggatcttgacctgatgctcaatgctaattggaggagatagaccttcagtagtcttcttttcctcttctactgatgcttgtgcatattgatcttaaccctgtttttcaactgacttctattgactcgacccagcatagttcttcccactcttaaatgtaattgccttgtatttttcttttggattcgcttatgcagtactaggaaaattaccttgagttcagctagccaattgtctcacttgattctccaacgttttaatggaggatctagtctccatcatgaattggaacaatatatctgcttgaacgtttgactctccactagtacttggttgctgagcaggctattgaggatttctttgttgtggtggcctatttctctgctgaaagaaaccttgttgaggctagccagatggctgcacttgaatataacaaagaactccatcaatagaaggatagtcaccaaccttctggtatctaatatcttgagatttctccattggaaaactattcacatcaactggacaactattataagagtgaggcccaccatataactcaaagattacctgggcctgttttacttctgttgtcatcatcttagttagggcttctacttgggatgttagctttgcaatggcatcaacttcgtgtaaaccatctactttatttgattggcttctctcacttggccattgttagttattcatggccatctcatctaatggcttataagcctcattagcacttttgttcttaaaggctccactagaagcggcatcaatgagtgtactattagtactagtcaactcattgtagaaagtgtgaacttgcatccacttctcaatctcgtgatgaggacactttcggatcaggtctttgaatctctttcaggcttcataaagggactcattatcttgctggatgaagtaattgatctccgatctcaatctaccaaatttggctggaggaaagaacttggagagaaatttcagggccaattcctcccaagtacgtgttgatggatttaggtggcaaagacacaaactaactctttgctcgatccctcagcgagaatgtgaacaacctcaaacgaattgcatcatcgctaaccccattcatcttgaatgtttagcatagctcctcgaagttagcaagatgcatgttaggatcttctaatggcggtcccccaaactatactgcgaatggaaccatttgcagtatggtcagcttgatctcaaagcagttagcttcaatggcaggtggtcttatacaagattgagcccccattaaattcaggaacaaatagtccctcaggctacagtcaggtggattacaaccattagcctagtcttctatggcacctccattattgtcgttattagccatatccacttcttgttcaacccctacaacctttctttctaccctcttgtttcttctacaagtcttttcaatctcaggatcaagaagaactcttgctcttggtcattgacgccacataaaccagaagtacctgaaataagatgagaaaaatttaagaaaaataggtcagcaagaagtataaaaagaaaccaaagtacaatttaatctaattaatgcaatatcaattttttttcaatcaattccccagtaacgttgccaaaaacttattgtgtattttcttctctatgcaagtgtatgtatcaattgtaagtatatactcacgca

SEQ ID NO: 164350 - DNA, 1454 bp, Cannabis sativa
acccagactcggatttgaacctgcaccaaacctagacctgggacccgagatcgatccaaactcgggcctgggcttgggcccaaacttggattcggaccttgacccggacccgagacttgaacccaaacccgaactcagacctgagacccaggactcggacttggacccagacccgaacttagattcaggacccgaacctgtactcgaactcagatcgggacccaaacctggacccgagatccgaatcttgatccaagactcgaacctagatccaaactcagaccgggacccagtattatattaaataatactaaaaaaaattaaaataaatataaaattatatgtttagatataaattaaattaaaattctttttttttttaaaaaaaaaaaagtcgagtcagatcagatttgatccgaataagtcagattagattcgatccgaataagtcgggccgggtttgatccgattcgtgtatgtacgtgatctagcagggcgggacatgatgaatcattacatgatgatctagatcaagttggattatagatgaatcggatacgacctgatctatttacactcctacatgagaacaaaacctcaatcaaatgacaaatttcattttgcaagttaccgaagcactttcttttggtgacaatcttttgatggatattgaatttatttggctgggtgacattttactatgtctaatcattaggaaaattttatttacacccaaaagatttataaggacatcctattttaataatttttattttatataaaatttacatctttaattgtactaaatttttttaatttttttcttaaaaaatatacctattaaataaaaataaattatattttaaatattacgacgaaaaaataaaataaaaaattatataaaaacttttttagaaaaaaattaaaaaaaaatatgtaaataaaattaaaataagtattgaaattaacataaaataatgtaaggaattttttttttaaaaaaagacttacgtgtaattttgaaaaattatttaagtttattttttttttaaataatgaggtttacttattattttatggggtgcaaataacattctcatactttttttgcttgtgaaaactattattgtacttttaatttactccatgaggataaattgatcatttaataacattgagtaaaatatttaccctattctactttctctcaacactcatctacaaatatatatttttcttaatccctgggaggattgtaaaaaaaagactaaatagaatttgttaaatataataatatcattttaaaaagtgataaatatttttgtttaaattaaaaagcaattaatgttataatttttcttatttcaaaggaaacatataatgtacttttaaaattaaggatggtaaataaatcaatattatgcactcctagtttcaagttttttttttttttt

SEQ ID NO: 164351 - DNA, 1467 bp, Cannabis sativa
  modified_base (1413)..(1433): a, c, t, g, unknown or other
gtcatttgagagacactttgtaagaagcaaactccaactccatttttttttcaagggttttatccctgttttgtacctatgttcagatcaataaaactcatcaccacaaccatgattaaggctgctttctcccgtaaattaagctcatgatcacattgattgtgtagcccaaccatgtaagttctaattgtcttttactgctttcattaagttgttttactggtttaagttctattttatgttgctggttttatgttgaatgtgttcttgatctgtgtgtgttattcttggtgttgtgttggttcttgttgggagttcaagcctccacaataacaataataatgataattctaatcatattattttggatgtatataatttttatctcactcaagacctctgctaggtttgttccaatcttgacaaccttagtcgggtccactatgttgaggggaagttctttgagtttctcaattaaactaactcccgagtcattttccccaaaataggagtcaatatcatccccgtcttgggcgcaccttcaagtgactttaggtttcgtctcaatcttttccatagtttgatctctggaggtcttcatcatctctcaggcttttgtgggagaggccctgctcctcccctggtgccataacaacatgggaggtcttgttcgtctcttttgaagccatagcagtagaggagatcttcttggcgagtgataatgaagcgttataacactcacagacagccccttgattaccaaggagacaaccgataccagctatcgttgagatttgatagacaaatggtattctgaggagatggcttgaaggtcatatagaataggccttctgagcatcacattatatggagacttcatgtccaccactatgaatgttgccatgatggtcgtctactttagggcagtttgatcttgccacatggaggaatgtcggctccactgaaaccgtacatgagttgttcgtatggttccaggtcttctaaagttaaatccagtttgagtagggcttgcttgaataggatgtttgaagacactttgtcatcgatcattaccctggccaccatcatattagctatttgtacctcaacaactagaggattgttgtgagggtagcttacatgataggagtttgattctctaaaggtgataggttcacatccgtagcgttgatactttggaggatatttaactacctctaggactttggctcttggtttatgtcgaagtgatctagcatacatttttaaggtcttccttgaatttctagctatgataggacctccaatcatgatctctagcttgcctgcaactagcgttggctagagaggtacattgccctcaggaggaggttcaggtcattcataccgctaaactgttgggttttatgcccnnnnnnnnnnnnnnnnnnnnntaatcagatttgcttattaatatagatcagaaat

SEQ ID NO: 164352 - DNA, 1551 bp, Cannabis sativa
gtggtggctttggaatcagtagctccgccgccaccaccgcctccaaattccttcccaaagagtctaattccgcccttctctttaagtggggcgggtactggacgtatgaaaggtagctgagagaatgactccacgttcatgaaatcatgagtctctctttcggacttgtccatgaaaattatacaaaaatatattaatgtaatattttataaaagaatgaagattggtttctttttagggttattaagaagaagtgaaagaaagaaagaaagagagagttttaaggtttatgtgtgtggtttttgtttagaggatagttgagtatgaatgaattgaatgggtttgggtagtgaaagaaaagaaggtttttttgtgtgggacctataaaagagaggggtgttgtgtagggatgagtgtgatccgacgacaattggggctgacccatctgagagtaaagcctgacaacgccaagtttgagagtggcttccctagcttctctaactcaaagtactatcatctatcttaattgcatctttgctaatatcctttcacttttttctttgttttttctaaattgtttcataatcgaaagtgatctctcctatacatatatactgtgtgaactcaatgggatcccagttttcatgtcttattcattaattcattagttttcaaaaatatatatgtatgtatatatagtgttaacattaaattcaagagaaacaaagaataatttgtggttgaaaatttatcgctattatattaattgaatttcacatttcaatatatatagctagtactatattgttcaagtttaaaatataattatgttaataataatataaatattgataatattttgttggtctctaagacttcactgtatgttctttagttttggtttaatttttgatagatttaatcacaaattttgctttgattaaagatgtgatatggctactattaataaattggacatggtgttaataattactctcatcatgtgttcatgaactagtcatatataataaaagagtttaattattattttgtacttaattttttatgtgacatattgcaaatttgacaaatttggttcgctatgttcacaaatttcatcaaacaatataacatttatctgcctacttcaaacctagctacaaaatatatattaggcacaacaatgttaaagagaatttattattacacaaagagttgcgttcccctttggcaaaaaaaaaaaaatatatatatatataaatattatgcttatatagattttcatttttttttttgtacaaaagagctaacaaattagaaaattttacatattttttttttagaaataaatacataaaaaaaatacaaaaaccaacttttattacaaatatactttcacaagactagataaacttttgtaccttatataatattttatttaccaaaatacattgggaaatttgacattttatgcttaaaaatgtgtaatggtgttaaattataccatcatcctaagaatttggtaactatgccaatcttttaatggtaacc

SEQ ID NO: 164353 - DNA, 4843 bp, Cannabis sativa
  modified_base (1863)..(1864): a, c, t, g, unknown or other
ttcagattactataataatatatataattatgggagataatacaataggtgtagtttttacctattaataagtatagtagtttatagttattgatttaatcaaattgctcatttttgaaaacttaaaaataattaataatttttttatttataattaatttcaaatattattaattatctctaactaacaaaactacacacctaactccaaatctaaatattgagaatgacaaaacacaaacatgaaaaaaagagtctgcgctcaaaatgctttgaacatattaaattgcagtatttttggaatagacaaagatcgacagaaatgcaaaaaatattaatacattgatctcatatagcaagaaaacaacatcgatcgcagatctcatcaaacgataaattgacacccaaacttcaccgatctacataattccacacattcgggatctcacacgatataaaaaccaaaaataaatcaccacaaatctaatccaacaataattctaacatcaacaacatatcaaatgaaattaagacaacagttctgagagaatcgtacctgcatattacacttgacaaggtcaagaggagtaatagccatgtgagtgagtccacagctgaggattccaccgacagtacaagcggcatagaaagcgagagcgtacatcttgatcttcctaccagactcaactggagaaggaacaacgaaagctttccttggagcaacaacaacaacttcgacatcggaagttgatggtgaaacggtggtggtagaacgggcctggaggattctctcgacggccatggccttagtggaggtggaagagtataggtagctagggattagagattgacgcgaggattaatcggagaacgtgacggacggcgaagagaggtgacaattttgagctctggttcgaaatggggaagaagaagaagatttggtggcggtgctagggtttcgcagtgagtattttgaaaactcaaaatgagtttcagggttattactctgattaaaaaaattggggttattacaaaaattaaatcattttgctttggtggataatagtcgtaaattttttaacctctgtttacaaccgaattcaaagaaattggcgtcttttttccactaaagcaaaatgtaaaagacaatttttaaattttacactttttccacagttcctcttttagcgtcacgctaattattttcttttagcttcgattatccactgaagcatataatatttacctattttttgcctcagtcaaccatttttggtgagacaatttaatgtgtgtacctgattttatgatattttggagaaaattattgttgaaaatttgttgttctgtataatcagttttgattctgatttgtcttcaagctctgttttcttgtttaagcagtcatgtttgcattggtttgcaagttcttgttgctgaagaggacgattgggaggaaatgctaaggtcactgaagctggagaagatgatcggcgatggtcgttttcactcgatatcattggtagcagtcaataatggtggaaaaacaagagaagaagaatgattttatgtttttttttttaaaatcaaatctcttagaaataatcgcagatgaaggagagatcgttgataagagtgattcgcaggagaagatcgtcactttgaggagtgatttgtggagagagattagactctgttatgtttgaaaaattatgattttttttaaggtaaatttattggaataagttgaaaaatatctctttttttatccattaataaaaaataccctcatattatattttattaaaatatacccacttttttgagtgagtgacccaatatataccctcactctctacttanntctagcatataatttacattaacttaaggggtctaatggggttatcatctataaaagtgggtatatcttaaagaatatgaaaataaaggtaaaaattaaaacaagtaaagtaaagtgggtataaaatataatttcctcaaatttatttatataagatttgattttccacattttgatcattaaatattttctattcccatatttattccaattactttttcttttgccataaaaaagtaaactacaacttaaattctcatatttagaaaatttccccttaagcatatgtgtacaaaaaaatgatttgaatgtgacggtaatctgatggaactgcacatttgactcgaaaatgggccaatcagactgccaacctgacccaaaaataggtctttaatcaggctaaatattaaggggtttttacaaaaaaaaaaaaaattactgaaatttaggtaaaattttacaattttattgccacacggaaatttttacaaaaatattatctttttataaaataaccaaaataacaaaacagaataattaaaaacaacagtggaataactaaaaaataacagtaaaaacttaacacaatacacagtataaaaaatagacaacatttttgaaaaaccccaaatattaacccaatcaacccaatccgggcccaacccgaccctttataaaaaagtaaaataatttaagctttacgcacatatttgggcctgctactttcttccccaaacactaatgggctgtttggtatgcatgtttacttacacaggattgggaatttaaagcccaacccatgttttttttttacaaagtgattagaatcactcatgaatttacgacgcaaacgtccgccaccgacgctggaacctcctcaaacctggatagctcatcgtcaaaccgtagagcatgctttgtcaaaccatgggtcgctaaattctcagagcgagccacatgggacaaaactgcccccggaaatttaaacaataaaactataacatcttcaaacaacgctcctagctcattgaaatacacttgaaaaatagcaaaaaacccaaaacaaaatttttattagaaaattatccaattgatcaaaatttaccaaataacaagaactaagcaaccaaaatcccactaaaaattaataaaactagccaaagggaataccctttggctagtagcaactgaattatagcactctatttcataactttcttaaagtcactatcccttactgagaccttatcatctaaaataaatttagtaaaaagcaatgaacctaaaccctactatctgtataatgaaattaccacttgatccatttctattatatcaatatttaatatcacatctcccattgattactaaatccccatacttataatttatacaacaaggcaaaattgttttatatatctatttttttagtaaaaatcttatttatagtcaatacatactaaattaatattaattaataaaccataattcaatttggtttcttgacataataattccttatttattatttaaataaataggctgacaaatctcttaaatattaggccattcaatttattataaaaatttatttaaattggcatcttcttatacaactaaaaaaattaaaaaaaaaaagcaaaaaaactcaatactacattagcctttactgcacattatttcaatattttccaataataaagtaaataaaatattctcaattcactattaatgatcccatctcttattgattacaaaatctccacatttattatttataaattttatacaccaaactcatatttattgtcatttgtaatttctagaaattgaaataaaatgaattagctaatataatcactatctaatttgagtattataatttaatttttctttatttttgattatatatctaataatagagccctcctaattatttatactactctatttacttaattaatttccatattatatcttactcataatttttacaacttccctatttgtaaattgataaattccaatccatcctaattaaagattaggccatcatatctattactatttaaatctttaattctcttaaataatacctaaatttttttagacatttccttaaatcataccaagtcacggttattactatttaatctttaatcctcttaaaaaataccagattcacttaaattttttcttaaatcataaatttaccaaagtcaatccttttagaaccaattagtaaaatatgtgcaaatacttttaactttaaattttatattattttatatttcatgatatcttgatattttactctaattaccctaaataattagattccaggcatataatagccgtaaaaattttgaaaagcacaaaagtcataactcaactcattcaacaaattagtactttcattccttaaaaaataaaacaaatataagcagggaagaaacaaaaaaaaaaatgccataagacgaaacggaatcacgttgctataatgagtaaattaacatcaatccaaaccaaatgatttagctggtagcttctagctatactgcgggctggacttttagatgagacaatgtcaaagccgtatacttggttgggactgatctcagattagaattgggaacaaaaaccaaagcctactacaatattcaattttagtccattacttcaagtagacccaaagatttcatttattgcactcacaaattcatccttctaaacttcaaaaaagaaaaagaagataaaaaatctcctttggattatattttaacaaggtcaacgaaaattccaatctcagcaatcataacaaaacagatcttacgacaaattttcaaaacttcaggatttcaaagaaaaaacgaatgaaaaaaggagtcctacgtatggagtaggctatgttagacatttatatgtataaactgaaatatatatgtttaagtataaagtgcggaattaatcaaacatata

SEQ ID NO: 164354 - DNA, 1257 bp, Cannabis sativa
catgtaaattttccaaaaaaaaactacctaattttgcattagcatagaatatatgttgattattccaattgacacaatatatatatatatatatgggtatatgttagttcaaaactgaggcatgattaataaaaataaggaactttttaatgttgtgcacgttttcttgcaaagattaagagatcgagaaccagctgaacttcgtatcttggtgcatgttatttttgagtacttttctgagggatttatttggtatgtgcgtgtgagatcgtgcatatatatttatattttggtatatgtaacagatttcttaatttattactagctctaaatttgatgtatatctagttatccattgatcgataataaaatattataacttatttttgaatctgaatttgatgaggcagagtatttggaactaaaaaaaaaaaaagaaaaacaattgaaaacgtctcaaaattccccatatattataatcgtacgtgttgatttttctgggcttaattatattgtgtttgatttcttatgttgagtctaaatccttcctttctttcaatactacatttcaatggtacatatgatatcatataatatcactatatatatatatatgtatataaaaaaaaatgagaaatatatatattattaattaagcttctattggatcgttttattttggaatgatataatccaaaaggtatttatttatgtatataaaaatataaaacacaagagagcatatatattcttcaactgggtgtgccagcaaacatatacttatcatcaattatatacatatatatatgatattgatactcatggaaaaacgccatttgtttactttctaaatataataattatggtttattaatttgaatcaacaaacttcataaccctcaagtatatatgcgatacatacataagtatatatattaatttatggtttatcaaagttcatgatgtttaatatatattatacaaataaatatataatataattgtgtacgtgtgttgaaacttgataatatatagtaattaaggtgaaataagcattaggttttttgttgattgaagaaacggatttagttggttaaaatatagaaataaagcaagcatgtaacttgcgcagctataatctaaattgtttttatttttatattataaactatatctttatatattaaaagtgcctatttaacggcaattcttggtttaactgaatatgctttacaaataaaagaatattctgttaaa

SEQ ID NO: 164355 - DNA, 3131 bp, Cannabis sativa
ttatctttcatctaagcatattgaatatgatagcttcaatctcattttattaatgagaactcttaaaaatatcaatggtgtaatatgttttaagtgtcatgttgttattggtagaattaagtattaaatcccaaataatttaatttattcattatgataatgaaatatcactaactatttgtaagacgccaccttatgataaaatactcttattctattgatgcaacataatttgaaagattgtaatattttaaacttattagttttatttaaggcaatctgaaatcaaataagtaaacttgggactgttatggatgacaatggtgcaaattgggaacgattgttcaattatcaccctatgcctaagttatttatataaccatatccaccccgttaactgcaaggatggcgtggtaagtaggcaatcaaataatggagaataataatcacggttacaatatagactttctctggtctaacttggtagtcgcctaccctaggtactttctttctcaatttcgatgcttctttttccccttctttggttaggcttcatgcaagtactttgcttggtgttttgttgggctttcatgagaaatagtttctatagaaatggtcaaggctcctattatctatattactattctcttgattgaacaactgtcattaccgcgtctaatggtgagattatctcttgtacaaaagcgaatctcaaagattatgccactattatttcgtacatcaaaacttgcacatttttttgctgagttttatccttcataatattttctataatcgtttaaacattttttggttaattattgttgcccttagttaatgttgacgcaatttttcatcaacggatctaagaagatcgtagacaagcgagatgatcacagatgatcgtcgaacaaagtaaaccagtttaccgagaagaaatttaacaaagatgaacacgagacttttatagtgattcaccccctttcaacgataataggctagtccacttaaagtgttattgatctcaatggttaaggagagttctccagatttatgttctcaaagagttcaatccttaactgagtttttagaatgagagagtgagaatttacgagaatgagagttagagtcaaaatcaaggtccttttacaagtgacttcactccctttatataggtttacattacgggtttaaaatcttttaacccaaagtgcacctcatcctatccataatcgggataagtttaaaatacaaaatgataacaaaatcatattttaaaataaatatctaagaaaatgataaactatcgaagatatctttagttaacatgtgttggcttgttccgatcatgagaaacacatgtatgttgatgaataacacataatgagaccatgatgttgatgagtcgtgaggagcacgtgttgaagtgagaaacatctcagctagggccaagacgatgactttgtgttgtgatctcagttagggtcgagatgatgactttgtgctgtgatctcggttagggcccaaatgatgacgtgatgttgtgatctcggctagggacgagatgatgacttgaagtggtgatgatgccttcatgaggaggatgagatgatggtgtgagacaaggccgaggtgatggtgtttgagaaaaggtcgaggtgatggcctttaagacaaggtcgagacgatggcctttgagataaggctgagatgatgagctttggtctgagatggtgagcaatttggtacaaggtgtgcattggtacgaaatgatgagatttggtacgaggtgatcatctttaagacaaggttgaggtgatcatctttgagacaaggtcgaggtgatcattttggccttgagccaaagtgatgttcttggccttgtgccgaggtgaggttgttggagtgtgattcttgaccttggtctgagatgatgccttgatgatgtgcatcttggttagggtcgagatgatgccctaatgaagagtacaccaaccttggggaaggtgagttgacattgtgccaccacctaagtgtaggttgaggtaatgaggcatgatggttttaccacctaggtgcctaaataaaatgttatattgttttttttgcaaaatcagagtataacaactaatgttttggctaatgccctccttttctctttgtttgtttatttttctattgagttcccctaattttatcaatcattttaagttttcactcttattgtcaatagttacttttcaaaaaaaaaaaaaaaacttgtttaactttgtgtaaaaatagatatatggaaatacctagataactctgtgtaaaaacttatatgtggaaatacctaaaataactttgtgtaaaaatgtttacattcttttgtgaaaggtagacaatgaaagtttctcatgaacaaagaaaaagataaaaacataattttgtggggaaaaaaaggaactttgggaagttttagacaccaaaagttagcatcaaccattgttatgttcttaatctatatttatttttgaaaaattaggggaagaaaacataaaaagaaaaaattagcatggtctaaattttttgagcaatttacaataaaaaaattttgatacattttgtgtatacttttaaaattagcatggttatttttttagcaatttacaataaaaattaatacttttagtaatctatatttttgtgtatcttttaaaacttcctaaaaaaagcccctaccctaatactcatgttataggtttggattgtaacttgataaactttttcataaattctaaaaaatgaaaaatggaaaagtgaaaatcttcaatttaggaaaacacaaaataataataataaaaagaaatcgtttgcataaattgtaattttaataattttttcacaatttataaaaaagaaagaattttaaaaaaaggttaaatcttttcaattttcccaaaaatttgggggggaaaagaaaatagagaaagttgggttgccctaaaaataacagaggggttatattgtaattttccatgaaatttttaaggagagtgatatttgcaccccttaaatttataaatacaccccattattaaaaaaaatatgaacttaaataattttttaaaattaatcttaatattttt

SEQ ID NO: 164356 - DNA, 752 bp, Cannabis sativa
gtgatggcttaaaaaatcagcctgaaaaagataaagggatacaaactaatgttgaagtggatgaggtgtcttttaatcacatgttctagtaaacttttgagcctattattaaagcccataccaagaagacttagaagcatacagaaccaataactagttgtgctcttagtggcttcccaaaacttggtttgtctcatattagttatttcatctaatgctagttcatacaactaataaaaaaagtcctcgagttagtgttggaggaaaacgcaaataagatcatgaaaaaatatttgaagtaaataagaaaagcaagtcaacaacatcaatctctgcctctattgtaggggatgaagatctattgacaaagtctatggagttctaatgttgtttaggcagactcgccagacacaatgagtcttttacgttggagttcttggtgtaatgccctacttgcgggcacgctacagtgtcttttaattattgtgtactcttttgctaatcaaaatgatttctcaaaaacgtgataaattaaaactttaaaagtaacctttaactttaataaatacataactttgcataatttttgggattccgtttaaaagtttacaactgtattcaaaataaaattttcacaaaagtgttgcccagtgactacaaaataaaagcccatgtcgtcccaagaccgaacactctaggtctaaccatctcgatatgtacaatcatcttcaagctctcgactcactactgct

SEQ ID NO: 164357 - DNA, 635 bp, Cannabis sativa
tgtctatctttttaagtgtacatctttaatatgtaatgcaaaataataatactgtagcacataataaatttatggtaatacgaaaattttttgttagaaaattttttctttttatttaataactaatgtactatttaattttttttaccaataaattagttattttataagggttttactgtttttttttttatttaagttaagatctcttgggatatagtgtttaacttttttggctagtttgtgctaattttttggctagtttgtgctattttatttggcttttgtacaatattatttagctagtttgcagtatattattgtatcatttaacttttactaataaaattagttattttatttaaaaaaaaatgttagatctttacattgtcattttgagatatttaatatggcaataaattggctaataagtaacgttacaatcatacacgtgtgtgtgatattggtcacttctattgtacaattacaatcatacacgtggctaaataaaataacgttaatcacatgattattttagttcacatgttgcatatttataaatacaaactgacaaagatcacaggtgaccatttaaaaaaaaaaaaaaaaaaagagagagatcacattgagaaata

SEQ ID NO: 164358 - DNA, 2024 bp, Cannabis sativa
aaactgaggaaaaaactatcacaatcaagtattcacgcttgcacagcaagctctaaatataccaaaacaacaaataaacttacaaaggctttaaagcccaaaaccaatcaatatctacactatatagttttaatgggaatgtacgtagtacaatatgaatatctacactgaattcatcaaaaaaaaaaatatacatatatatatatatatatatctacacttatacttttaatgggaatgtaggtaacagtttattctattatgtgcaatatatagtctttagccatccatattatgtagacaacatcaagaagaactggagagaatacattctttcgaaatttagaaattttacttcttgacaaccaatgcaaagaaatgagattagtaggccgagtttacagagacaatcttaagccactaccagtttgcttcaagcgaggcgttatgacgaaaaaagttgcatgtatatgaataagaagaaaaatgttctcttgtgtaattttttattttgtgtgaaaatacctgatgagtattcttcatctttggtagatataatcaaattaaatttgcttaggttagagtgttacaattatcacatattgatttaacatattctacaagtgattatccattttgttttgcggaagaaattaagttaattcgacatgctatcatgatcacgaggttatatttgtttttcaaatttttttgttataaaatggttgatgtgacaaagttagaaaatttctgattagaaatcatagaaagttttgtggaaacttaaaaccattttttatgttagtccaactaaaggtggtcaatatacccatttgaaaatatattagggtactattagaaaaatgagttttagtgacccacgcaaagcaattaaagatttttagtgacccttcattgcaggtcactaatgtgggtgaataaaaaagtagtatatagtaacccttcagaattggtcattataacattttatagtctctttgtgtttatcactatagccttttagagttgcattctgccaaactctcatgatggcagcaacctgagcgtcactgtatctattattcccaagtcttttgtgaaaaaactattaattaggtatgttgaagaagttgttatgactcttttgatgagttcaacactatgaccagcttcaaatctcagccaaaaagagctggacttgatatgattgaaaagatgaaagggaattccatgaagtgtgttaaggagattgtggagatggagaaattgactgattatacttgtaaccctgaattcgaaattgaatataagaagttcatggctaaaaaagatgtgttcatgagtaatgtcagccaaaattctatgaatattcttgaggatgagattggtggcatattggagcattgtacaaagaaggcttgttgactcaatggctttacatttgcaattgagtgtccataggcttgtgaatgagcatttggaaagagagcttgtgaatcaaattatgggttcaaatgaaaatggattggtgagaatgttggaggagtcaccttcggttgcttcaaagtgagccaagttggatgggagcatcaaaaaaactcaaagagtgcaaggaaatatttgcccaaatcatggaccaaactcatcatcaaagctagttaatcttgtaatttgctttggcttttgtaatctagttttaagtatattagttataataatgttgtgcttttgtgttaaattattttgttattatatattaagtacatttaatgttattctgattattaattattatatatgttgtgtaatgcaaagtactctcttaagttatttcgcattatgtaatattattattagaagaatattatgttattggtttgtgttctataactctttaagggctcatttggtacgctgtattatagtgtattgtgttggattgtgttgtattagtattatttaatacaatactatgtttagtattgacttgtattaatagattgtgtaaagttaaaatatatttt

SEQ ID NO: 164359 - DNA, 541 bp, Cannabis sativa
atggaattgttcttatctggatgaagcattagagcaagcttcctatattgttttctaatagtgtcatcatctgctttgggatccacaccaagtattccataccaatctgtgactactccatttattttgttctcagcacaaatgtaaacctcaattgttaatatcaatttagagataccttcaagattgggatataaagtttgagcctttaatgcaaatttctttgcacccattatgtcatttgctatcaacttcttttctgctatctctttagctttaataccctcttctctattccactccatttatatatacttctcttctcactttttggcctgtataaattttttttttatatattgaattcaaagaagagaaattttgagatcgatatttcaaattaaatgtataatttctaaaacataaaatcgtatatataaacacactatgtcttctatatcaaaagaactgcatgaatctgaaaacataatatgatatgttatgtatagagagagagagagagtgagagagagctttacct

SEQ ID NO: 164360 - DNA, 2075 bp, Cannabis sativa
aacaatggtatcaaccattcctccactacaacagtaaacacaagccatggagtaatcgtaccacaatttggaagcactctaaatcagccctttgcacttaagttggacagaaacaacttttctctatggaaaacaatggtatctgccattgttagagggcatcgtcttgatggatacctcaaaggcacaaagcccagaccagccgagttcatcaccactgctgctactgaagatggacagcagagtgcagatctggaagttaacccagaatttgaacaatggattgttcatgaccaactccttatgggatggctctatggttccatgacagagagcatagctactgaagttatggggtgtgattcttcagcagcactttggcaagctcttgaagccttatatggagcacattccaaagccaaaatggatgaatacaggacaaaaattcagacagcaaggaagggctctctcagcatggtcgactacttgaaacaaaaaaggcaatgggctgatgttcttgccttggcaggtgacccatatcctgaatctttgcttatctctaatgttttgtctggtctagatctggattatctacctattgttttgcaagttgaggctagagcttcaacaacctggccagttttgcaggatatcttacttagttttgacaataagatagaaaggctgagtgctatttctggtgttaacaaacactccaacagttcagcagctcctaatgctaactatgccaacaagactccacactcaggagggagtcaagggtactcaggaaatcatggtgactcgggtcacaatggtggtcgaagaggaggacataacaacaacaatagaggaaggtttggcactagaggaagaggaggaagatctgcaggaccacgaccaacttgccaagtctgtggcaagtatggccattctgcagcacactgttacaataggttcgatgagacctatatgggctctgttcctgctggtgcgactggtgcaaacaagcccaacaatcagcaacatgcttctgcgtttgttgccacacctgaaatggtggagaatgattcctggtatgctgatacgggcgcgagtaaccatactactgcagatgttaacaacttgaaccagaaaaccaagtactcgggtaaggaatctctgacagtaggtgatggtacaaagctaaaaatcaatcatgttggtactggttgtttgtatgctattgatagaggacctttaattttaaaagaaatgttacatgtgcccgatattacaaagaacttaattagcatttcgaaactaaccagagataataatgttgatgttgagtttacatctgaattttgttatgtgaaggacaaggaaacaaagaaggtggttcttcaggggaagcttaaagatggcctttatcacttcagctcaccgaatacatctgtcaatctctgtcatagcagtccattcagtcatagtgttactccctttactggtgtttctagtttatctaaatccaatgtaactcagcatactgctgtgaagtctttcaattcaatcaaggataaatggcataggagattaggccatccatccagtcgtgttttaaattctgtgttgtctcaaattaatgaaaaacctcttaagaatgatcttgagcatttttgtgaagcttgtcaactagggaaatcacacttactgccatttaagactaatcatgaaaaagcaaaagtccctctcgaattggttcatacagacatttggggccctgctcctgtaatgtctaacacgaattttaggttctacatacactttgtagacgattacagcaggtacacttggatttatcctttaaaagctaaatccgatgctctctcagccttcactcatttccaaactcttgctgaaaacttactcgatagaaaaataaagtcccttaagtctgatggtggtggtgaataccaagctttcaacaatcatgttgctgaaagaggtattgatttccaacaatcttgtccccatacctcagctcaaaatggaagagcggagaggaagcatagacacattgtggaaatgggtct

SEQ ID NO: 164361 - DNA, 953 bp, Cannabis sativa
aaagaaaatttttcttgagttctttggctaggtggactctaatagtgggtctagcctacatatactcataatcaagcatgctctgtatactaatataggtcgtgttagcacgatctatattcgtatttatcgtatcggaacttgtttaaactcatatttttatgtcatgtttaagttcatgtttgtttgtgtcgtgccaaattcaaattaatattttctattattaaaatatgaagtgttttttttatctttgtttaattgttagttttgaattttggtggcattattttatgtgcatggtggtggaattagaaggagaaggtagtttggcctttgttgggtcctttttaacttttgtaagtaaaaagaaactaatatgtgataggaagcttccttcctttattagtttctttctattagtggacaaaaaaaaagagcaccatattccacttctcttcattgatttttttttttttttttgatgaaaacttctcttcattgattgagtaactaacttttcaattattaagaaataaaatattaagaaaatagtaattgaaaaaagaaaaatatcactttattcttttaattggggttggcacttggaacaaaatagattctttcagctttatatttctcctttctatgtaaatactttttacaaatttaccatttgatatgtactgggtgcaaaagtaccttgatttatttattttattcttttatcatgttttggtacataaaacattgatattaaaggtctctaaagcaaattaggccttcgctttttctaaagcacaatgtataatagcaataataataattgtttttattttttatattttgtatatatctattctatataaagtatacctatataacagaatttttggtttactagaaatttatggatgactttttatttatatttaaaataaaatagtttattatta

SEQ ID NO: 164362 - DNA, 3009 bp, Cannabis sativa
ttaaacctcttgtgtctagcaccctcaccgagcttcaagctcaaactattcgagatgattattgtcttcttgaaactattatttggaagcctcaacatggtggtcccaagggctcccagaatacttgttgtagtgcctggtcgagattgcacatggatgtgggtgcttgcttgcccttgcatccatggtttatatctagataaatccaaatagctataggattcttgtgaccttcttcacattctaccaccttaggaactggcatattccaactcctcatgagataaactttctttgcgacttgaaaaaagtccaattggtaaagaacaaggcttttaccacttccatcagtttgtctctttcataaaaacattaccaagagtaaatgcggtctttactactaagagtacttctatactcatgttcttccgtcgagaccttccaaaaagtcagcctattcaaaagacatgctccttttattgacatgaacaggagagctaatgccatgttgcttgagattgatgcataagaaagagatggtcaaactctctttagtactgaaaatctttggaaggttgggttgatcatgtcattccagcgggtgtatgctggcactttcttccctaaagaatcttgtaatatgccactcgagcaaagtgatgaagatgctcagagtgctactgttattttatctcgaattgtgacaaaagaagtgacttctattcgaaatgacatggaatattcagaaagaatatttatgttcttagactaggatgacagagatgttacctccactcgaactgttctggagaaggatggagactcaacaggtgggtgatgctccatgctatatagttaacttgttgtcttgtttctcttttgttgcactaacctctagtctttattctttgcagaaaataggagcttcttggatgctatggcatcttgttcgaacttgaagaggaagatcccggtgccaaaggaaactgagcctccaataagggaagtggtttaaggaattcttgctgcctctactacttcaaagaagaagattaggaagagaggtagaactgttgatgtcgctcctcctactcagactatggtaaggagagatctaatactactggtgttgatgagagatctctgattgacctctctctgaatgaaattggacatggtgctcttaactcgagttgcaatggcatgagcaaggctcctagctcctcttaaatagtgaggccctgattggtgctagggtcgagaacatcccgttacagcggttggttagtaccaagccatttgtcaacctaggcgttgggtacttactccagagctctcaggattcagtttttgatacttctaaggcttttaaacttgaggatgaggtctctaccccatttttggccatttcagattcaatggtcgcatcagatttgacactttagcaattgaaggtagcgttccaggttgattgtcaacctgggcgctaggcccaacccaagatcaacttgggcgctgggccctgtttctagtgactagggattgtggtttcctccctaaatttgcttgaatatttgttatttctgatgacagaaaaatgtccagaacactttttgctgaacttgatcaaaattagctcaggctgacgatatgtcaacctaggtgttgggtcccctttttgcccctctggaaattctgtttagtccccagaaatagttaaatctcaatattttttgaaaatagagaagatgctagaaaaaattcctgaaaaacttcattttaaatggcccaggcccaagtgtcaacctaggcactaggcagtattttttgtaccaaggatttgttgtttttcctctgaaaagacctatttccctatttttgatgatgaagaagaagatgcaaaagtcaaatctcctatttgatacttggaaggctcctaaattgatagattgttaacttgggcactgagtgctcggggccctgagtgctcaaaaatcaacttgctccaattctgattccaaggcctaaaatattgttcatggtatgtctagttgatgttgcaatgcaagtttgacaattttgcactaagacggtcccaaaaattgaaaccctagttgaatatatcaacgtgggcatcgggtgaaaccctagatgcccaagttggctttcaagttacaagttcgtgtaactccagctcccaaggcatggattaggttgctccatatcttcatggtacagaatactaaaagatagtggatcagattcaagttattgaagttcgaagttccatcccagagatcccaaagttaacatgggcgcatggctagggtcccctcagaggtcgactcctatgacttgagtctactaaactccgtgatgtcatacttcatgccatgtgtcaaatattgatgtcaacgtcacaaaaaaagcttatgggttaacaaaaaagcgtgcgtaagatcaacattgatgttggactcgacaaagtttcaagcacgagtgggttgggcatggtggcttaggatgatttaaggtcggtccttgcgcttatcgtttggaaggtggaaggtttttctgaacttgagatggtagaggcacttgctatctaccaggttgtgattcagtgcaaattacttggcttttgataaggttcattttgagtttgattgccaaagcaacatgttttaactcattaattatgttctttttgaatcttctattgaatttatgcttaaagatatttttatttggcttgtcatgattttcatgttgtggaattttattttgttctaaaacggttttatgtagtagctcatattttaactaagtatactctttcaactaccactagtattgtttggtggtttaactttccttcatgtctcaggaattttcttttgaccgatgttaaaaattaataatatttttagttatcaacccctctttcacggtaattgcttagaggtagtgttttatgaggttattcctttataataataataataataa

SEQ ID NO: 164363 - DNA, 1092 bp, Cannabis sativa
ctctctctctctctctctcaccaagaccgaccaaaactcaattgtttttgtgggtttccagtattatttgaaggatttttggaatagaaaacccaagggaagccctagaatatctctttttatgattttgaaggttttctttaagtttggggtatgcatagttgtgaattaggttctgttcaaactagtggtgtttagggttagcttttgggttgattttaagttgtttaatgcttgtttttggaggttctgaggtctgattattgagttgagcaagtttgagttcagctcaagaactcaaacttggctcaacaatggtgatttttgaatttctgcatgttttgaggttgtgttgcttggaactagtctattgtgatgttgttaggtgttatggagcttggatttcagtttggagttgttttgagcatgttttgaggctttgttgtcttctgcagtagaaaacaataggttgtttctgtggaaacggtctaccgtttttactagtggagaacccagaaaaaaggcttgttgttttcactgaaatggcatgctgtttttaggaaattttttgtaatgttgtttttttttttgtgtgtttcttcgatatttagggcattttcatgctatttatcgataggaaaacttctagtttggagtttagatccccaaaaaggtcttagaaagttatttacctattttacatgattgtgacataagatttttgtttagcgcgtaattttccatttaggtcgaccgacacacttaaattcgaaaacgaggtaaaattagtatagaatatatgaatgtatatgtgtatgtgtattatatgcatgctatttatgtgattcatatgctgccaatactagtacggtagtgatactgagtgtactggtacaatatatgatgttaaaagggtacagcctcgtattaccaatattagtacggttaagtacatagtgaatgtggtacaatacttagtagtactctgggtacggttcagctctgttggaatatgttttaccaggatctagatttattaacaagtatgtttcatcaacatcctaatatgaatttctaaaacaatgaaattaa

SEQ ID NO: 164364 - DNA, 980 bp, Cannabis sativa
attttaaaatctaaaaatatacaatttatcaattattaattgttattttttttataataaaaaatattaaaacatcagttacataatcaaaaattaaaattttaattttatattaaaaaaattatctaagtgagcaaatagataaatagtgttgaaaaagaataaaaaaaaaaaagagaaaatagacaaacatattaaaaaaatagataaacatattaaaaattagatagataaataggtttggagctccggtcttatgttgttaataaaatcactcttttcccataatatataatctcatgcgcatcataatcattcaaaaattttgtaatcaaatacgttcgatatatataattaaaattataaattattcaattcttctttattgcattatcataaactatatgcatatatcataaaatcacagaattggatataattaaaattataaactttatacgtataaaacgaatatatagaatatgatacaaattatcacagaacttttttcgaattgtgcacatcatatataattttagagatattttttattgatcattcgtatatatattctaaatatttaataaattaataattagttagaattatagatattttagtatttttgttttattattacttatcaagtttgaatatttttgttttcatcattcatgtatattttcattttagtttgttttgagttggtcaaataataactatataaaataagattgtgctttttatttaaaaaaaaaaaaataaatacgaatgatttttttataggtacataaatattattttttgaattatttaatccatgaatgtttataaacctaataaaaagtttaagaaaaataagagaattaaaagagagagtaaaaaaaattattttgtgtgattttagagtgtatgttacccatattagaatattttatatatggaagttattttctaattaaggaaatgattttctattt

SEQ ID NO: 164365 - DNA, 1629 bp, Cannabis sativa
gagatcaagtcatggcttgcatttactgctcaaaaagttgttcaagtaaatgccttggctaaggcattgtctggacacaaggatgaggtgcttttttctccttacgtattatatttgttattcaatatttttccagacatagaaaattatacttaataggctttttaatttagttccaagcttattaatgaaataatttttacataattttattatttatttaaatctaactaggaagagcctgtatgaagaggactgcatataatgtaatgatgaatgttgccgctatcttgttgtgtcatgtgatgatcagtcaagcttggattttattttatgtaactttttgtgttggcctactatataatatactagtgaatatattcagtgtctgatttttaatttgtatccaggctttctttgctgccaatgcagcagctcaagcttcaagaaaatcttcccctagggtaacaaatgagcatgtccaaaaatcagtaagtctttgtgaaatgtgaatagatgtccacttcaacatctcgtgttgtatagttttgatgtgatcatattttccttactctggactgcaattctttgcttttaaaggctgctgctttgaagggctctgaccaccgtcgagaaacaaatgcgagtgtcaggctggatgcccagcagaaaaagttgagccttcctgttcttccaactaccacaattggatcctccctcagatcatggatctcagaagagtccgtcgtgaatacgaggctaaaaagtgagtcctggctagctaattatttgctataattgtcctaaaaatttcgtctaaactaattgaactgtattggtgtatgatttagaatctccgaagaaaattatgtcagtgcgatcaaggaggagattaacaaagttgtcaagctccaagaagagctggacattgatgtatttgtccatggggagccagaggtgagaattaacccaaaaaatttatatagtttttgcatatttattattattgagatcttattactgttgttttgtcaatcagaggaatgatatggttgagtactttggagagcaattatctggttttgccttcactgtgaatgggtgggttcagtcttatggatctcgctgtgtcaagccacctatcatctatggcgatgtcagtcgccccaaggccatcacagtcttctggtcctcattagctcggagtttgactaggcgcccaatgaaaggaatgctcgctagtcctataactattttgaattggtctttcattagaaatgatcaaccgaggtaagatacaagtataaattaattttctggatatttatcttttctttttactttttcccttatcaatgtctttttgctttcaggtctaatacctgctatcaaattgctttggccattaaggataaagtgttggaaaagttctcattacaagagagaataggaggattacaattaaaatactcaaaatgcaaataaaagtatttcatgaagattacaagaaagctagagaaaaagaagaagaataacacacataaagcttgaccaaggctcaagaacctttgtcctaaaagtcatttcctccctcatatggacacttagggaaactctagaaatgctctt

SEQ ID NO: 164366 - DNA, 1290 bp, Cannabis sativa
cccattttaactttgtaatgttaattatcattataaataattaatgagtatttgcatttggcaagttgtgcattatatgtaattttttactctatgacccattttaactttctaatcttcctactaacatgagtgtacatattagagttattcaacattataacataataatgggagctatataattcatatatgtttttatatttaatatatagtaatttttttttatttccatcaaaaagtgaatatatctataaatacataaagttgggatgcattaaaattcaatcatgtcggaaaaagtaaaatttcagtgagattgttggtagcaatttaagctattttttttttttgttattataaaagattagcgtatatatgttgtatctttaaataatatttttttttatttttattaaacgatatgctaatatggttcttctttttgttagagcatctttttcttttcttaatagtgtccaacagaggtgatattgctgttgagttacaatcttgtattttagctaaattaataaaaattctatattgagatccaaaaaaaaaaaattctatatttattttaaaaatatatatataaatcaacaatatcttataataaaaaaatgtgtatataaaaatcaactttattcccacatttttccccgcgattcaaccaaaattaacaattttttaagaaatcttcccaaactaattcattttttccaccaaaatgaatacgagaaaaacacattatcacttatgtgtgttgattaatgtgggaataaacacaatttgatgagtttattattttttttataatcttattattattttggtgtgataactgataatgtatatagtaattattttttttaaagaacgaactttcattgaaagtaattttttttttggtgaattagttagtaagttttagtaattaataagtaatctgttttcgagataggtcacatgctaaccaaccattatttatattcatttattcattcctattactggttttttattatatatattttaatgttttagtcttgattttttacgaaaatattctaccctaattgaacattctttcacacatttaaaaatatttcatgttgtaaaatgttaaaaagatgaggatattatttatatacatatatattgaaaaaaggatattatatttatattatacacgaatagatatacataaacattttataatataaacataaaatacacgaacagatattttaaatttagatttatataatatttaaatttaaattctat

SEQ ID NO: 164367 - DNA, 2241 bp, Cannabis sativa
ctccctgcaaatgaaatgtttctgatgctccatgttttaatgcgagctgtcatcttgttaacaagagtgttgcactcattctgtgagattctctttgagcatattggtactcccaggcatttaaaaggtatagagcttctagttaaaccagagagctgtacagccttttaaatctcaaattcagacatccctgcacaatagatagcatatttgctattattaggttaaagccctgaaattctagaaaatagcttcaagccttgaagcatcaatctgatactttgcaagtctcctttacagaaagaagaacatcatctgcaaaacatagatgattgagctttaaatccttacacctttcatgaaaaccaaactctgttttatttcccactttcttcataatcctactcagatattccatgccaagaacaaagagtaggggagacatgggatcaccctgtctcactccccttttagcaccaaaaaatccatgcaggacaccattaaaatacagtgagaacctggcagtagagacacactgcatgattaaattgatgaccttagaaggaaacttaaaggttataagcatttcctctaagaaatcccaatctaaggtgtcatatgctttttgaagatccaatttaatcatgcaattagactttacagatttccttccatagtgtctgataagatcctaatagatcataatattgtgagctataaatcttcctttaacaaaacctccttgaatctgagcaatcaaatcaggtaagatgatcttcaacctattacaaagaagcttggtaatgacattatagaggacattacaccaagcaataggtctaaaatcacttacaatattcgtgcatttggtctttggaatcaaagtaagcacattagaatttagctccttgagtatatgactagtttgcagggtttctttgacagctagatacaaatcttccatcatctcccaattttcctgtaggaatgagctactgtatccatcgggtccaggagctttgttcccagggatactgaacactacttgtttgacttcttcccttgtgcaatctcaattgaggatgtcttcatgaagtttagtaaccacagccccttgttccatcacaattttatttactggtattcttccttgcatttttgttccaagcaccccttgataaaatctcaaaaatgcctcagtaatagcagcaggattctccactcggtttccttccccatcatctattgataaaatcttgtattgtctcttttttacccttagacgactataaaacaaggttgagttttgatcccccctcctttatccatgagatcttcactttctggtgcataaacaaattgtatgctttataaattacagcataatgctctcttgcctccttttcttcttgctgaagcagactatttaggggatcttgctgcaacttctcttgtctgaatttgagagcttctcgagccttaatatctgaggattgtatctcggagaagccatttttagtcagctctttgagaacttttttcaattgtttctgcttagtaacaatctgatacatcttagagcctttaatttcttgctgccaaacctgcttcacttcttgtttgtacttcggatgcatagcccacattgtgaaatatttaaaaggtttcttcctgttaggagcatcaggataaaccttaattattgttggtgtatgatcaaagagatcctcattcaagaatagagcctcggcctgctgaaacaaatctacccacttctgattcgcaatgactctgtccaactttgcaaagattctatcatgaccctgttgcttattactccaagtgtataagctgccactatactgcatatcctctaaattacatgtgtgaacacaatctagaaaatcattggagacttgattccttacttggtccccaattctctcatcaatctgcaaagtagaattgaagtcaccaagtactacccacagctcctttgtatttaattcttttaattccagccacaaatctttccttcccaattcatcgttgaagtcatagacaaaaattaactgaaattgcaagttgtttccaacaatgcaaattcctaagtgtattatttgactcgagcatctctgaatacttacttgaaattgtaatggattccacgcagcaattatccttcctcctttatgccacgctatatttgttgtaaagcaccatccttgaaacatttgttgg

SEQ ID NO: 164368 - DNA, 701 bp, Cannabis sativa
atgtccatgtggctaattactatgcgttgatttctgtctcaagggagtatccaagaggaaaatgtacaatttcagccattgatcataattgtgagtagttgatagatacttataattattaatagtagtacctcgttttgcttggcttactatacattctatttatttaagatcatgattcatgatcatttgtgatgtgatttctgggtcaattccctacattgtaaggctagttatacttgttatgggcatatggcacattaattagatggtcggatctatctatatagctgtgaaaattagcaacttcactgcaaaaatattatattagtgtatggacgcaaaaaacaatgtccaatacctattcttactagcagcactagttttggtaaggacattaatttggatgatatgatatgttacacctcaatttcatctagtaataattaacttctcagtagttttctctcagtctcttgctttctcaacacattatatctaatattaatgatgaagcctaaaatttatgtgaatagtaattatttattttcattattgcttacgattacaatgttaaccatggtgagcaactgtttcaaaaaaaaaaaaaaaaaaaaccatggtgagcaagaagttagatatatatagatgaatagtattagaaaaatagtttttatgtttaattttttatctaattaaaa

SEQ ID NO: 164369 - DNA, 574 bp, Cannabis sativa
attatattaattaattatagattaggttgtgggatgtttgctctaattatatggttagaaattatgtttgaattttggctcaaaagcagtatgagtttcttgaccaatgttctttattatatattatatcaaaaagaaaaacaattattaacttcctcaattttctttttaaatcataatttattattattattttggctttagaatttttacttcctagactataatttatgtattattgtcctttaaatttttcagtttgttaggattttggtcctttagcaggatcggacttaaaattttagtgagtcataaagaaaaaattatttttgggcctatttaaaaaatattgtatttttcaaaatcaataaagaattgtgtaatttcaaaaggagaatatcttttttagatttctaggctaggtgaaccttaggcacagacttagtccatctatgccaggattgaacctgtccttcaatcaagttttgtcacactacttatgtaacgcccgtattttatatttactaaactcgaaagttaattttaataatttatagcttaataaccatatggg

SEQ ID NO: 164370 - DNA, 602 bp, Cannabis sativa
aatgttagcaaggaagggcgtgaaacagcttggaagtggttgaaggtactatcaaacataagtcaattcacttttccttcaaataacagtgttaatatctaatgtcaacaacaaaacatatggactcgtatgtattagtgtgtaatatcttaacactgcaaatgccctcataatattttctatttactaatgattccgaaatgtaggataactgggagcacatttcaaatacttggggttctagtcctttaataacccgtttcatcaatgcaatcgtatcgccggtttgttctctttctctacatctcttttataatatttgaaaagaactcgaatcacgctcttctcattccaattttcactcctctttttcgacagttttcttcgatagaggatgccgaggaaattgaggatttctttgcgaaccgcaccaagccgagcatggctagaacattgaagcaaagcattgaacgggtacgcattaatgccaattgggttcaaagtattcaaaatgatgaccaacttgttaagaccctcaacattttgacatactaccactaaggttgggtcgtgtaatgtcattatgttgtgtataatatgtt

SEQ ID NO: 164371 - DNA, 780 bp, Cannabis sativa
ttgtattactcatttgcatttctatgagagatgctctaagttgtgccccttattgtgtacaacttgttaacagtaatatagtcattttgtgatattttatttaattttattgtgaaatgaattaagtggtgaattgattgttgatatataaaaaattatgatagaataaaaaaatattttccttttttttttaataataatttatactttactttaaattttttaattattaaaataaaaaatgtgaaaaatatttaatttgtatttatattatttatcacgttatttattttacaataaaattaaatagaatatgataaaaaaaatattttattgtaaaggttatattttgataattatcattaacaaaatgtatattataaggaacataatttgatagtgtaaaaaatttagagaaagtaaaaaaatactaattatatataaaaatattgaaaatttttagtgtgggtacacccattttgtcactatattatgtgggcaatttcttcgcccttgatgagcataacttttgaatgtataaattttcgttataaggttgtgtagtagattaaaaacctttgaaagctgaaatagtctgaagtatatctgacactgacactaaaaaatataaaatattgaactaattgagaagagttttaagcctccatgggtccattaggggtgtgcagaaagtcatcttatccaatcccaaccgatccaatagaatcagatatccaatcataattggatcggatcgaatgcaaattttaaaaatccaat

SEQ ID NO: 164372 - DNA, 749 bp, Cannabis sativa
gttccacatcaacctcagacttatcgtgaagctaaagagaagtttggtacatctgttttcaattcttttgattcacatatacatatatatctactttatcttttgggtgattctttcatgatgacattagcagattcagcagaaaccattgtaagcacaatggaagtggacaacaacagcagtagctcataccctgcaataacatctcatatggaaaaactgcatgaacctgagaaagtccctgctgtttcttctccttcagtaacaaacttgatgagcagtgatgtgaagagttacttgctttgcaacaaggtgagagtgtactcacagttgcccaatcatccattcccagaggacattactgtactccccgttagagaagacaagtgggtggctgtcagcttggagttcccaaatgaaaaataattgaaaaattccttcacccattatcaagacaaatgtattcccataaacaattgatgcctatgtaatgttttttatattacaactcttttaagttaaaaggcttggtttttatgtaaaaagaaaaatattgggtctttacaaatgagttagtagtgtaatcttttatgaaaatatataaaagcatatatttaagagttttatggtatgggcttttggggaatggctctcccttgtgcctaattttatttaggctaattagcaatttttcttccaaattttgacatataccaaatcatgttttctgaacttttttggtcgttaaa

SEQ ID NO: 164373 - DNA, 1010 bp, Cannabis sativa
ataagagctaatgattgctccaacactaattaattaaaacaaatatcaactgaaaaatgtgacaaggggcccaagcactacaacaacgatatatgtatatatttttttttatagtagtaataatataattaattaacaatatttgcaagctttcttatggaaaagtgttgatgctacaattggtctaggacaagttgcatggaatgatgtctgtacactcaagaggaatatggggtttagacagattgaaaattggaatattcgctataaacatagttatttttagtgataattttttaatcacaatataacttttttgtcacaacaaaaagttacttgtgactaaaacataaaatttagatacaagttattactaatttagttttagtcacaattttttaaaaaaatttatagcgattgcaactattagaatatatgtttgggaccttgctttgataaaagacaacctctgggttgtcgagttaatttgctcagtttataccaaagaaaatgattggtgtagttatgagactctaattcgttctagttggtattggtagaagattgtcctgaaatgcaatttagtattggtaaagagtaagtttgcctaaacaccaatttattatatggttggttatcttggagacacttcaaaccaaggaaagattggcttggtttggaggttgttttgataacaagtgtacaatctgtgatagtaaaacttgaaacatgatcatctattctttcaatgtcattacagtaaagagattacttcaattatcctgatcagttggttagacattagacttaacttattattaaatgaataaaaaacagcaggtattcaatattaactcagaacataggtaaaggcttgtgtttaaggttcacttagtccaatggttcaaaaaaaaatctcactacaaaaaatcttatttttaatcataataaaatttgtgactaaaaataaaaaaaaattgtgactgattataaaatattattcttatgtt

SEQ ID NO: 164374 - DNA, 885 bp, Cannabis sativa
tacgttgcaaaccataaatatagtgcttaaattatatgagattcaatatctaattgtaccaattgtaatacgaatctatttcttacaatgttatttctgttcaagtcctaatgtgagtgttaaaccaacatatacagaagaaatggttcaaagagtttggttgctcaatcataaaatgataaaaggaaaagagcaaaatcacaaagagaaacattattcaattgttgcaaatatcccactttagttacatttagcttatattttttaaagcaatttgcttatgtggtcgtgcattaaaggtatatgtaataaccctaacacagtttcaattagaaccattattcatcatcatcattgataccaatttttgctaagtcttcaataggattcatcatcatgttatcatcttgtatataaattttgaaccacagagagaacaaaggactttctcatataactgactcaccaaatctcttatttattaaaataatggatgcaagtacttgaaattaaaattaaaaagcttccaatccaagacaccatattaattgcaacactggcattaattcttactaattaagtacttgaaatttaactcccttcatataaaattatcaaatcatttatatgtgaagctccttttattaacttactcctgcataagaaatcaataattctaatattgatcagtactatgctttataaaaatgcaaaaaaccaaaaccaatgagaaagtaaaaagagtgaactaagaaaacataaacagataagtcccactaacatgtttgttgaaagcaatgacaatcaaatttattgaaaataatcataatgtctattgtagctactgaaagttattgaataaacaccatcttttattcaaaaaaa

SEQ ID NO: 164375 - DNA, 1925 bp, Cannabis sativa
ttttttttttttttttctgaggacacagttccattttgctttctggaaatcttcttcgtgagcttcatcaactccttgtctttgcgttctaagcgttgagttttatcacttgaagagtctcttttgcgaacacgatcattgatatgatttgtcaaattgtccccatggggtgtgtctttttctgttctagctttctctttcttttcatttaatcttcttcgaagatcatttgtggagagacttcgactgttgccgtctaagaccagatatgcctcatcaacatcatcactttgattattagagtcattgcaacaatgcttgtctttctgggaagtagacttcttgtctctggcattagtcttatcattctgcgtagctctgcctccaaaattagtttggttaccctgccttgaagcatggtttcctttctttttctgtgaaggttggctgacagttttagacttcttttgttgtttagatgaatgatccttcttcaaagtttcatctattacccttttccttttatccttgtgaggattataagttctaggatctttaggatcaactcttctgagagcatcagttgttggagctgtttgcacagcagggttccttttggtcaggactgtcatcacgatttccatccttgtcattttcctaagcagtatcgcattgagctggtcatattgagataacttgctttcagttaattgaagctttctggccataatgaccataggatttgactcgttgggtttgtccttttctccagcaacatcattagcgatcttgtcctagtgatcatcctttagtgtgtcttgaggatcatctttcgaggtgtcttgaggatcatcttcaccatcatcaaaactattctcttctgattcatcatctatgaatacatgagcatccagatctgtgtctttgccaagttaatccttgtgacggttggtcacctcattctgatcttttttatcccctgccttggcattaggatcagtaaagtgaagatcaaacttatttcgagtgagtaccaggattattgagcgtaatcacctgatggtatcattgcttccttcagctctcaatgaaagcaccaagtttttatgtggttggggcgttaacaagccttaggccacgagtcaatattattatgtatgtttagatggaaaagcctttaggaatacaatgagcctaagttctctattttttcttgagcaagtattgcaagagaattcaacccttaatctaaaggatttgttgggtatttatagtgttaagtgaattatacttagtttcccttttccctctaatggggagtttatatgaaaatacataagttgagctctctttgtgaatctcaacccattagaggattggtgtgctgactaggcagattggatgtggttaatgctatcaaactgtgtcctataattatgggaaattaattgtaaattaattgcttgatcttcatttaggtaagtttccttttttggctagatacgatcttttgtcgagatttgagaagcatttattttcttattttttgcgcttgaataaaaagagaaactagactgatcttctaggaacataatgtctgaccttccgacaacacggtactagggctacatttgaatacagactatcattggcggaagctcttctagtcacggagctaaggtgccttcctagaaggtcttgtatgacttggacttggcccaaattatcttctttcggactcactagtgggcttttggtgctgacccgggatccacgtgtcccttgccggaaatacgaataattggtaccaacaggcttaggcatacttccccttgtcgtttgctggattgaagatcctgtcgcatgatggttaaactttcccactggtgggtttttagtgttaaagttgttggaaattattttac

SEQ ID NO: 164376 - DNA, 1323 bp, Cannabis sativa
ccaatgacacttctataagttttaggattagaaagaataagtacgcattcattggaacttaactttaagttaagttccatgggtgatgaggatattttaactccaagatactttatatctgtaagtaattacagagtcatggtttttgggaaatataaatcctttttgatgatcgagcaattttaatcccaagaaaaagttttagaaggctaagatctttgagtataaattgtttgtcaagtgttattttgaaagcttaagtggtagctgcattgttgctagcaattactatgtcctccacatatatgaaaattgccataaaagtgttgttgttggatctaatgattagagaatgatctgatgttgattgtttgaaaccacaggatatgagtgtggagctaagcttggcataacattgcatagatgcttgttttaggccatataggctcttttggagtttggaaacacgtttgggagagagtttagtggcatatttgtttcctttgggaagtttcatgtttcatgcaaatcgtcgtgaaaaaatgcattgtttatgcccatttggtgtaattcccatttgtgtattggtgcaagtgcaagaagaattttgaaagtgttgaattttacaacaggggcataagtatcaagaattttgaaaatgtttttgcaacaaaggtaattttggatgggatgagatgtagaggttgcactgttggaaacagaaaaggattagtcattgaagtatgctggtttggaaatttttctacttgcctttgtggtctgtatacacagggtgtgttgtagagggaggagtttgtgttttggggaaaatggcatatggatctacagttattgtagatgggactataggtgtcatagttggaagtatcgtagttggaaaaaaagtatctattttcatcctgacagaggtttttagggaaagggaatatatcctcatgaaatatgacatctcttgaatgaaaatagaatttgattctaaatctaagagggtgtagacctttacccctaatggatagccaaaaaaaaacacaatccttaactctcggagaaaacttgtgtcgtgttctgtcagaagtggatgcataagcaaggcagccaaagacctttaaatggtcatatgatgggggttggtggtgaaatacctcaaatgaagtctttttattgagtaacatagaaggagttatgttgattaagtatgtggcagtggtaatggcatgaggctagtgtacaagagcaatgtgatattaaaaaaataaagggctttttcatttttacacttctaaacagttttttttttttttt

SEQ ID NO: 164377 - DNA, 2761 bp, Cannabis sativa
ttaatcaatcttaatcaggctgattatataaggaactaactcatcaaatttggttaaagctaagtggaatttcctattgccatgtggaagagtaattgtcttctcaatcaaaaaataaagtttttttttaaacaaaaaataaagtagtttgattggattcctttgtctttagaaaacacatagtagattttttttttttttcttaactctcattttaacaccaatttaaagttattttatttacaactttaacaattttttttttttggtgaaggaaatattattgctaaacgaaggtcacttaaagacaaacatgaaataataaaattaatagccataatttaaaagtactataaagcttatccatattctgtttccggggtggtgatgatttgcatatgggtagtgatctttaacttgcttctcgattatggagctaactatccacttattttggctaatttcattaatattgatgctaaggtcattttgtccattctcacttcagcttttggtagacatgataggctggtctggaattttactggtactgccttgtatgcggtaataagtgggtactagagtactatttttaagattctcgaacatgatagtgggtactagagttctccttggtgaaaatttttgtagtcactttctattcatcctaagaataagaattttatttgaaaagcaaagttgaatattttaccaacctatgtgaattcggctagaggagcagctagaagtgtaggcgctatttttctatttcttttaatcaattcgattatagtcaccgaaatcttttttgattgattgttcctattagcattatgttaacccgaaaattgatcctagtgacatgaacaaacatgtttgactcgtggcaagaaagaaaacatctcagagttgagtagtcttaagtcatagcagtcaacttgggaggggttcctagctctgcgcccaggttgacttcaagaactccagaatgaatgtttggattccgccaagattttttgaaatcactatctttcagtattatgtaccataaagacatgaagcatccaagtctaaggcccggggatctgaaaatacatgaaacaacaccacagaaatcaaccagggcgcctaaggtttcacccagcgcccaggttgtcaacctaggccacttccaagcatcaaactgaaaatccctatctagcattttcttcgtcttcctcaaaaatggagaattaagtactttcgagaaaaaaaacagacaaatctagagaccaaaatgagggaccagcgtagcgcctaggttgacacttggtgttggcaagcgcgcgcccaagttgacattttgtcaacatgggccaattctaaggagttttttcgaaaagttttcgggcatattctctatttgtgtcaaagattaaaattcaagtattttttgggagcaaacggaactttcaaaaggcctgaaattggacctagcacctaggttgacaaattttcaacctgggctgtttccaattagttttctgaataaatgttccggtcattttttccaacatcataaataatgaagatgcaactcggggagaaaataataattctaggggcatcaaaactgggtctggcgcccaagttgacaatcaacatggtgccttggtttcgatcactcaaatgtaaattctactctcagtattctctctgaaatggtcaaaaatgaggtagaaaacctcgtcctcaatttcgagaaccttgaaagtatcaaaacaacatcccggaagctcagtaaaaagaacctattgctaggttgacatatgacctagtgccttgggttctacttatccaatcctgattccgtcttgaccacttgtctagtttctcatagtgactgagagctatgaagtcagaagagtaaacttcatttttttcactttttcagcaaagtgacttattcaaaaatcaggtagtttcgagtctcccattttcgcaaaacagcaacatcagcaacatctccaagaactggtgaacaacttcaccaaaacactgaaactagctaagtgatgtcaaaatatcacttaggcttcaaaaagtacatcaaagacactattttcccttagcctagcacccaggttgacatcacatttgaacttgggccctggatgtcaacctcggcgttgggactagaacaaccctcagtagaataaccataactcactcaatatttatttgattgacacgattcaacttgcgtttcaaagctatttcaattctatatcaagtcatgtctcacactccattctcaattatgaagttatcaactccaaattttgttctcaagagagttacaaatttaagttacaatttacccgaagtgggtctcgtggacgcgactcaagttttgacaaccgagcttcggagtcaatttcaccgttagatcatcattaacggtcaaaattagcctaaatgtattttttttcatattttttataataatttattattatttaataggacctcattcctataaaaggagagatccactagctcattttctaagttcaaaaaattacccaaggtcagagcatttctcactagtttctctctctaaaaactagagcatccagacttagcttttttttttctatgatccatctcatgagaaataaaactcgagtagatctagctctattagtgccacgatatagggagtgaactgttgggttttatgccctaaataaaactcaattcatataatcagatttactta

SEQ ID NO: 164378 - DNA, 1226 bp, Cannabis sativa
aatccgtctcaagaaaaatcactgtcaaccatcctttgtctttaatcaagctatccagctaactcagatgtcacattactagaataacacaacactgtgagcttcaacaagaaagcctaggcgatcacgagctcccaaacccaacttgaacaggtaagttttagcgaacaatgcaacatcaatatttatcttgatttgattgtctcaaagctttatcgaaactgtagcaacaaatagtactttgattaatgaaaatgctaaaatatattattggtgtctagcaccttcctccgtatcatagcactataaaaaataattttatattacttactaatcgtaaaatgacacttataaaaatggacagcactagtactcaatgataatgcactttattaattatcaccacaaatatttactctcttttcttaaaaaaaataaaaacaaataaaaaagattgactagatatggatgaggtcaaaaggggtcaacataatattatctcgagaatttcatatatcgcgtgaaaatatcggagctaaaaaaccagctgttctcgaagttaataaatggacaaaattggaggaaaggaaacgattgtatcaaatcagtttcatacaaaatcattgaaactgccgacgtgtaacctcttatcctaaataccagttcttttatatcagtactatccattcttagatggacatgtcagcaattgcaaatagtaaaagtgattttggttgtagagaattaaatctctttgttggagtcatgctctgtagttctccgttatgtatggctcacaaagtggcaagaatcacgcgcttgagcagagcgtggaaggaatgtgttcttgtccctagcgtttgtcatcccctagtcacgtgactcacatgtgatagtatttttatatttcaaatttatttatttttttggtagaccgtgtgttttgtaaaagttaccgattggattctgtattttgttaaatgataaaattgatgctgtatttttcaaaatggtaaaaatagaattctgagcttaatttttgacaactttttttttttaatataacaaacttgaagacaattcctaatatgaataaatacagaaaatgtaaacagttttgtcatagcatttttgaatcagattataattaaatttattttgacaaaaaaatcaatttagggtcctatttgtaccattttagaaaatacatggtccattttgtcatt

SEQ ID NO: 164379 - DNA, 2951 bp, Cannabis sativa
ttatagataaaaaaaagcaggagtaatagttttaattttttggattgtatattcaactctggactctttttctagagggagttgaggttactgtttgtgttaaactttggttaaagttagtattttattttgatttaatgttgtgcttttcaaggggagtttattgtatatttttactaacattgttttgcaggtgtatgtcaaataaaaatattttgattatctaaaatgacaaagtgggagattgtaaagtctttatttggaaaattaattttcaaaatattttttaattaatgtattttttttctgcaattaaattgactttattatattgatttcgtgcctctaattactctcggtctcatatgtttaggaaacttgtcttacaagagaaggaattctcttatggaaatttgtctatttttagaaaatttgacttttttttattgatgattttagtttttccttgattagagcagatcaaataaattttatttgacaagtattaaagaccaattcgtgatcttggtccatttagaaaagtttcctttttagtcctgatctgctgcagcagagtccaattttgatgctgcaaatcaagaaattttttaagaaagttttgtacagctggaaaattatgtttgtggttgtctctagtgttactaccttctataaataggacctagagagcagctaaatatcttccacctcttccaacttcattcttcctatttttatctttgtgaggagagagtttcttttgtaaaaacctagagtgttcaagctaggttttagctttgtttattgttcttatgttattcttagaataggttgaacaactctattgaacaagagaaggatcttcgggagaagacttgccaaaaccttacttcgggaggaagtaagcactcacacatcaaaagagaatgggattttgctatttattggtgtttcaaaaatcagattggcaaagtaaattacaaaggattgtggcaaagctttagagagagtctaaacttgtttaagtcaattgtattagtaattatttgaaactttacaaattgatttcattctctaggtatagccccgtggattaggagtgtttaaaagaacctaacaccatgtataattctcttatgttaagttttaatttatgcactatttagttttgttctgttactgtaaatatatgttctatagcaacaagtttttattctgttactgcagattgtaacaattgtgtttttctaaaatttaaaaaatatattgacatttataaaaatattgtttttcaattttctatggtcattttaaggcatgaatcacaaaaaaaattgtatgtctttttgttttctcacttcatctctctattttttttctttaaatatctagttgccagaaagtggcaattgattatgtcatgttgtaataaaaaatgaaagaaaaaaataaattatattacttgttttgtactgcatgtgtttttttttttttttttgattaatactacatgttttattttcatgtactttgatcaaagtttagcgtattatcaatttaatttgatgtattttgagttttaatgattaaaaactgtttgattaacctaatttttgatctagagatgaacaaatgcatacccaaatagaataaaatttgctccttgcaaatgtatcatatttatggtctaggttcaattcgagttcttcaccccaagatacaaagcatgagacatttagcactagaccaaagatcagggccgaccctgagagtaggcaggctaggcgtgcgcctcaggcccctgaacgctcaaggccccgaaattgtgaagagaaaaaaatattaatatatagataaaatcgtaaataagaagaaaatataataaaaattctttgatgtagtggtaaaagatttaatttctctctaagaagtaatgggatcaattctcaacctttacattttaatcttttttaaaatatttaatgtgtagttatgagggattgaaccttggagcttgagtttttaaaagttttactattaaactaagcactagaattataatttttttaatagttaaactatatataggggcccaaaatttgatttcgccttaggccccatataccttaggaccggccctgccaaagatgtgaatgtgatgatagtgttgatcaacattgagtgtctttctaaaaaaaaaaaaaattgtttttagggtacgggtggtacccactatctagtagaatgaaaaaagtttattatttggttctttagtctttcccttttagttttttcattagtcttgtttttgacatgattttttagtcttttccttttagttatttctggtttgtgtcttgtcttctgacatggtttgtgtagctcagaatcatcaagatactatggtagaagcatttaagaatgagaagattggatgtgttcaacccgaaattgctgagataataggcattaaagaagcattgagttggattgtaactcattcgtgggataaagtcatgttggaaacagatagcttggtgtgtgtccaagcgatttagagcagtattttttatgccttcacagtttggtcttattgtttaaaatattcgaaatttgtttttggctttatcttttgttgatttgtgttttgtaaaacgatctgcaaataagttggttcattacttggcaagagactcttgtttatctacaggtcgtgtacttcagctgaaagactatttctcaaaagtgcattctattgttttgaacgaatttattaattaataaatattataatttttatttaaaaaaaagtttattatgtaattgagtataagatgttacctattttaatttaattattattattattataaaatttcaatttttgaccctaataatacaacctatatcaaaatttatacccctttataatttgtacaaatttagtccat

SEQ ID NO: 164380 - DNA, 1307 bp, Cannabis sativa
cactgttagtgataatttttccaaaaaataaataattagtattaataagtacaaaaggctaacaatagctcttattatctcatgtaataatttcaagatcatttactttccaacactgttgaaaaatattggtgagatcagagatactttcattccatgtatatgtttatctaaataattatatatctatataaagcaagatacatctcattcaccatgttatatgcccctctttcggtcattccgatgattcaaacttcttccaaacttttgacaaggaaaacacttgccaaaacagtacaacatcataaacaaaacaattttgtttaggataaatttaaagtgggacccaagaatctaggaaaatagaaaatacattactagctagtcagcatacccggaattcattctatataattgaatattatttcataagttgatcatacaatatatcaaggaatcaaacttaataagattcattcaaatatttgatgaaagaaaaaagatccatgtctgaaagtctcactcttcatactgtttaaattcattaatacaagaaatatcacttttgtcagcatatttttgtgctgacaaaagtttagtattgtgcttataaattagaatttatttcttatgtgttagcaaaagggattggcaaatcaacattagtattagagcttttaccagcacaaaatgaaaagcgctgacaaaaataactttttccagcgcgtaaatatgctagtaaaagttagattttagccactaccaatgtgcgatagtaaaatttcgacctttttgccaacgctttcctgtagtatttgtaaagtcgtatttgaaaagtagaattggattgcattaaaaatatatgaattgtgttacttagaataaagtagggagtataagtttgatataattaatatcgttatttttatttccttacaaatcatatatccctatatgaattgagatgggaaattagatataaaaattaggaattattaaaaaaaatatatatatataaattgatactttacttataaaaatattttcataaggcgtgaacaatatttatacattttatgtgattttaattaccaaaatacctcttacactttttcttacacaattagatgatgattacagggtggttgctgcgtggttgcgcgctggttgcatcagacgaaggtttcaattagacaatggttgaagggtgattgctaggtggttggccgaaggttatatcaaacgaagatttcaatcacacaaaagtttctgggtggttgctgggtgattggccgaaggttgca

SEQ ID NO: 164381 - DNA, 1061 bp, Cannabis sativa
gtattattttaaacattttgtttttacaattttcttttagaaaataattaataattttgatattcaaatttatatatattttttctttgaattgagtagtttattaataaaagtgtcccataatttactgattaagagctgtagtcaattgttttaatgggtcaaggccactccgtttcaatccaatcgattgtttaaattatttaacatatgtttggtagagagacttatttaagtcacgtttttaaattatatatatgtttttgaaacatttttaaattatattaaaaataatgtaatgtagttttgttggtgatttcaacattgtccagctagaaggatcataaggcagttgaagtaactcactatcattcaacaatgtagttttgttggtgattacatttttaaattatatccaacttgaagtggaattttaaccatgactttgcctaattctcattatcattcaactaactgactccatcactggacatccatcttttactttttaaaaatagtagtcaataattttttagtaaagagtcaatatattatatctcctatatataaaaattgattttgacaagtcattttgttattattttttttttttgaatgatcttatttttctctttttatttttttctctgattttttttttataaataatttatataatgtcttttttggtaatttttttttattattcatagaatattattattttacatttttaagtgttcagataatatataatattattcatcatattatttagtaaattaaaatttatgagacttaatattaaaatataccaataacggtatgtcaccatttatagtactagcacctcttttaatatttttcttattaatattcactttaattataattttaggggacgttttttaacttttattttttaattttttaatcacaaaaataaaagtaattttttttttaatattttgtttgtaaatgcattttataaccatttttatttttaattttttttttttaaaaaaataaaagtatgttctataacttttacttttattttt

SEQ ID NO: 164382 - DNA, 577 bp, Cannabis sativa
ctcccaaaaggaaataaaaccacaactaagatgagacaacccacacttagcaagaacatgagccacttcattataacatctactagcccatacaacctgattagtagaaacatcaaggaaactaaacaacttaaaaaaaagaaaaggataaacgccaatcaggaaccatctgagagcgacaggccatgactgccaccaagcaatctgaaactaaagaaaacaccctgattcccaatctctccgccaccaatctcttcgcaatccgaaagagcacatttattaggttgcctgctactacaatgatgtgattaataatttttttttaataattattaaattaaaatattttaaatttaatattttttttgaaattattttaaacttaacattaaattacattaattataacggtgtaattacttaaaaaataataactaacacattcagaaggtaattagcaaactggttcatttagcatttcttttatgggtaaatggcggcaaaactcccaatactttcgttttggtttcattaaacccccacaacccaaatttctgcgggtaaactcccaaaacta

SEQ ID NO: 164383 - DNA, 1374 bp, Cannabis sativa
attgcaaatattaaaggggttttgctgcaaatatctcttattttacaaaaaaaatatatataattaattaaaccataacttctataatttttctttttttttgaaaaatatatatttatctctaatatttagattttttatttgggataatacaaaataaagtctcctctatattacgctaactctaatttggaccctctattttaagaaattataaaagaatcccttgtgttattaaaatactaaaaaatagtcttctaaacacaattttagtcaattttgttttaagcaattctttttttaattgagcttaaattagattttaaatgatttaaaaattttaacggttaacaatagataatactgttactctttcgaaagaaaaaaattcactaaaaatatgttaaggggattagtttttaacattttaattattagatgatcctttttataattttttaaaatataaggtctgaaatagaatttaacataacgggagacccttttttcttcctttttatattattctttttttaacctttaaagctatttttactatagcatttttgtttcacaaacaaatctaaaattaaattgacataattttttattattttatatattttttttcaaacttatttgttaacacattaaaattagtttggttataaatattgagaaacattcaagttacacatagtttacacattatctgtataattaatctcaactaataaaaggtgatataatacttaaaaatatatatgaataatatttaatgcatattattgtaagtaataaatgtgtaaattttttttttttttttgaaagcgcattctcattatttatatactgtataattcaagctaataaagacttcgatcatttggttgccatattgtatgtgcattgcattaataaaattatttgaacgtattactaattttaaataaaaaaaaatttaatttttcatgtttacatttagtcaaaaaaattgaaaaaagaaaaactaaaataagatctttaattatatatgttacacgtgcaatgtacgtccaaaaactaatttttattaaataattatactataatgttataaaaaggaaactacaactctaatgttataaaaaggaaactacatatgtcccataggccataacacaacttaaatgccccataaatgtacacaactgggacaattgtttaaccagtattcatttaatgaacatttgttaaaagtggcttatgtgtaatttatgtgtacatattattattattattatataatagttataagtaatatacacttgaacacatgcaaagatgaacatattcacacatagaacatatttttcaatcaatttacagcagctt

SEQ ID NO: 164384 - DNA, 2204 bp, Cannabis sativa
tcatgcccattatcatttcaattcaaaatcaatttcccactttatcactaaccttaatggcccttctgaaaaggcatctacaaacccttagaccacaagattgtgtctcagtcccactcatgttccctttgcaatattttccacactaactgaaaggttaatacattcatcccatattaaaccttctgccttaaacaccgtggttaatggaattcagaatccgtaaaccttgcccacaaatacaaatgggtcctcaccttctagttcaagagttaccttttttctttcacaatcgataattgcattaaactttacaaatcaatccattcctaattcatcatcaggatcctctaatctcagctaaactaatacaaccaagcattcccttttttcctcaaaactctagaagggacttgaaccttttgctggagaataactagttctccagtaaaagtagggtaccggaaccactaggtaacacatccttaactttatacaaactcccaatcatccttctcgaaatataggaatacattgcaccagaatcaattaaaattattaacaaaatatgattcatagaagttcaacttatcatggtggaaagaccagcaccagtctcagtctaggtcaaacaaacacccaaacaagatctaaaatgtcattacccttctattctagtcgctgcaacagtaggcaacttcttctaaatggcctactaccccacattgaaagcatgctctcgtgtagcattcacattggtgatgtctcttacatctcgaccttacactcatggcaaaagaggttagaccaaccacctgagcttggaactggacaaaccctagttgctaaacaactatatcacattccgagcgatatactcttgccaccttcaactagattagactccctagcggccttaacagtcgcttctttaaaacaaaactttgtcaatccgtccggtttagtgtcattctccatccccacgctgcccaggatcgactatgtatattctactaccttaccgctcaggtaatctcttacttcatggcatacatttgctcttagtcttgcggtagtggacaaaaaattaatacccacgctaccaactccgagcctgctaagctcgccattatccttactagatcgccccaggtacaacttccagtacactcgcgaccatttctttccattattaaaatcttctgaactaggattaatactaataagcattaccacatatacataaacatattttaaaaaaatttatcataccttatcatgcttctctaacaacttgatcctttcaaataagcaggaaattcatgcaatcaacaattaatctattaatcaactaacaattagcacttactacgccatgagtcgaacgaatcttcgtagccaatgtacatatgaagccagtctttaggatctttaaaccttggtcgctctaataccatgttataacatcctgaacctcaagaacggcacgtgtgtgcttttacaatcttattatcactaatctattagtttaggaaaagtgtggtttaattaaaatctttaattaaatttaaaatcgaaactttcattcaaagtactgtcgtaatatggggatcccgtgctaataaattttctgtaaaacaaatttcaaaaccgttattattaaaataaagttacattcccaaacataaaagagaagaagttgatcctgctaatcggaagccaagacaccaccgctaatatgtacactgctgggagacctcaggctcatggctgaacacatctaccatttttcttacctgcaccaagaagtacccgcgagtcacaatgactcagcaagaaaagttattagattaaaggcattgtaaacgtagatattcacatctcaatataacaaacatatatatatatgtgactcacacatatccatcttgcgtaactatatagtattaatatttatacattcccacatactacacattatgagaaaatcacaacgccttacaatgaacaactttatcaatacactaaatgattatctaatcaatacataacgccacattcttagggcctcataaagtattcaatcttacatccccataaacacatgttcttactgttggaatatattttaccaggatctagatttactaaaaagtatgtttttaacatcctaatataaatttctaaaacagtgaaaataaaca

SEQ ID NO: 164385 - DNA, 1526 bp, Cannabis sativa
atcccacaacacatgagccccatcacttgatctgagcttaacacatgcaccacctgaatgcctcgttttgacaaagcataattcgttggaagccatttatgacacaccttccaaacaaaatgcttgatttttggcagcaccttcgctttccataaagtttgccaccaccgttccctctccttatcattggattgatgggacacctcccgcatatcatgagccaaccgatacccacttcaaaccgtatattcaccattcttcgtgtaatgccacatcactttgtcttctactccccacgaaccacttggaaaatttaaaatcaaattagcatcctcctcattaaaatgcgcctttataaagccttcatcccacctcccatctgccaatttcaagtccaccacatacagctgttgcgaaaactctggcttatcataaacacggaaggtaatcggtcgaggcaaccatggatcatccaagacccgaaccccattcccatccccaatttgccaacgatatcccttcagaagaagctttttcccccacatcatactacgccacttaaaagaagcattattaccacacttagcttccaacacatctttatcgggataataacaagccttcagaaccctactactaagaagtgctgggcaccgcaaacaccgccaaacttgtttcgccaaaagagcctgattaaacaaacccaagtcccgaaatcccaaaccaccttcactttcggcttacacatataactccacttacaccaatggaccttcttttgccgggctgaagacccccaccaaaatcgcgccgccatactatgcaagctcttgatagtactcttaggcaactggaaacaactcatagtatatgtcgccattgcttgaagaatagctttaataagaacctccttaccagccactgaaaacatagaacccttccaaccatgaaccttttgccacaccctattcttaataacttcaaacagctcctttttgcttctcccaacaaaagacggaagtcctaagtacttaccatagttattaaccactttcacatccaacaaagcagctaaccgactccgaagactcctatccaccaacgcaccaaaacacatctcagacttgctaaaattcactacttgacctgacgccgccgtatacttgtccaataaatccttaaaccgaccacattccatcaaagaagcatcaaaaaacactatactatcgtccgcaaagaacaaatgagtaaccacggttgaaattcctccgcactcaaccccgcaatattctgtaataactcccacgagaacttcctttgttgtttatccagatgcccataaaaaacaagtgagaaaccacggttgaaacccctccccagttaccaccgaagcaatatgcccaggtgaactagagtctacccttatattgatatcatccttccacattagaattaatccaccacttaatcccatccgatccaccacccaaaaattagaaaactgtaacacactacaaactctttca

SEQ ID NO: 164386 - DNA, 947 bp, Cannabis sativa
ttgttttcaatctaatttgcctctctcatattggccttacctcatacatactgccacctatctaatgaataggacccccctcaaaactacttcaaggcactacatcttatgaactcttgcataataaaccccccatgtatgaccatcttcggtcatttggctgcctttcatacgcatctacacttccctctagtagacataaattctctcctagaagccgtgcttcaatttttattggataccctcaaggcatgaaagcctacacattacttgatattgaaacaaatcaaatataccactctcgagatgtaatatttcatgaagacatatttcccttcacaggttatacatcttctcacaagataaataattttttaaattcatttatcaaacctgtgtttgatcctatcaacacaaccaaacaacatcatactgctgcaacttcacagcagccacatcgtgttgaccatttatcaacacattctggtgtcaatcccacaccaatacctcacaccagtgataacatatcactccccattccacttgtcccctccaaggaccataactcacaaactgatgcagctatcaccccagcaacatcacaacaaaccagttcacaacctggtttttcttcacaaacagtcccacaaacggatattaatccaaaaccaacatcagtttctgctcctataactgatgctactgctacaaacatttcccctaccaattcaattccacaacctttgcttcaatccaaagctggcagacccgtggttaaaccaaaatatttaacagattatatctgtcatacaacctcaactgcttttccaattgaaaaattaatttcctatgctaagctcagccctcattttcgagctgctgtccttgcagcttattctcatgttgagcctcaatcatactctgaagcttcacaatttaaagattgg

SEQ ID NO: 164387 - DNA, 1095 bp, Cannabis sativa
agtaccatcacctactgtcaagaattccttacccatgtactttgttttctgttgcaggttattcacatcaattgtagtgtgattgctagcccctatatgagcaaactaggcttcattctccaccatttcaagggtaccaacaaaagttgaatgtccatgaggcttgttatttgaccttggagctccaaggggagtacttcgcatataggcttcatcaaacccattataacagaaagcttaccacacacttgacaagtgggtttaggaccacttgagcgacctcctcttcctttgccagctaatctccctcgactgttgctgttggtagtgtgactacctttgttattggaataactcgaaccacaacctgatccagagttgttaccctagttagcatagttcacatttggagatccagaaccacttggctacttagtgttacatgagagtgtagatggcctctccatcttactgtcacaactcaggagcatatcctagagttcttgccaagttgtagctggtatggactcaataagcagcacaagaggtaggtgttatatgtttaaaccagacaaaacattagcaataagttatgattcaggatagggttcacctgtgagatgaagaacatttgcccatttttttttgccttagctattcagccattgtagcagatccattcttgtgagtttggatcttggtcctatactcatccattttagctttggactaggcaccatagagagcttcaagtgcataccatagttcagctgaggattgacatcccataaccttaatttccatgtcctttgttatagatccataaagccaacccattaaaagttggtcatgaacaatccattgttcaaattatgggtttacttcactgctaatagtagtttggccatccgtagatacaataggtggaaaaaactattggggcctaactttggcacctgttaaaaactaatctagcctttgacctctagcaatagctgagaccatggtcttcctcagagagaaattgtttttgtcaagtttgagagcaaatggctgattcaatgtatgttgcctcaaaagtgagtgttttaatat

SEQ ID NO: 164388 - DNA, 1546 bp, Cannabis sativa
acctgtaagtggtgacatcccaaccgagagtgcacacaaccactacccctgcaactcgggagcacctgacaccagataaaggtacaaggtgcaagaccacttcttgcaacctgcgggtcatggatgtcccttgggacaactaatgtacccaaggcattagagactataaggacctctcttccagatgtgagaaggagttggaaaatcattgtgacatttcactccaagaaatacaagcatttctcttactctattgttgctttgagcatttctttaagtttttgaatttcatatttttgtcttcattctaagttttgtgtttgagtttcaattttctaaccttaagttagttgaagagttttcattgtcaacagtacagtttggcaccgtttatgggatgggaacgacaagctcaaggtatcgagattcatctagataacactcagctgatcacctccacaagagagccaccaacacccatggttaaagaagttggccaaaacagccaagtacctcaaacaagaggagagggcgaccatcgtgaagagaatttgacaaacacgccccaaggtggagtaactgcatccatcacaccgattgctgagaatagtccacggagtctaaaaacatcgccagtaaggcaccctccaccaccaacactacaaaatctcagtacctcgtgatatcgccctaaaaaggggaagcaagccaactttgtgagctcaacatctcaaactcggcactataaagatgaaataaacaatctttggtggaagaatcaaaggctggaaactacgatggctggcatgcaaaaggtgttgagtggcatactcaaaggaaaaattgaagcctcgcactttctgcacaaaaaccactagcaagagtacgagatcccaactgcacatgctggtggagagcactccatttcatcaacatatagaaccccagaggatgacagtgaaagggagcattacgggacaaggaccgtataggtcgttcaaggaaacatgactctactcactatagtaagaccacaatgatggaaatgtctcgtgatcctatgaaatgatttcacccaaagagtcttatgctagggtgaactgcatctgcgtcccattttcaagagcaaagcaagcaaaaggcatcattccctaatcatggtgggaaaccgcacgataaggggatgagaggagttctactcgtagaccccatgaaagctagcaggaacacccaaattccactcaccaactctcgagaaaggatgaatgaaagaatgaaggagttagaagtagagaggcaagatctacgtcaaaagatggctaccacacaaaaggaaaattcggaggatgatgggtttgaggaagaatcccctttctcaagggagattcaaattgaactgcttccacccaatttcaaggagcctcacatgactctgtatgatggtacaactaatccaaagtaccatctaggtgttggaattatatttatccaggatcttagatctacccacaagtatgttgatttaacaacctaatattgaacttct

SEQ ID NO: 164389 - DNA, 1303 bp, Cannabis sativa
taacctatcctctttacctccatttcacattgatccatctacttcatcttcaatgccctgaatcatccactcccactgcttccactattcccacagcccctacctcctctaccaatgttcaccctatgaccacaagagccaaagctggcatatacaaaccaaaagtttacatcagttccaaagtacctctcactcttgttaatcccaaatggcatgctgctatggatactaaagttgtagcactgaaaaagaacagaacatggactcttgttaggctgccccctggtaggaaagtcattgattgtagatgggtccttagcattaaagaaaatacagatggaccagtttctaagctaaaggcaaggttagtggctaagggttttcatcagcaatatggcctgaactttcaggaaacattcagccctgttgtcaagtctccaaaaataagaattattcttactatttctctctcacaccagtggccaataaaacaacttgacatcaacaatacctttttaaatggcaccctacatgaagaagtctacatgcagcagccccctggctttgaagatgtagataaatccctggttttcaagcttcataaagctctctatggcctcaagcaagcccctcaagcttcgtttgatcaactcaagcagacgttgcatcactttggtttttagaattctagaacagacacctctctctttgttagattccttccccatcacactacaatcattttggtctatgtggacgatattcttattataagaagtgactcaactgaaatatccagcctcatctctcaactgcattctattttttttctcttaaagacttgggtgacatcaactattttcttggcatccaagtgactcacacagcttttggtttacacctctcccaaaccaagtatctcattgatgttctatgcagggccaagttctagtttgccaatagctttcccactccaatgtctggggggaaaagctctctaccattggaagtgatcctgtcaaagatccctaccattacagaagccttgttggcgctcttcaatatgcgaccataacaggaccaaagatctcctattctgtgaacaaagtatctcaattcatgcattctcctctagagtcacactggaaaactgttaaatgcagtctgagatacttgaatggcacacttgattatggtctcacacttcagcaatctacctctctcaacattgttgggttctatgatgcagattgggcctcagacattgtaatacctggtaaaaatatacatatattttaaattt

SEQ ID NO: 164390 - DNA, 3715 bp, Cannabis sativa
  modified_base (505)..(518): a, c, t, g, unknown or other
  modified_base (670)..(670): a, c, t, g, unknown or other
cttatgatgaaaagggatgaaattggatagaaaatgctgatggcacttggtctcttggctagctttttcttgctcgatagaaggagaaggagaagtgagggtttgcttttttttttatgcttaccaataaatatatatataaactttatatctaaaaaaacaacagcaataacaacaatactagtaataataataataaaaggataataatcccaatgtttatttttagcggcataagtacccaatgtttgtgaaactgtaatttttctctaatttcgtcagtacaagctctattatttttttaaacaggccacatataaggtccagattttctatcattgggtctagagagaaacatgtagtatcagttactttcaaatgttcttttaaaaaattcaaaacggagtctgtactgacaaaattggaggaaaattacagttttacaaacattgggtacgtatgccactaaaaataaatattgggtttatgccgcttacaaacttannnnnnnnnnnnnntatgccgctatttaccctaataataataaaagattattttattatttcttagttaataagaaatttctaaccctagggtatttggtcattcctaagtaccccaaaatactccgataattctataatcaacttatctcaataattccatcaanattactaactaataccgttgtgacgtttttggctcccgatcgagtctctaaggtcgccaaacatgaaaatatttatattctacaaatagctcatattacattcacacatgctatttaaatctccgtaatttataaattacgctttatttgttcatttagaacctacttccgagtataatatgaaactcatttagaacctacaattcagtatccttctctgactgatacaccaaccttgtctttatatcgtaaaagcctttcaaacgtaatcaaaaagtcctttgtcattctagttcctagcctttccttgtacctctaaagttcagagtcactttgatgggccactttaattctctctaatagattaaattacaatgtaatattatcaagttctcgaaccacaaactcaatccctgttctggttacatttccagcaacctttggtgaaatcttttcgttttacaaacttgtcctagacctcttcggtttaaagtatccactactaatttactttccacagtggtagagaatcacaccgttataattttcaattagctctaaccatggtcgctacctcctaattaaatctttccaaatgataaagtatttaaggctcctatgatctatatatacttcgcattttttgccaaacagataaaagtgccaaactttcaaggcggaagccactgctatcaattcaatatcatagctagaatactattactcacacttctttaatcgtttagaagcataggcaataattctcctggactgtatcaaaatataatttaatccttgtttacaagtgtcacacaaaatcacaaatttctcctcattgaccgacaatgttaacactgatacaatagttaacctctgtttcaattctcttgacttaattccactaagagtgtaaacatccctcaacaaatattctgcagtatcatgttaattccagaaaacctctaacctcagttgtaaacttgggtgttgaagttaactctaaactgctttaacctttgccgaatttatcaagatactatctttatccatctcatggcgaaatatgcatttccagtatttagcacgaagcttaggctcccaaaacattacaactccattcaaaaatacctctcaaataccttctttgagttgaaagaaatcaaaatatcattaataaaaacattcgcgaaagtcatcgagtataaaaagctgctttggaatacctttctcttgaatcttcaactggtaatgaccaaatcgaagaccaatcttagataggacagtactttcccaaaattaatcatcataacttctatctcacagcaaatatcttgccttaaacgctgaaattgatggaattcaggatccttgaaccttgcccacgaacatgaatagatcctcaaaatcctctaattttagctcaactaatataaccaagcattcctttttcccccacaactcaggaagggatcttaaccacctaatggagaataattagtcctctagtaaacaataaggtaccggaaccacttggtgacacattattaactttatacaaactttctaatcacccttctcgaaatataggaatacactacactagaatcaattaaagctatcaataaagtatgatcaacagaagttcaacttatcatggtagaaagaccagcaccagtctcagtctaggtcaagcaaacacctaaacaagaactaaaataccatcacccctttatttcgatcgctccaactgtaggcaacttctttctaaatggcctactacgccacattaaaaataggctcaagtttagcattcaccctaatgacatctcttgcatctcagtcctcacactcttggcaaaagaggttagataaaccacctgaggttagaactcgacaacccctagttgctatacaactatatccacattctgagcgatatactcttcccaccttcaactagattaggctccctagcggccttaacagccgcttcctcaaaacataatttttccaatcggtccagtttagtgtcattctccatcaccacgctgcccgggataaactatgtatgttctactaccttaccgctcaattaatctcttacttcatggcatacatttgctcccagtcttgtggtagtggaaagttcatacccacgctaccaactctgagcctggtaaactcaccattatccttactagatcgccctagttacatcttccagtacactccgaccatttctttccatcattaaaatattttgataatgctaataagcattaccacatttacataaacatatttaacaattttatcataacttatcatgcttctctaacagcttgaacatttcaaataagcaggcaattcatgcaatcaacaattaatctattaatcaactaacaattaacatttactaagccatgagtcgaacgagtcttcatagccaatgtacatatcaagccagtcttcaggatctttaaacctttgtcgctctaataccatgttgtaatgccctgaacctcaggaacaccacgtgtgtgttttaacttatttcttactaatatattagtttagaaaaagcatagtttaattaaaatttggtaatttaaaacatacatgtgaaatttctttttaaaataccactaaagtatggggaccccctatttataaaattttgttataacgaattgcaaaattgatattacaaaagtaaatttacactttaacacataaagaaaagaagtcgatcctgcttcctggaagccaagacaccacagctgatatgtatattgtcgggagacctctgatgaatggctgaacatagctaactttcatacctgcaccacgaagcacccgtgagtaaaaaggacttagtaagaaaagttattaaatcaaaagcattgtaaacgcagatattcacatctcaacaaaacatatatattggcgattcacgcaagtccatcatacacatctatatgattttaacatttatacaattacctatatgttacgcaataagaaaaccacaacatcttagtcaac

SEQ ID NO: 164391 - DNA, 1335 bp, Cannabis sativa
agtctattcagtgacaaaaaattattgaaataaaagttaaactcctcttgggcccatacccaattctcaaacatgcactatttatacacttctaatgaagtgttcctatcctatgtgggactccaattattcacacacttcacgtttcatttttatacaatttcacaaaaattccaacaggtacatactgaacctagccttccctcacatgaacaacctcaattgtgaaggtctatttgccttgtttagataattttattagactaatatattaatggagtttttacaccacatactaaaatttttaatttttttacatttttactgtgggcagaattttttacaaaaatactgtattttttttcaaaaatattgtgtaagttttataccgtgtactgtgttaagttttcacggttgttttttagttgttccactattgttttaattgttcagttttgttgttttatggttgttttataaaaagacagtatttttgtaaaaaaaattgtgtgacagtaaattgtaaacttttgctcaaaattcagtatttttgtaaaaatccctaaataattattattctctaaattttagaataaataattaaaatattagtcaaataattcctttatttttaaataataataataataataataataaaggaattttaagactcaaatttatcacaaaaaataataaaattttaaagccatacaaaatggtacaaaatctcaaatgagctcaccaaaaacgatttaaatgataaatatcattccaaaatttcactgaggtcattaacctcacaaatatctcaaaatagtaattttacctcaaaatggtattgtacctaaaaattcaaaagtacgcactaaaattaaaagtcataataaataacatcccaaaaagatgttatttacctcttaattatccaaaaaatctcaaaacgttgaaactacatttgacttgattcctataaaaggatacatagacaatttagttactaaaattaagtgcagttgtcaatactgcaaaataatataaaacacaaatcttaaaatttcataaaaggtcgtccacctaagaatttttccaaattttcaaatatatggctaagaattcttgaaaattgtcatatactggaattctcatattcaaattctaaaatattcctcattttagactacaagtggtttgattcttcacaaaaaggtatgtaggtagcctggctaattaaatttaccgagttcagctacacttcaaaattcacccaaattttcttaagttttttttgaattatttaatatcatcgaggaagggcgtaataagcgacgaaat

SEQ ID NO: 164392 - DNA, 1979 bp, Cannabis sativa
aattttgactcttcgatatttttacctgaattaacgtataggaaaatcataaaacaacccattaacaactgaacaacagaaacaagaaatgacataaaataattataataacaacttaaaatgacatattaaacatacctcaacatgagacctgtcacaaaaatgagtgacctttgtcttcagttcactaattacatccaaacacgcttaaaattaagctcaacaaaatctctgaaaagagtaaagtcatcagacagtttattctgcgaacaaataatttcattcactgtctctgtcaaaaactcaatatcaggagaaacgaccttcgttgatgaagaactaacatcagacagtcatcaaatttaaccagtgcacgatcattaataaaaatattctcaaaaaaactatccaacggtaacaacttaaactcttcagaagtgggcctcatgttcttcacttggacctataacaataacatcaaaaataaacaaatgtaaaatataaatttgacaacaaaaaaaaaggtaatatcaattataaaacaactacaaagaaattgaacccttacaatcttaagaggcaaataataaattttcaatgttagatcttgcaaacctagtgtaccttggccaagataatcaccactgccccaattcaaaattcttggaatatgagaatgaagttgtttgttgaaatcccatatcttcctcacacaacactcgtaaaaccacacctaaaaaacccaagggaaacttaataacctataccaaccttgataagcattaacacctacatgctcattctttttcttaagaccatgagcaacattaatcttcaaagagtgcaatctaagctcaacagactctataccacaagattactcgtcccatcaaccactaataataatttcaatattagcccgactaatctccttctccttagtgttaccaagaagaaaatagtgcacaaaacacaagacaacaacctttaaagataaagcatcatcatcccccccaccacaaacaacctaaaacgacaccttcaatagattttggagtaatatgtttaacaccatggaagcgtgagttaataaagtagtttgattcatgaacaaacttgaatttgttacaatctcccatacaatccacactcgtaatgagtgcaaactcctcaacactaaatcacacagaacgatcacaaatatttgcctaaaattccttagcattcgactgttggacctctctcaataaaattccatgaactattttgacagtaaaatttaaaagatagaatgtctaaaaatttaccaaactgtgtagaccgaaacaaggccttaacattcagagaaagattctcattgatcttacctaatcacttcataattacaagtagacacaactttcatcttttcatgatcaaaaatagggaattttcattcccattcctaagcaaacaaaaaggtaataaaaatagtgaaatgagaaaaatatatccaagcataaatggtaatacaattgttacgaaactacaagcaaaccactcaaaatcaagccataaatatttgttaagatttaggcctaataccaacaatgaacataaaaatacaaaaccaaaaataaatatcaagaaaaaataagaaaagtgaacatgtatacataaaataataaacttaaaaacggaacacaaactaattgcatgtattgaaatgtttgcataaataacaaataaaataaaaagaaaatatatgaaaataacatcaaaaagtaaaccctaaaatgaaattagaacaataaaactaactagaaacaaaaataaataaaattccagagctaggggtaaaactaaaatgaaacttcaaacaaaccttaagaaggacatttggttctttctttcccttctaaccgtaagttagaaatttttaggcaaagaaacctttgacttcttgttcattagtcaacgattacctttcacaacgtcgg

SEQ ID NO: 164393 - DNA, 587 bp, Cannabis sativa
  modified_base (526)..(556): a, c, t, g, unknown or other
ataatatgaacaccataataaataccatctttttatttattctattagcacttattaatacaattaattgtttttgtattttatttatttaattaaaaattaaaaatttttgttaacttttatggttaatattacatttgagcacaaatttcatggcatgaataatttctagaatctaaatcgaatttcacgtattaagctgctaaagtgggaagagtttgtttagaaagtcatccgatcaaactatcggatatccaattttaattggatcattgcttgtaaatttttaaaatctaattaaatcagattggttgttgaatgagacgtttgatccaatagataattgatcaaatcgatccaattctcatcaagttgtcttctaattataatcatatatatttttaaaatatttttattaattttattcttaagtttatatgtgtttataaataaatggatatctttaattatatttatgtgcatatactaaggcgtatatggattataattgttggaaattattttnnnnnnnnnnnnnnnnnnnnnnnnnnnnnnnttattaacatcctaaataagaactttctaaa

SEQ ID NO: 164394 - DNA, 566 bp, Cannabis sativa
tatttttataacatgtacttaaatgttatacacacaattttttcctttttggcgttttgtatttatgaatgatagagattaggaaaattaaaaaaaaaaatatatgagtagtaccatgtctccaaataataaataataataagcggtgtctagcatccttcttttcagatagatgatttttcaaaatatgcgtaacaaatttattcacagtaacgcgataataatttttaagaatcgcgagagaaaagagataaagcttacagctctagtatcggtggcgacggccatgttaacaaacatgagaatgaaggtaacaatgaactccaaagcaaaagcttggccattagggacagtaggaacagtgacaccaccggaacccgtcaagggatgaaacactgcctttaatgcaaatgcagcacaaagagaccccaacacttgagctccaatatacattggcacctacccaacattaatacacacaataaatatatctatatatatttttcatattaataataaaaaatttaatatatgtggacagtgtgtgatatttaagttttgagatg

SEQ ID NO: 164395 - DNA, 1064 bp, Cannabis sativa
atatttttattaggatatattattatcactcattgagtgtatggtttttgtaagtattttgttttgtctaattatctaacataattttaaattaaaactttattttataattgtatgaaaatatcaacatgactaatttcccttggtatattagttggcccccttggtatttttttctgcctctgctcctgtttgtatcgtgttaaatttttactgatgttctatgattattttttagttgttctactgttatttttaattattctgttttttttactgttgttttatgttgttttataaaaagacagtatgtttgtaaaaattctatttggcagtaaaattataaatttttgctcaaaatctaatatttttgtaaaaatcctaacactctacccacgtattacagctgccctaaaattattcattaattaaattatgtgagacaccatactagattttactaataacaatgtaatagtgcccgataccttttaatatttctccatgcaccttaaaacaaactccacggtgacactgatcttaacacacctcaacaatgtctatatcatatattcaaatatataatattttattttatatatctattctatatcatttttacactacaaaaaaattgttatttttggtgaccaattttttagtcacaacattattttttgtgactaaatatgataaattagtcacaacaaaatgttacttgtgactaaaacaagtatttagatacaagtcatcactaatttagttttagtcacaacaagtattgtaactaaaaatacatttagtcaaaaaaattgtaatatttgtaactaatacctttagccacggactttttaatcacaacatataggaataatgatttataattagttacaattttttcacttttagtcacaagttttattgtaactaaaagtaaaaaattttgtagtgttagaaacctcatgatactacgatagtttcaagatatatattataatctcatacatcattatttaatatatctttatttttatacaatttaaatataaatatatatatattta

SEQ ID NO: 164396 - DNA, 4949 bp, Cannabis sativa
  modified_base (875)..(882): a, c, t, g, unknown or other
  modified_base (965)..(967): a, c, t, g, unknown or other
ttatgttatgactaaaatgttgtcactacaagtaacaattttttgtagtgtaaaaaagttacttaccaaaagaaatgatgtatgtttcttcttcatgatgatacttttctatctacttttacaatactcatttaaaatgtgggaaataagatagggtactagtaggtgaagcttacaactatataagttggctatatatactagtagttttatcaacaagttcatcaataacaaagtgtctctattataaatattttgtagtagagtgaactaaaaactaatatatagaagatcaatatggaaggcatgggctattgtgagtgttctgttagtgagccttgttttgggacaaattcaagttgaggcaaagacttgttgtccaacaaccgctgctttgaatttctacaatgcatgtcgtattctaggatcatctaaaaaaacttgtgcatcactcggcggatgcaaaatcatttctggaaatacatgtcccaagaattatatatatgagactctcggaaacaatggtaattaaaataaataaactcatttaattattattgtttgcacttataataattattcattattaattacttaacatctgactcgtttacctaaggtggtgatgctgtcaatgaatactgcaagttggggtgtacatcctctatgtgcgatcccttaaccactctccaagactctagtaattaaaccttaattattatgtttctttcttactattattttaagggtaaatatcattttgaactctgtattttgtaaaagttactaattggattttcagctttgttaaattataaaatagaccccgtattttctaaaatagtacaaataagaccctgaactgattttttgtnnnnnnnnaatttaataataatctaatttaaatgtgttatgacaaaaatattttacattttctgtatctattcgtgttaggaattatcttnnngttggttatattaaaaaaaaattgtcgaaaattaagctcagagtcctatttttaccattttggaaaatacatggtccattttgttctttaacaaaatagagagttcaatctctaactttgcaaaacacaaggtccaaaatgatatttacctaaggtcatactaattatatgcaacttattaattgttttggtgactaactagatgcaagtgaagttgtgaatgaagctgttgaaaaatgtaccaaggcatgttttgctatttgcactaagggacgttctattaccgctactactactccagttgaaattgcctaaacaactatgtaataataaataagggatgtcgtcttttcttggctttaaataattgtcatatataatgtgacaaaaatatgctagactagtctaatgctatctagctacgtacatgtatttaagtatgtatgtatgtgtcgtagaagattgtcgatcctagattgtatattcttctacttgttgttattcaaattaataaagactcattaataagtgtcttttttttatcttcttctcaattattttggtttctatttatattctacacgttgtataaatttcactctcatcttatttaatttcaaaatcttttcctaccacattagatttggcctcaagaatgataccactgtgtgacccactcatcaaagtggttattaattttgaaatgttggaagaatatatattttttttttatgattgactggaagcaaaaaagaaaaaattaatttattgacaaattagttattgaacttaaaatttaaacaaaatttaatatattaacaaattttatatattgtaattatttttaatttaatatttaaaagttatcatgtaatattttaaatcggtctatttttaatgagaaattttgttaaattttttttaaaaaaaaataaaaaaataaaagctaaataatatatcttcaacatcacagaataaactaaattacaaacaaaattgactatactaactattttttttttttaccaacaatatggttagttctaatattttattgatgtttaacaacaaagtttaatacatatcaataagaaaagaagaataatcctcaatctaagctaattcaccatccaccttaagtgcatccacaacttattcatgagaaacgaacatgaactagggatgccttaagaaaactggaaagcaaactagcaaaaaaatctaaaaaaaaatctagctcatttcaaaagaaagagcgcttttaaataacagaaaccaaaactaaataatgaaattctacataataacaaagagaaagaacagcatgtaaaaccaatccagcactatcattaaggctgaagtttcagcttgaatgactaagaagtaaccaatgagttcagatcttctccaatatgtgaacttttcgtgttttgaagtatagataaacaacctataaaatactaaaaaatataaatgaggtaaggaattaatttatagaaaataaaccaaattttcaatatatatacttgtatataacaattaaaatatgaaaaaaaaacttatctatgataatcactgatcctccaataatctttaatgtatccaaaaatttatacactcaaaaaataaataacacagcaaaaatgcactaataaactgagaaaatatgagaatataatatcactatcctttttgtacaaaataaaataaaataaagagtaatttgcggcataacctccttaagtggccaggtttttgcaactaacccccaattttaaaattttggtggtaaaacccttaaattcgtccatttttagctgttaactgtcatggtggaatgtctacgtagactcagtgtacacgcgacataattttattggtccacgtaaataaatattttaaataaaaaaataaaaaattaattattttaaataaaaaaataaaaaaaattatttttctttaaaaattaaaaaaaaaatcctaatttcctaattccctcaaacttccatttggctaaaggagaacgacataaccttttacaattgtctggcatgagcagccccttcaactacatatgaattcaataacaaacaaaatatatgaaaataaaatacagcaacataatcaaattaagagagtaaaaggaaattatcaaatataggtagaggacattcataccttattggaagaaaggcgcagtgttacaaaattccaagagctattgagattcataaaaaaactcagcatactcataaacaaatttgtgttatctttgtcatgatgatcagaaattacgaattctccattcaacaaattggttgactctattgatatgttgcagattacgaatagaatatgaacttaacaccagtttttcaagggaagggcaatccatcaaagacttaattggttagcatatatatgatcagtagttactttatttgaaagccgaacatcttgcaatgataatgatttcaaggatggaaaaccaaatgagtaacaacccaacttattaattcccctaactcgaaaatggtcaaagctcttaacttgaatactgttttaggtaattaagcagtagtagtaagaatcataattctcacattttcctggttttaagtcaagactcaaatatttcttgacttattgttaactgcaaattaagcttaaccatttatctaggctgcgagccttgcttcttagacagcattttatctgaagcttgaaactaattacagccgaatcaacaataaaatacatacctttcttgcggtgttccaaacaattgtcaacataattttccaacttttgaaattgaggatcagtagtatagtagtatcagagaaagagagtttaggaagtgaataccatattaatttccaacgctttgaaaggatgcaagtccgaacccacatcgtttgtagtagggagaaattaatgagagaagatgttcaagaattaatatatgaggtagctcagataatctgtcctcacctttagcaatggatgttgtcttacttctttttttctttgtaagaccactattgcttgtacccttttcgactacttagaacatgaactgcattaaaaggaaaaccagaaaagaaggagaaaaattacacagcaataattaaaactacttttatatactacattcataactcaaacatgcaacttgaaaaaggtgttttctcactaaagatcatcagctgatcagtatggctattttgtcaacattatgatgatgtaaaagaactaaagatcacagatttaattccaacctccgtctcactttcacttgattaaagctttacttcttaaaatatttaaatgagtagagtagagcagtattattagaaagaaattaaagatatataatataatgtatacattcaaaccttatattacatgtacgtgtagaagtgtagaatggttatctcttgtttgttcaaccaatattaccataatatagtaaagggttccaagaaaggggaagatggaggatcgcgagtcttctgctgatctcacttctctctccaatccgacagcccaaaaggcaaaatcctattaataaattgattttatattacatcaacataaaccctaaaccctaataataatgggttaattgcgacaaaaccacaatagttttactttgcttgcaattaacctccaaaatttatattttggcggtaaaaccccaaaactacaatacttttagcaaattacaacttccatccaaatttaactgttaactgcgagattagattgtcaacgtggacacagtgtacaagtggacaattttattagcccacgtaaataattatattaaaaaaataaaaataaaaattataaaaaaaagatatacatttttttcaaccctaacatatttttttgaaaaaaaaatatattttttttctctaatatttttcttcttcaatctatacaccaccaccaccaccaccatccacaaccacaaacc

SEQ ID NO: 164397 - DNA, 1170 bp, Cannabis sativa
  modified_base (1117)..(1140): a, c, t, g, unknown or other
tctctttctttcatacttttgtaaaagactttataaattaatctaattacagatatttaatgcatgttcttgtcgcttttattattgtcttaagcccaattcaaattgcctagaaaaaaacaaaagaaggaaagttggacggaagagaatattatatatgactcgtgacatgactaaatggttcaaatgtatttttatatttattaattaatgtagaagaaattttaatagttatattaagtaagtaactatcataattatatttatttttaatcggagtattattaataactaatgactgtaattaatttaaaaattcaaaataaataattaataattaacttaatttaatattttatttttttataaaattttaattaaaattaaattattaataattattaattaattttttgcaatttattattaagtaaggatctttcaacaattaattttttttgcacttaattattaaaatattacactcaattttatttttaatactttaagtgctaaatcagtatgtcaatttcgggttagttcaaatcatttagtttttttaatttaaaaattaaataaaaactagtttaaaatctaataacaattataaaattaaaaaacaaacaaacttttttcttttatttctccttcctcatggtgttcaaaaaatatttgaaacaagtggaataaaattacatagtgaaacaatcaccgaaaaataacattgattgaggaggtggagcctcttatctctgaactctccacgctgattgattagctgtaattttatttatatttctagataatgtaattttgcggcttataatttggctaagtgagcttttgctaaaaatatataactgagatggtcgatcttgtcgagattccaaataacattttattctagtttttaattttaatttaaactcacttttattcaaaaaaaaaaaaaaacctctaccatgaacttggtgttttagtttttctttggaataattacataaggtactattttctgtaaacagatttcatttttacgtttaaagaatttttcttacatttttacagttttctgtagaaacaacacgaaaccaacaagaaaactacataaaagtannnnnnnnnnnnnnnnnnnnnnnnatcaaaacaataacaaaaaatcaacaacaa

SEQ ID NO: 164398 - DNA, 642 bp, Cannabis sativa
cttattaatattataatagtcttccctttcttttcgcaaagttattaatattatagtacttagcgtctcaaaataaatactgaatattataaaaaaaggaatataactcattaataacgtcttgtcgttgcctgttggtgatgtgaaccgatggcgattattgaacatagttcattattattagttgctctattttgaccaaacatttagagtaaagtactctacactttcttagtttaaaatgcttcatttaaattttatattctttatttatattgtatcctaacttattaatttttctttctacatcatttaaatattttatccaaaagaaatagaatattaaaaaggagaaaaagatttatagaagaacaaaataatattttaatacatgaatagttgtaactaacaaaaaaatagtccttaaactaaaatagctaagcatatacttcatttaatggaaagtaaattttgacattcttaactatatttttacatagttggcaaaaaaaattatattttcacataagttattttaactcacctgcaagtgttttataatagctaagagtatctttaatagatgtgtaaataagtagtgaaaagctaaaatatagcttatttaacaaaaagtatactcta

SEQ ID NO: 164399 - DNA, 1329 bp, Cannabis sativa
acggtttttcagttgcacatagtcttgctaaggccatctctaatgggacactaaaacactaaatataatgtagtttcacactatttttacttcaataggacactaaatatatcctcataaatggctttgtctacagtgtcccacctaatttagtgggacattgtagaccacactattttttttaaaaaaaaaatttaataattaaataatactttaaagaagaaaaagtaaataattatatatatatttagtattaaagtattcttattatattaataaaataataaaataataaagaatataaaatttagtgtaatttttagtgttgtggctggaattaaaaaaaaaaaattagtgttgaaataataattttttggtattgatttaacaccaaatttaaatttcctcattagagatgcgctaacggtggttctttccttagacatagctatggtttggtggccagcgattccagactttgtttgagtccttttgactcatatttttttggcttttgccttctaatgagaatatctcattttccttcaaaaataaataaataaaataaaataagaagaagaaaaaagaaagttggccttccaataattcagtcctgattacaattgattgaatcatcttcgtattatgttttgtgttggatacaaatagtataaattgtaaattttaatataattttataaaagtaatatgtaatatatttaaaatggtaaaagtaatatattttaaacaaaataatagtcccttttttatataaaaaaaaaaaaaataaaacagcaaacaatagagagagatcacatgtccaatccagtcctctaaaattaaagttgatcacttgttgtccaaataaatatgagattatacattatagtccaataatatgttaaataataattaaaaaaaaggattacaccatcattaaaaatgaaaggcaaactgaagtagactagatatgaatttttaaattaaataaaatctcacacagaaaaatatccgcaataaaagttcttttattggtggaactattgtggatagaaagtatcctttatccaatttatatctatatttatatttatattaaaatatatataaaaaaatggtcaattaataattatgtaatcccacaattgaatttgagggattggaaacctcaaataattttggtctgtagaattgatggagaattctattttttggtatcttacagtttgaattggcttatctataaagtaagtagcagtgacggacctagaatttttaatcttgggggcttaattgttataaaaatatttattatttactttacattaa

SEQ ID NO: 164400 - DNA, 1011 bp, Cannabis sativa
aggttctcgatcctattcataagtagtttagaaaagggaattaatcctttcaaaaatttaaattcctcaaattcccccaaaaagtatacattatgtactcattacacgcagagtaaccgtcagcacgcgcagacattgagccatgattgcaggcataactttcaactagcattaaatgagtcgaaattgaagagacccctagtcaaggtcacgtcagtttgtcattcgatcctaggacacgcgtcacccatccagacaagaatctaggctgagtgaaatccatgtgcgactaggaaggtcccgcacagacttggggggaaaatgttatccagttttttgcagcttgatgtggcaataggatcaaatgacttgtgtcccatattttcgatacctaggtggaggaaaatatccctagcagcctgcacatgactaatcaacatatataatagtaggttatctaagcatggttgtggagaagatacccaaccaggtagaagcatgttggtgccgagcaatgtacaagggttcagagattaatcttgattgtccagatgcaaagacaatccttataattgtgggattaagttagagagaaatggaaacctattctatttcctatttcgtatattataactatagaatcattttaatttcctattttgtgcattgtaagcaaaaggaaaactttcttttaattacattacttagtcgctttattatttgactcactatcgttggttaaaagcgaggtcaacacgatccgttaggaaaacttggattccactattgtataacatgttcccaaccacttatgttattaagctcccaaaacaaaagttgtaagaatcatcttctttgagaaactttaacgagtgaatcaaagaactcaatgaacacaaataggagtttatgtaaactcaagatgtaacgccctaatctatagggatgccacgtgtgtgattttataaactagtttaatactaatagaataattaattattaaaaaccgtg

SEQ ID NO: 164401 - DNA, 932 bp, Cannabis sativa
  modified_base (879)..(886): a, c, t, g, unknown or other
atctgagtatatagtggccttacaaaacgaaactaatcatactggccttataattactataccaaaacttgcatattatccttaatgagacatttttatacattaagtaggattaaaagacagatttttagtttaacaaatttttttcttttctattaactcctgaaataatatcatcagaatactaggttgttctccttaaaccatatgtatcaagagctattagagctccattaagaatattatcatttttaaatagaatttaattaattttgaattaaattatttttattaaataattaaataaaattttaatatcttatttcaattatatcacaaaatcaatttttttgtaatataattaaaaaaaatatatctataatattttaatataacctaattagggtcaaatatctatagctagattgagaaaaaaatctacaataatatgagttggtgttgtacctaattttctacaataaattacctcaaaatgaaaaaagtcatacattttataatttcatatataggcactacctaaaaaaagttgtgcctaacacaacaaaatttatttgttattaaaaattaatatatatttacttttagccacaaattattactaatgttgttttaatcacaaataaatatttcaatttgttacattttctgtggttgtaattatatttttgttatggttgttaattattttgttagtaagtgtttaatgcatttttactttttattagctaatagggtatgagctagagctagagcaacatttggtgagataccatatagtggacactaggggttcttgaagcctaatcaagggatttcaactctttttagaaaacaccctgttaattccatttttggcannnnnnnntgacaaaaatattttattatttaatgtatatttcggctggcatata

SEQ ID NO: 164402 - DNA, 1441 bp, Cannabis sativa
  modified_base (342)..(343): a, c, t, g, unknown or other
agagagagagagagagagataacgttgaattttaacttttctacttttggttaaatgtattaatctaaggtattatctaacttattttaataaatatcttcatattataaaacataatataactccactaaaggacaaagaatttatatggcaaaagagaaaagactattttgcctcttacttaaccaaaaagcatccatgcaacttaggggcattttggtcaaatctaatacttcgtattcccgatattcttcttactttgaatattcttgacactcccaatgtctatctaatttgtcccgctatttctaaaatactaaaccataagaaaatgtgactctnncggccaaacgtcgcgttccactattaccggacataaaatatgaaaaacatgaaattttatatacaacataaataacacatctagaattcaaatatatcaccataaattcataaatcataattcaaagtaattccaaattaaaccataattatcagctaagtctcatattaaaattaagtgatctttacatatctaattttatgagaagagaaaaaaactatgagagttacacttatgagaattgtctggtcataagaagaataaatggatcaaaaggggatccaaacttctaaaatgagtcataaattggaagagtaattttcgactcaaataaagtgaatccatgtggattcaaatattgtaagaagattacaagattggagaaacaattttgactcttaataaaatcaaagtggtgaacaaaattgatgagaatttgttaattttagtttagtatttgggttaatctcattgaggagacaactatatataaaatagtaggtaaaaataatcatattattttataagtggtgatgtctgtttgatattttagttttgttgagaaaaataagaacgtcaaatgacatttttctaataatgatctctaagaggcattttagaaaaatgattaaactaaagttatttaaataaggggtttttataatactaatttttggggaaaagtttaaaattttactgtcacacagaatgttttacaaatactaaccttttataaaataaccataaaacaacaaaatagaataattaaaataatagtggaataactaaaaaataaccgtggaacaacagtaaaatctgaacacagtgcacagtataaaaaacactgtaataaaattccaccccacaataaaaatataaaaaagttaaaaatttcaatatgtggtgtaaaaacctctttaaataatgtggagattatttagataactaatattggtgaaaagtgattcttataaaaatttcactttatgctagaaatgtggagtaagccacaaatttaattcaaatttaaaatcaagtttggctatgtgaatatgtgaaaattttgacatatttggtgtcaaattttggtgaaaaaaa

SEQ ID NO: 164403 - DNA, 1127 bp, Cannabis sativa
ttaataacacgaatttttaaattaaaaactatccgataaattaaatcgttttgattaaattaaagttgatattatttttatgttttatgaaaacggtcactttaataatttgcatttaagaatagaaaactaaaaagatttaatttaaccattatttcgccatatagttaatatacgtattattcattgttacattttaattacacaccaaaataatgagtagaattaaaaatagtagcacaccttcgtgtaatcgtgactctcaaattacattaaaagtccatgcaaagaaatttaggtaggttaaataattccaaaatttcatctcaaaaagaaaaaaaaaaattgaaaattgaaactttttccatgaaattgtcagtggaagaataaatacatatagaagtaattcgtatgacataaatataaattttcgtagaaaataacttatttctacttatgtcttatcataacatatggtccaccatccacgtttttaatactttagtaaattttgagctacctatattaatacctaaccaattctatccaagaaaaatatatatttttttgttggataatgtttgcagtttaaattttatgtatttattcttcatatttatatatccaatccaacaaaaattctaacctcacctttaattttttcatatcttttctgtattaattttttttatatatatatataaattattctctagtaataaataaaataaataatattattaaaggggacaattcaaggttgaaacgacaatgtgttttgttttatatataatgtccatcttgaatattctttttttctcgtagagtatttttatgtactatttcattaaattagtatgaatttttttttgttatattttagtagtatactaattatgcattaaattagtatgtattaaattatatattgatagtattagattttaaatatacacctgtttaaaatatttttttacattctcactcttattttattttattttaaaaaataattttatattttagtccttaaattaaaatttatcgcaaaaataataactaatttaaaacactaatatatttgaaaatacaaaataagaataacaaaaatattctatcaaaaaaaa

SEQ ID NO: 164404 - DNA, 732 bp, Cannabis sativa
aaaaaaaaaaaaaaggaaagtgaaaggaatttttataaatagaggtcaagaaaggccactagccgcaaaagctggggatcttcacatgtcacatatattatacggtgaatcctactttttgaacattatcattatactcttataataaactttatcctaaaaatatatttcatatcatttttggtaaaaataaaaaattaagagacataaaattatgactttatggcttaaaaaaagatataaaataataaataaattatgtatatagagagttggtgacaattaatgtagactacaaaatatgaagatcctgaaattgagcgtgttcatcataaaacgacgtagggacatcgtaactttaccttattattattattattattatttatgtttttatatattaattaatttgatctctccttctcatcttcccagaaaaacagcaactgctttttccccaactcccataagtacaaacaaatattgttaaaaatgtaaactatgtaattattggtttttttttttttttcattttattttgttggtggggtatattttggtacgttagagcatctcagactcagagtatcaaaaaaatagtctattgttatagtttagcacatttaaaaaaaaattatgctccaataatattttaaaaaatgtattaaatttggcacatactaaaaattttactaaatttaacacagatataattaggggtgttcacaaagt

SEQ ID NO: 164405 - DNA, 1450 bp, Cannabis sativa
taactttctattatttagggtttcatcataaaacgatcatgaaaggagctcttttgcttcacaaacaacaaaaatcaaccctaaatctcaccaatttaattaaagaacaatggaagaaaatttggtagatctccatagacgttggtaagaaatttattgtcgatctccatgaatgccgataattttttactttacaaacaatttaaatattaaaaatttgtcaaaagaatcatttttatgtaaaaaaatttaattctccaaatttagttatgagtttatatttagagtaatttacagtataaatacctaagtttaatttataattacaaatataaatacttaagtttaatttttaacgataataatacttataagttatatttttaaattctataagtacctgagttagactaatatgataaattatttaacacttaacaatcaggtatttatcgaagttttagaattataaattatgtattattatcgtaaaaaattaaacttaaatatttatactgtaaattagtattcttattattattttgataaaccaaggtttatttatgaaattgaaaagaaaaatagagtgatgtgtggaagggacatgtgagagttgtacaattattaaaaattcatggatgagatttatatatcccattcccacccactttttcttctttaatttattactcaaagctactttactttattttttacctttatataactaattaaagaaaacagtaaaaaaatgtacaaatgtttttggatttattcttttaactaagggacaatattattgttatttggcattattcattttttatatattatattattattattattttggcaattatttcatttattttatgtatacttggaaattgataatattggaacattacgaacaaattgtctcatttatcataatgatacttaattaatcttcattttctttaaactcagtctaatattaatttgtattctcttcactaattaaacaaaatatatagtattatcatccttgatggaatgtttttttttttctttaataaataaggattatatatatatatatatatagattatgactcacaaaataaatagatattgttatattatcttttgcacagaatttgagaattaagttttggttttccttaattatgtaattattgatgattagctaagcatgtttttagaagttactagaaaagtgtgttatgttcatatatatttctttttggtttagtccaaactccaacattttggaaagttaatgatacatttggttattaattaggtcaaatcccctaataatgtggacaaagtctaatctaagtggaagaaatacaatgcaatcaataaataaaagagtaatttgcggcaaaaccccctcaactatcaatttacttgcaaaaaaccatccaacctcatattttggtgg

SEQ ID NO: 164406 - DNA, 936 bp, Cannabis sativa
atgacaagttttttcttaccaggtacactctgacgactcaagccatattaatactatgggacttttttttttttttaataacgatttattaaaataacaatttttgaattcttaatttaactatttttatttttgtggttaagtaacagcaagtttaacgaaacgaagctacgtgccagaaagaaaacaataatatcttgatattaatttgtttcaaatcatataattaaacataacccattaattctaaacatatttaagcatatataattatacatttgattattggtatttaatttggttagtcctcttttaaatgttttgctaagaaaattgttgattaactatattttcaggtgagtttttcttgaatttcagctaagatgtttgttataaatgtattctttgtgtctcatttaatgcaaaatatatttgttttaaagtctaaaatcttaatttgtgtttttagaagctaatttccgtaatacacatcagtagtcagttgtagaccgaacaaaaaaaatgacatatacatttttatgaggtggagtagacacaacttaaaagtagtgggtacgctaacacttcatatatacattttatttatatctacatgctatatttcattctcaaaaactatttatagtttcttcacaataggaaaatgatttcttttaaggaataggaaaataaaatttaatttcaaatacactaacagtcacattttgactattccttttgttttctttatttcttcaacaggcgttcaatttttaaaatgctattgcagatgataagacagtttgctacatttttttttttgacataatttgattttcgttaaattggtattagacaagtaaatagtacatacgtgtctagcacgtaacattaaaaattataaattataatatttagataaacataataataatc

SEQ ID NO: 164407 - DNA, 821 bp, Cannabis sativa
aaggattatatgtttcaaaaatagtactattatggaaatatgtatacctcacatgttctaacaaaaatgtacttttaatataaatcatataaaaagttattgtttatttattttatcttggtataaatttgtgataccttaggagaaaacatcccataatctcttccggtaccaccagcgaagttctcaccaccggcggcttcaatgtagctaccaaagctggtgatgccaactacttcaatgagtgaaacctccactggggaaggagatgggacaaagattgcattcatgggattgtctgacattccttggccaatcatgggctgatccaacaccagggtgatgttatgggcccgaagatgctgtgctgggcccactccactgagcatcagaagttgtgggcttccaagtgccccagatgatatgataacctcgttattgggcccatttcttaggtaagccttgtgtctattcccttctgagtctctaaagatcactccgtgagccatgggccttgctctcccttttaatggtttataaccaaaaaaaaaaaattaatgaattgattaagctagtaccccaaattaaatagggataatccaatgaagtataattttttgtaaaaaaaaatacatttttacatttaatttttttttttatatattattatggttattttttataaaaacaacacgaaaataataaaaaaattacataaaagtaacgggaaaataacatccaaacaataacaacaaccaaaaataatatacaaataaagaaaattaacagcaaattaacaagagtacaacataaaaataccg

SEQ ID NO: 164408 - DNA, 1820 bp, Cannabis sativa
tttttttggtaatgagtattaatttggctttactacaattgatatttttttattaacagtgattcgaatttttgaaaggataagttattattatttaggataatgtatctttaataatgttgttaactcaaaatttgaaattataaaccaatttgaacaaaattaatttctacattattgtctttaaacaaaggcaaatattatttaaagttaattaataaattaacaaaacaatcttgctaagtaaactcttgttattaatgatatgaatcggttaactcttaaaaattgacacgtaagattatctcaaaatgtaagatatataaataatataaaatttagttgcaaaaatcaataaatgacactttataaaaaataaaataaaataatattaattgatgacgtatttacatgaggaaatttgaatttttatgtttcatcttacacggtatgggaaaattacaactaaatgtgaagaatcaaatcaattaaaatttaaataattaaacaattaacaatgacaagattaaaaaatcatgaataataatcgttaaaaatagtgataaatagagtgtgaaaaaccaaaaacaaattaaagcagtataataataaaataaacatcaagatatatattggttcaaatccgttaaatcgatgtgatctatggctctactctaattctggaataccaccaaattctctttattgattgagtaagaaaatgtacaatacagtcgagatcgattctctgatgaggtctcacaaattgtttcaactctcacgatcttaccttagaatcttctttatctacaaaagattcttcttacaaaactcaaactcaatctctctcttttctctatatatctctctctacctctcaatcttttctctctctttcttagtttcaatctgatcgttgtctcaaaatgataagtgaatgtggtatttataggccttaggatcaagatcttaaaggtcggtggctgtaagaattgaggttgttaagttagttaggcaataactaacttaatcaattctcatttgagcaaggtctccacgtcagcataagtaggagtgcattcgggagcgactatgagggctttcggaatcactaactcacaaaaaaaggtcacatctccttaaaaatatccactcagggtcggtccaaatattttaggagccttgtgtaaaagattaaaattgggctttttgtaatatatatatatatttatatatatgtacattaagacctccattgctagttttttatttattttttctttttttaaagatatgtttctaaacttttatatataaattttttgatgtatttataacaataataaaaaaaacttttcctataaaaaaaatgagggggcttgtgcaatggcccaagctacccaaagcttggatcggccttgtatccactcttaggaaaagatctcgattgttgaaagatatacccaaggttttgcatcttttgagttttgaaagatgagtcctatcagtaagcaacatcctcccaaatcaatttgaccagtttagtttctgtacatttatattgatgttttggacttacattaatttttattattttattaaaatttatattgattggataattttttgttgtgttaacccatattaagtgatatgtagttaatgagtttagcatttatgtgtgtaaagtctattaaagtagaagcgtggacttttctagttaactaaaatctttgatgagcatgtctagtccaactatagttatgtaattatgtctcttttctaatttataaatacatattgtctcatcacaattgtat

SEQ ID NO: 164409 - DNA, 1756 bp, Cannabis sativa
  modified_base (1525)..(1541): a, c, t, g, unknown or other
atcatatttttgtaataaaattttgaaataccattttcttttcctctctttatcctttacaaaaattattattaaaatattaaaaaacgcacaaaatggttctgccatgcagagcaagtactcgagtagctaagtatagtgtagtagactagctctttgcttaatctccaagtcttagtctcttcaccattattcttcattattttacttgtttctttttcctctttcttctgctttccttctaattcatagaaattgggttttcattcggttgcaaatatttaagtcggtcttcatatattttcgaagttagaatcaattttgggcaattattgtgagtttcaatttgttgatcgatcgtgttaagtttaaccacttttgtttttgatttattgtatatgttttttttttttttttttttccaattctatgttatctgaaagattatttaaaaagtttaatccagtgtacatttaaaacgcaaacggaaggggaagaaaggttaagtcatatgtttccaccaaaagctagctatttccgtctcaatggcatgacaagttcctttagacaagaggaacacagtcatagcttaagttgggagtgattgtaatactgttttaagaagaatctcctttccagcacgagaaaaaaatttaccttcccaactattgatctaattgataatattgttcttaataaagtcaagaataacatttttattcctcccaacaatattcggtaagcctaagtaaagactaccatcgagagcttcagccataccaagattggtgcagatctgagctctaagggaagcttcaacatttgtactaaagaataccgaagactttgaaacattcaccttttgccctgaagcttcttcatatgtatgaaggagagtaagaacactctcagtagctcccaaagaagcttgacagaacaagtaactgtcatcggtaaaagcatgtgggtaatcgaaggagccgtcctagccacacgagaaccttgcaagatgcgattatcttcaaatttctgaatcaaagatgaaaagccctccgcacaaataataaagagataactagaaagcaaatcgccttgcctaataccacgggaaggtaagataggttcgattgtctgattaccatggataatagagtagctaacagatgaaacacaatgcatcacaagagaaatccatttctcagcaaagcccatacggttcataacaacctttagataacccaattctatacgatcatatgctttgctcatgtcgagctttaaagccataaaacctttcttccccttctgtttgcgctttaataaagccatcaaagttggacttcatgaaatcttttcagaccattttatgttaaacatgaaagagatattatcttagtccaatattaatagactagaaaaatatttctagtccaactgcgctggactagaaagtggaccccgcccaaataatgcaataaatttatattgttatgggaacctctatttttttaataataataataannnnnnnnnnnnnnnnnataataataataataaataagtaataaataattcaaattcactaaataataaatgataagaacacaatcatcatgattatatgtttataagtttaagtcctcttgcctaaaagtttaatccagtgtacattatttaaagacttatcatgattatatatttaaaagtttaagtcctatgatttgtcagtacactggatttagactgacatgataat

SEQ ID NO: 164410 - DNA, 644 bp, Cannabis sativa
aagtagacagtccaattataagtataggttagtttatttcttcttctctttatagataaaaaatatatattttttatttagagttatatatttgggcccgagtcttcttggcacgacttgaattcgggtggcacgagcacatcacaccatgttaggaaaaagtatgggtttgaatttaggagaacacaaataaatatattacagattttgaatatagcacaaaaattacagatttaagcatgaaatgacaattttgagaacacgacattaaaacacaaatatagtagcacgaaagcaaaaacatgaaataaaagtacaaactaaagttatgaatataatttttttaattagtaatccatatatattcttttaaggaaaaaagagttattttaaaattatataaatattatttcaaaaaatttaaattattttaaaatataaaattacaataatattatcatttatgtttaataaatttgaaactggtttgaaaaatagaaaaaagaaaaggtaccaattttaccataaggccactgtaacgcccccgtttcaagtttctattgggtccttacatccacggaatgatattttttcttatacacgagtacgtcactctggctgcttcctgttgggttttatgccct

SEQ ID NO: 164411 - DNA, 664 bp, Cannabis sativa
tatctaaataaattttttaataaagaaatacaatttcaggactaaaaattaataaatttagagtgaaaaaaggcgcgcgtagctttgctctgcttctcccatggcgaagaagaagaggcaagttcgaaagcctatcagtaagcctgaaagagctggtgaccgacctgtttctccagctgaggatgactgcgattctactgggaagggttcagaggtgtttaaggaagccgtcgacgacttgggcgaggaattaggtcagaccgagaatcgattttctcccggattaccggattttcatactccccaggtcagttcgagctgggctaaagaagtggaactcgaacagggtggcgatggaggtcaggagctgtttcaagattctgccaagagcttgtggcaatcttttgccaaagaaaaggtaatctcccgtgactcaaagctctcttttactgaacctttatttcaagatggtgtgaaaattgcacaagttgatgttgaggaagttagggaacaatctgaatcttggaattcggctgtgatttgtatgatactgggagctaatcccccattagcagtttttgaaggtttcctaaaaagagtttggggtcatcttgggatagttcagattgctaggatgtcaaaggggctggttatggtgaaattt

SEQ ID NO: 164412 - DNA, 3238 bp, Cannabis sativa
agagagagagagagagagtacaagtagaagagagagattgaaaaaggtttttaaattcagttctctttctattgtttattcgtttgttctcctgttatatatcatagatatatatgtatttttaaaaaatatatatttgaaaccctttttaagcctataaaataaaaagataatatttattttaattaaaaatttaaattaaatgtcatataacataataacagaaattagttatattcttttattttatatgatcttttaaatttaaataaattatataataatatatttaatataataattaaaaaaaattcacatgagtttttacatgtcatcatacacgtgtgggacaatgcatgcctacacatgtgggtcatgttttaaagccccaaattgatttctcaattttaccataaataagatttattatttattttgccaacaaataataattgattaattctcattaatctcttattttattaggataaaaataaatattatctttactaaaataatatatttctccatttaatattatttaagaaaaatattacatttaactaattaatttagctttaataaataacactaaatagttaaatacctctttaattatacaattgataattgacaattattaaaaataatagttttcacaaaattactattttttccttaagaattatttcttatagaaatcaattctttcccaaatttattcatcaaattaaacatttccatgtaaagtgatttatcactactaaaaaattggttttcccgatagttttaaacaatcaggtaaagtattcttgtcgatttctataattatcgcctattcgaccgtcgctaaatagaaaaaatgggcgataatttataatcattcttgacggtttaaaattgtagcctatgatagggtatagaccacaatttataatcgtgcctaatactataggcgacggtttaaaaaccatcgcttattaactttcataggcaacaatttcaaaatgtcatggtataataactcattttttattattattttaaaattttaataatcttaaatttttattttatatttgttcatgtcataatcataattatcaaacaactcgagcataaatcgaaatttattaataacacaattataattacacttcatagtgtactagtttaggcttacaaaattttatactcaatcctaattttatcatcatcaactatgaagcaaaaaaatatttacaaaatgaaatacactttttaaatcctaagatctcaatttcaaataacgtctagcattgctctaaagaaagacttaacaatatacctgcacattcaaaaaaaaaaccattaattaataagcatgatagacttataaagaataacctagctaccatattgcaaacatatcaacactaaaaaattaaagtttttaattatttcaatataccaaataaactttataaaagtacaatttaaaactaaacattacctaaactatattaaagttataataaactatactaaacttttttttcctaaacaattaaacttacattaaaaattttctttaccaaaactacattacatttattttttctagtaacaaattaaacattattaaaattaaaatgctataaaaaaatttaattcaaaatatactaaggatatattctataactttttagctatgcacaatacaatatcactaaaaataaattaaatttcacaaaaagaaaatcaaaatatacatattttatattttaaaaacataaacattacctaactttatcaaaataaaattctaatacttagaatatttaatttaaataacaaatatacctctattcaaattaaaatattcataaattataaacttaaaatctaaaagaaaaaaaaacttaatgcatttttaccaaaatctaacattttccctctaatatttatgtattattagtaaaatttatcctaattctattaaaattttgacaacataacaactgtaatcatacatttttaaaaatttcaaatgtgtaaaaaataagaaacaaaacgtacataacacaatacaaaacaaataaaataacattaattatacaaaaattatccacccatctgtatgcagaacaattaatcctagaacttacttcactacggataaatatataagatattcaaactctactaaataaattattataaagttttagtgattatacatttctttaataaagctattagctacttttacgctctttaataacatcaagaacccggtacctaaaaaataataaaagcattaatatttattgaattctaaattttacaattaccatcaacttatatatataaatatgtatgaactaaaaatacatatatatatattactgttaacgcgaatttttgttaactaaatttgagccttacggtaatgatttcacaccaaaaaaataaaagctatagaaaaattatatatgaacatagggtcttttttacgtggttttgcagttaagattctgcatagtccacgagtcaatcttattcagatttctgattgtgttagtttttttcagggtctctctcgtatgagatttttcccccctttttgatcttgtctgccactatttataattacatagtgatcagtaaattacacatttgattgtaatatgtttacaacaatcaaccctaaaatcataggatatgattacatatcatacagtgtaaatgcggtttacgatttgtaaatcgtgtagctgtgattttcccgcttttactgggtcaaaacaatctgtattaaacacgtctttaattgttgtatctggagatgtctcgacagaaacttggttacagtgatctcaatagcgagctggagacattctcccttccgaggtcgacgatgtatgtctgatgtcgatcgtgattcttatcctcaaagaattcttcgaggctcatttaaatgctatctcctggctcgctaggattgtaagcctcactgatgctaacgagatgaagttatatccagtcttcccataacgagacggtcacctcgcttacttgttcttgagccgatccgatttttacacttagtttgttcattgtatgctaaggactttcacgattgatatgtgccgctttcatcttccaatgtgttctgtccttgatggctcactattcatatttagtgacatatggtttctcactaatatactaagtgccagtttgtacattgattcct

SEQ ID NO: 164413 - DNA, 1546 bp, Cannabis sativa
gaaagaacttgttgttcattaattagaaaagtagatgggaatgaaaagacttacttggagcagtggcagaaggtgttttacaagctctggggtatcaccatgatgcccaacacttctaattgggtgatgacccaccacaatcttccatttggcatttgattctcccaatgctttttccaaatcctatatatatatatatataaatatatttatccaatcaatatttatttataatatatattttgaatatatatacgtcatgaatgatcatatgaatgaatatttataccttaagagagttggcaaggtaagtccttctgggatatacttgtctccaatcataactatgttcactctcagcaaagtaattctcaacaaatggagtcgtgtccacaaagaagaattctgccgtttctatacttaatcacaataatatatatatatcacatatttcccaaatcaaataactccttatattcttttcacaaaattacattaacaaaaatgcatcaaatatgataaatatatacttagacaattatatcctaaaaaaattatattattcactatatacctacaaaccaaatcaaaggaattatttgaacaggttggtagaatttggttagaagtaatgagaagatatctatagtaataaaaataaaaataaaaatgtgaataagaataagaatattattgaatcaattttaaaatgcataaaaaaattactatttttttttttatcttgaattagaaagatttttcattctctttcaaaataaaatagtaactattataccaaaatgataaaaaagattatcttaatatttttaaatggaacaaaataaattaatggaataaaaattatttatttccatttcattttattttatttttattatctctaactaaatatcacttaagtagcgttgataatgtaacaatcaggtacctgtattaagaagaaaagatgttaggcaaaaccagcgagtgtcaatgtttcgaagaagagggcttaattgtgcctctacatctcccctgtagtcatgatttcccaatactataccaaaatacattattaattcaatcatatatataattcataatcttatcattataatttgatataaaataatgtaaacttacttgtataccagtgcttttgaaggcttttagcagagtaaacatttgtgaatgagttgtgaaatttaggatcagttacgctctttagtccattatcatagaaattatctcctgctgatatcacaaaatctatatctaatttctctccaatacgtcccatctgcatgtaacatgcatccacgtaataataataattttacacaattaatagctaccttatattagaattaatatatgcacaattctttttaggtcattaatataacataattttatattatttcatgagctacttaataatttgttcaatatcatcattaattcgagaaacaacttaactataaataagtagtagtaattaattagcatcatcctcaactttaacaaaagaacaaaaaaaaaaaaa

SEQ ID NO: 164414 - DNA, 930 bp, Cannabis sativa
ttttttttttttgcaaaaaaaaatagacaatcagctttagaaactatgcctattgagactacaaatttcatgatcagttttttttttttttttttttacatttattatgtataaaaggatgaaaaaaaaggtcttttaatatgggggccctgtgcaatggctaacactactaaaaactcccttttaagtccataaaagttggactagataaatttttcgagtatattttgtgttgaacatgatagctcgggacataataaaatgagtatttttctagtaatatgacccataaaagattttgctagtagcgtctttgtgaatggatctgttaggttatgttttgacgtgaccttcaaaaccgtcacatcatctctctttactatatatttcttagtagatgatgcttcctctcaatgtgcttgccttcttgtggctctttagatttcttggagttggccagtactctactctactctactttagtagagcaccaaaaatttttctacttctagagcagtgtaatttttttttcaaccaaattgcttccttagctgcttcgcaagctgctatatattcagcttccatggtgaatatgcaatactagttttttttaatgcttctccaaactacagctccttcaccaagagtaaatactgacccagatatcgactttcgactatctttgtctaattaaaaattagaatcagtatatcccgtaggattcaactctccaccaaaatatacaagcatgagatctctcgttctccaaagatacttgagaatgtgctttatatctatctagtgttccaacactactacaaaattgagttttcccaacggttaataagggggtcaattatgaaaaccgttggaaaaagtaagtggagatttttcccaatggtttaaaactgaagcaaaaaaactgttggg

SEQ ID NO: 164415 - DNA, 5167 bp, Cannabis sativa
aagctgatacaaagtaacagctgtcaccatgttcaggttccaattttagaggtcatgcgccttgtttttgctcctgctaacaagattagaaatcgaactaggccaattgtaaactcccaggcaagtgttcacatcttcaagcacttgtttggcgaagatgcagctgaaaaaatcatggccatgagtttctaactcagcatcacagaccagacacaatgtgttctgcaatgaaaccagtctactcagaaagtctctagtgagcagttgtgagttaacctaccagtaaataaatctgtgcttaggcaccaataagttattccaaatagcactagcatacttagctttagacccctctaacagcaggttataaaactttttggctctgaactttgtacctgtcacagcaagcctcaacttggcttcatctgtgttgtcacgaagattcagcaactattcttgaaataccagatggtatcacgattttttgggaagctccaaatgtcattgtcttccaaatagataaagtttatccactttacccacaaacaatcttgtttgttagataaagcccaaagaaatttcaccattagagccttgttccattttttaccttctcggaacccaactccaccaagacccttagggagataaactttttcccaagaggcacggtgaagcttgctcttattccctttggttccccaaagaaaatctcgacaactcttatcaatgacagttgtgaccttggaaggaataacgaatatgctcatccaaaaattcctgattccaagtaaaacctagtgaatcaattgcgcccgaccaacaaaggataagttcctactagcccagtagttcagattcttgtttattttatcaaggatcacaccacaatccgagagcttccatttggttagacgaagattgactcccaagtatttgagagggaagctgccttcttcgaaatgaactaagtcaaaatttggtctcttcattgacgaaaaatagatgtgagattttgctatgttggccgataaccctgtagctttgcagaaacacatgaaaacttcataaataagcttcaccgagtttacattccctatacagaaaataacaaggtcatctgcaaaatacaagttagtgaagcgcaagtgcttacacagtggatggtaaccaaacccattcttctgaataaactgattacatagtctagtaagatactccataatcacaacaatgagcaatggggacatggggtcaccttgacggagacttttttccctttgaagttgacttgaattctaccatttaataataaatgatagtgagttccttccaggcaagtcattatccgcataataaactgtgaggggaaacaaaaagaccttaaaagatcctcaacaaatttccaatcggcagtgtcgtaagccttacttaggtcaatcttcatgatgcaccttactgatatatttttccttgtataccctttaagaaggtcttgaaatatcatgatattatgagcaagcaatctatttttaataaatgcaccttgattattctgaacaatgttggggagcaattctgaaagtctggagcaaatcaattttgaaatgcatttataaattgtgttacaacaagcaatcgacctgtagtctttagcagaagtcgggttggcaatttttgggattaaggatataacagtttcattaaggtgtttaggaagtctaccactagtgaagaatcccaaaactgcatttgaaacttcatctccaatctcgctccacgtgtctctgaagaaacccaagccaaaactatctaaccctgggcttttagcagggtgaatactaaataaaactttcttgacgcccccttgttaaaaggtctaatcaaattgacttgttccaagttgagacatttcccttgctttatacagttgacatcaatactgccagaagcattactcttgctgcccatgaaggtctcaaagtgcttcacaaagtgttttaccactttcttataagttatcaacaattgtatctcctttcataaaagtggtaattctattctccattcttcttttcttcatagccatatgaaaatatctagaatttttatcattgaatttaatccactttatcttgctttgctacccaagcaactgagtatatctgtctttcgctatcataaattattgctacaaatttgaaacagcaagttgctgcaacacatcggtcgaattagtagcagcttcctcttggatgaggcagtgcctatccttagctaccttgtactccatagcaacatccccaacattgctcctgctaaagatcttcaactcatgctttaatacgaacattttctgcaccagcccttcaagcccaataccagtaacatgcttgttccaattgtccatgacagtttgatcaaaccttgagtatgaagaccagtggttcccataacaaaatggtttcaccccaacattgttaagctcttgattacgaattaaacagaagcagtgatctgagacaacctcccacttaaagcaagcatctgtgttggggaattcgtccaaccaaatattgttaatgaaaactctatcaagtttagaaaaaatcctgcctcctacctcatgcttgttaatccatgtgtaaaatgaaccagaacttttgaattcctcaacttgacccaatgcaagccaagattgagcatctaaaatgtctttactctgaataggtctccccacatatttgtcttgaaaactaaacatagcattgaagtcaccaaagatgatccaaggctcattaatcttcccaaaactagcaagtttatcccaaagatatttttgggtctccatcgagttactcccatatatagctgtgacaaagaaagatctcttttgcccacaaaacttgactttgcaatgaacaagctggttgtcctcactaatgacattcacctggacataattcttctgccagagaagcagaattctcccagcaaccacattaccagaatagaaattttaagtaggaaaattattctccataatatcaaatattttctaatgtttaatcttggtttcaaataaagctataaaaccaattttattcaatctaaacacatcaagaatagcaagttgcttatcctttttattcaaacctctcacattccaccctaacatattacaagcatccatcaaaaagattagagtttagtaaccaaaacctcatctactgcagcagcctgcagcacttcatatccattattccttctggcaattataggatcttccaggttttttaaaccttcactctgtctcagccctcttcttttgggggtaatccaattactgtcattctcagctctatctatttcatcacttcctgattgcttttgcactactttatctccctgatctagtctagagtcattaacaactgtcctaagatcagccatcttccctggatctttatcttgattgatatcagctttttgcttgtctagcactttttctttttcaacactttgtttcttcttccctataattttcttctctttactgcaattagcaacagtatgtcccaaattagcacaagccgagcatttagttgggagccactcatactcaaccgactgctcaaccaactgttttctttcattaatgaagcatataatctttggtggatcgtctgaaatctcaatttcaacaaggacatgaacaaacttcaccatagatcgctcttgagtaaccttatcaatcatcaccggttttccaattgaatttgctccatatctcctttgcacttgactggaaatcagctttctcaacctcctcagcccagctaccagatcttggagaaactcgagtgctctgttcctcaccaccaatttcaattcttgtatctatcatcaggttcttgcaagtgtcatggaattcttacacctgctcacgttcggtaactacttcttggattaatgggagctcttcgacgctatcattactcaccgtgatggtattgactagctttcgagtgatcctcttcttcttcaccatgggagaagcaggggaacctcgcacgccctttttccatagaatttgttgttacaccttcatactttcaacctttttttcctatgataatttatttatcaaaagttaataaataaataattatattaataatagaaataataaaatcttataattttaaaatggggtatataatataatggttaatatgtaattaaacaaaaataaattattgtattttaataaaatatgtgaaaataaattaaactatatatgtatttaaactacaaagcaatacacatacaatttttgtgaaaaagaaactaaaaatatacaccataaaaaaatatacataaataaaacaactaaaaaataattgttgaataaaaaaaatattctgaaaaccacttaaaaataacttaaagttaacaaattaaataaatggacatatatacaacaaaacaattatgtggaataagctaaaaatatacactataaaagatacacataaactaaacaacaactatacaaaaaaaaaaaaacacataaaaataacatagaaacttataaaacaattataaaacatataaacaacaacataaaagcaattataaaataactataaaataataattaaaaaaaaaaaactataaatcaatagaaaaataacaagacatgaaccttgttattaaaatatacaaatcaatcataaatcaatttgaataaactacaaactattcacaaaatactaattttattaatcatgtaaaagagacaaatatatagaaaggctcggaaaggcattggatgttgaggttttaaaaaccctatttgtacggagagcgtcacagctaagctaagcttgtactctaagttaccggagaggactaaaccctagggagtaggcgaccacggcgacaatcacaggcggccagaaaaaggctcagatgcaaggaaaggcatcggaggttgagggttttcaaaatcctatttgtacatcaagctaacccacttttattgcagtaagttatttctaacactacaccaaaatatagaattggtgacatttggattggtaacatttgtaaaaaatgtcataataatatcatttaagtaacatttgataggaaatgtcacttt

SEQ ID NO: 164416 - DNA, 1245 bp, Cannabis sativa
ctaaaaatctttacaacaaactctcttctctttccaaccacatatttagtctacctttggaattaaagttggaagttggtccattttctcctattaaaacttacactcctcattttgttgcttcacctttctttgagagcctccgagtttccgggccagacttctttgcctctgctcaggcttcatcaacagtgctcctcaatcaacaaagttcagagttcaatatatatatatatataatgtatttattattttatatgtttatgagttatgtataattatttgaggttttgtatgtgttttctagtgaggtattaaaagagtatgggaacaaaatgagtgagctatcaaagagaattgtgcaagttgtgctgatgagcttgttaggagaagagttggataacaaattgtatgtttctgaattcaaaaagtgtcatggttatttgaggattatcaactacacacccccagagagtgtgaacagagaaaaagaagtagaagggcttggaatgcacactgatatgagttgtataacaattgtttatcaagacaaatttggtggggttcaagtgagatctaagcaagggaagtggcttgacataaagccaagtgaagaaactcttttggtcaacataggggacttaatgcaagcatggagtaatggaaaattgaggtcttctgaacacagagttgtgcttaggcgattagttaatagattttctttggctttcttttggtgctttgaggatcagaaagtaatttatgccccaaatgaagtggtgggtggttgtgaagaacataacttgaggctttacaagccttttctttgtgcagattatttgaagtttagagagataaacagtgttggggaagaaaagtttgagaaaattggttttaatgtgaaagattttgctggaattacaggttctgatcagataacaaaatccctcaaaagttaaaatttctacattataacaattcattagtgactattattattgctatatctctaagagattgtagttaacaaaattttcatgtgggttagttatgatttgactaaatttgtggtttttggaactttgtttaattatgtttggttttgtgtgtgcataatttatacgttcatattaattgttgtgtttaatcattatttattcactactaataatatgttcattcatgtgatttggtattgtgctcataatataatctcttgtttgttctgtttatatatatatatat

SEQ ID NO: 164417 - DNA, 939 bp, Cannabis sativa
  modified_base (684)..(692): a, c, t, g, unknown or other
tttattttatttcactacttatttattggtagatgcaataatttgtgactggttatacaaaaagaaaatttgaaagagatgcaaagacaatagtacccttattactttcacgtatttacactgcaaaataatggatttttctttctatgtctgtcagattccaaaactaatgaaaataaattgagaatcactcaaagaaatgggacagatatttgggaacaaaatatatagttaacaaaaaaaaggagctataatcaaatcaatgctgtccaaaatcagtgtcacaaatatgaaacccaaccttatagtgaaaagtactaccatataagataaaaaaaaatgtaaaatcaaggagcataaactaacctaaaatgcttaattttatttctccaaatcaatcaatttgtacccttttaagcccttttagtcattttcaaaaaaaaaaaaaaaaggaaaaaagctctattagtgatattgttattctttaattgcattgagaataatcacactcacacgcacctatctttaattgaaatgattggctttgtttagatacatgatacaaacatcttttaatccaatcaaactagcagttttggcttaatgaatttcggtttcttagcaaaaaaactagcagtttttcccaatctcaactattacaatattaatattattattattatnnnnnnnnntattattattattattatgtttgattttatataaaataaaaaataatgaatatttaaataatttgtattagattaaatttaggagtgttgcgttatttaaaaaaaaaatgctaccgtcaatctcctattacaatctcttagttaacctccacgctcaaaaacacatgtcgaattattttttttcttcaaaaaaattttcatagtggtgttcgttatgcttacaacatcatccctgtaaatttttgaa

SEQ ID NO: 164418 - DNA, 2209 bp, Cannabis sativa
tggtaaaataaattccaacacaggtatcattgccatagttatttgagagtgggattttccaaactagtgcttgatctctctcggttaagacatccgaaacaacctcttcatcccattcaactttatcaggcttcattagagacttcacggaattaccaataagagcaggtgcctaaactcaacataaggattcaaatcatcaatcaaccaaggatccgataaaacattcgttgtagagccatcaccaacaagcttcctaactcctgcccgaactaagtcttgagcttcaaatacactcctccaaatgtaacttggattagacccaagtgtagccgtgaggaaagacccagaggagaagtacctagctttgaaaatttttcccatcaagctatcaccaccagtgagaagtctccacccttgcttggcaagcaaagctaaattaaaatctctaaagtcacaaaaacccaaaccaccattgactttatgagccgacagcttgtcatatttcatccaatgaataccttttttgatgaagatctccaccagaattgactgatagaccgctcaatatcattacaaattccaacagaaatgagaaagacattcatggtgtaagcaggaagagcttgaactattgacttaatgaggacttctttgcccgctcttgagaggaacttgttgtctcatgtttgaatctttttatgcaatttgtccttcaagtaaacaacatttttattcctacccacagtacttggtaatcccaagtatttactatgctccgccgcctcctaaatacccattcgagtacatatagcttgtctaattgaagacgaagtattcgtgctaaagaacacagaggacttgtcaaaattcacttgctgaccagtagccatagcaaaaagttgtaacagatgaagcactctactaacttccccattagtggacttacaaaagaggaagctatcgtcagcaaatagcatatgagacaccaaaggagcaccgttagctactttaatcccatgaatccactttttttcctcaaatcttctaataatagcagataagctttcagcacaaataaggaacaaatatggagaaataggatcaccttgtcttagccccctacttggaacaatcggccccaaagtatgtccagtagtaacaatctgatattcaccgaagataaacacccataaataagtctaacccatttgtctgcaaaccccatttgtttcagcatagcacacaaaaagtgccaatcaactttatcataagccttgcttagatctaatttaagagccatataaccgtctttaccaacttgctttctttttcaggtaatgcaaaatttcaaatgacaccatgatattatcagtaatcaaacgcccaggaataaacgcactttgatttaaagaaataacctttgataataaacacttcattctgttggaaagaactttagtgatgatcttagcaataacattacaaagataaataggacgtaactcgctcatttgatcaggtttctttttcttgggaattaagactatattggtatcattcattccattcggcatatactcattacaaaaaaaattcctaaccgtaagaatcacatcattgcccacaatggaccaatacttttgaaagaatttcgggttcataccatctagtcccagcggtttatctgggtgcatctgaaacactgcatctttaacctcttcatcttcaatgggccgaagaaggagctcattatgctcatcacgaacagcaggggtcccacaatctaaaacctcatcccacctagaaggttcaacacagtaaataagttggtgtaaaagtcgaccatcacattatccaagccattgtcccaatgtctcatgttcccattcacatcctttagacaaaaaatctgattattacgtcttctagttgatgactttgagtgaaaaaaacttgctattttgatctcccccttttaaccaaagctgttttgatctttgtttccaaaatatttctctttgattcaacacagcaaacaactgattacaatgtaaggaaggtatacacataacttaccacctacaactaattctaactagcactcactatgttcgtgcttaagaacagtgactaggtagtaacaactcaaaacactaacaacatgaactcctctaacaatagtttaatgttaatacaactcggtatt

SEQ ID NO: 164419 - DNA, 1267 bp, Cannabis sativa
  modified_base (1201)..(1220): a, c, t, g, unknown or other
tcattaagaagaacacatacatttgtttatagaaattttgagggggtcagggccaccccagctatacacctacatctgcccatggatcggttcgatatttttctgttgttgaaattagtaaaaattgtagacgtagatctgagggtagtctgatggtggtttgatgatatccatttttatgtacaatgacattaaaaatatgagtaacgttgggccactatcgaacttatatcggacttacgtcttcaatctgtactcatttcaacaatagaaagacatcaggcctgcatcagacctagtgtaaaaccaattttctacccaaaatacagatccgaccaaacccaatcttaaatctaacataaactcaaaagtcacagagattcatcatacattttaatcctaaatcaataaactcatacaggtctctttgttcgtagcagtggtctctttgttcgtggttgaggaaggagattgatgtgagcttggacggattgaaatggagtcgagagggttagtccgattggtcttttagtgggttgagtggtcttggatggtggcagtggtgttggatggtagcggtagtcttggatggcgggggtggtcttggatggtgacagtggtcgtggaggttcggttctcttgaagagagcgagcgagaatggagggagagagttaaaaaatgggcgaaaaaactttgggtgatgaaaaattgacctaatctaacaatattaatacactaatgatttgggaataaaatttggcctaaattgacatttttacctatataatattgtatatagtcatcacttttgaaaattaaaaattgtgactcagagaggaaaaggagtacagagaaaagggattttggtggctataactatacaccctcaaaagaaagaaatattccacgcaatgatttataattgtttagaaggggtgaagtctaacagcctttctaaaataaagaatagactatatattatccccatatatgtggtccttgtaattaagaatacttgttactcaattattgggtgtattatgttttacctgaatatccttgatttaatttaatattaattattgaaaacttcggcacactaatgaaactacaaaacacaccaataaaaaaaaaatgaaagaagcacaagagaacaaaccatagcaaaaagaaaaagaaagggaaacttacaaaaatacnnnnnnnnnnnnnnnnnnnnacaaaaatactatcacacggaaatcttttcaaaaatactgtgttttt

SEQ ID NO: 164420 - DNA, 1451 bp, Cannabis sativa
cttcacttgaaattacatgtaacagaaatagactataaagaacaactcttgggtgcatataatccttattgcatccacaaacacaatttgaaattcctcaatctctcaaattctccattcttttcactatacagtggtgattctatgctattgaaatgctctttcaatgagtcagattactatgggcacatgtattcatcaccaattccttgtttaagtgactcatccaaatattttgtttatgccattggtacttattctaacaatatctggggggatatagttgggtgcagcaggatgtataacaatttgcaagtcccaccaacaatattccattcaataaaaatggaagaagtagtgaggatagacttatggtggtccaaaccggattgcaaatattgtgaatctaaagggaagaaatgcacactgatcaaaaggcctaactcaaacaatatgccacccaatgttccaaggatacaatgaaaggtatttttaattaatatatgattggttattacttttttcttatatttttaatataaaacaagcttgtgtgtttatttatatctatatttttttttagcaggtgttttatttcaagtttcattaatgacttcaggtgagtatttgtattataattatgaattcagttagaatttaaaatagagtgaatgaggttctatcttaaaattaactggcaatgggaggagcagcccattcatcttatatattctattatctttacacatattagcaatgtaggactctttaacatccgctctcaagatagtaactattttatttgctctcgtcatcttggacaactcgatcatgagcggcctttttttggcttactatctttaatcacaagtgactctttttgctttactttttggattggtatttttaaatttttggtggctccttttttaggctctacttggatcgatttttttgggtcggatagtcattagaggatttttttttatttgtttttgctctgataccatgttagaatttatgataaggtgaacggggttccatctcaaaatcaattggcaatgaaagaagtagcccattcatcgtatatattctattatctttccacaaattagtaatgtaataacactctctaacaaattccaacattattttttacaaccttgttaccttgttttaatttagcgccttgagaatccctatatattgatatatgtaattgttttttaattatataccttactaattttaataattgatcaatatataccaacaggttcatttactatcatattggggctccttgcaactttttatgtctgccatttagggaaaaacaagagacaacatgggttgagaatcgaaaagtttttggaagactacatagcattcaaaccatcgagatatacctatgccgatgtaaaaaatatcacaagtgagttcaaagacaa

SEQ ID NO: 164421 - DNA, 1019 bp, Cannabis sativa
aaaaaaaaaacaaacaaacaaaataaaacaaaagttatttttaaagcaagattatgtaacatgaatggctcttgatctaaggttcttcgtcttatatttttagacctatttatatccaatttaattatatattagatgttaaattttatcaactaatctgatttaacatttattaaatatttaattggattgggatctatcaattaaatatatttcatgtatatttattgaattgattcagatttatccaatattttagacttatatttactagattgaatcagatattccatttaatattttaaatctagtatttattggatttgatccatccaataaaaaatataaaatttttattctaatttcatatatacaaatatattttttaaacataacaacataaagttcaattatattttcaaattaaataagatactaacttgttcgattagatattaaatgtattagattttcgaacactccatttaaaatctgatcgatccaattgaatattgaaaaatggaatcagatacaattatacttgaatatctaatatttggtcgttagttgtaattggattagatcgatttgtgcacacccttataatctaacaacttaatttaaatttaagaggaatttgctataattgtactatagggaaaagaaaaactctagaaaaagaaattaattaattagtgtttggtaaatataaattttaaagtgttgcaactaaaaagaaaataaaaagtgttgagtaaatatgacaatttaaaggaaaggttttgttaaatattcaagtaacaaaataaataccatatttatttaattttactctgtaataaaataaaggaaattgcttatgtgcaatcacaataaatgtctacacatatacaaatagtttttttttacaagtgtcatcttattattctaatcatgtattcaattaattgtgtatttttcttttgtctattctatataaagtgtgcctatataactgaattcttagtttatgagaaatt

SEQ ID NO: 164422 - DNA, 1180 bp, Cannabis sativa
  modified_base (536)..(536): a, c, t, g, unknown or other
aagtggcccaaaataggtcaaaatccaatctttccttcaggtgcaaatattttaccaggcagaccaaagaaaaagcaaagaagagatgctgatgagcccgcccctccaaattgcacaaagacaaggagaactggtgcaattatgcattttagcaaatgcaagcaacctggacacagtaagaggacttgcaagaatgatgcagcacctgctctagctcaggtaacacatttttagctgcaatttggtatacatatgtcctttggatacttacgtcaataaaataacagtcattgtttttgtttagggccaaataataaaggaggcatgccaccaatccaaaatccaaagaaggaaacactgaagaaaaggataagaaaggaaaaggaaaaagctaggaaggctaggcatgctgtagaaggtggtggagctgggtcaactgaggctagagggtgtaatacatatgatggagcagtgtttagagcagtatttgttgtagcatcctgtgcacatactgttgtattttgaattagtgcacntgatgcttacttttgacacaaacactttagtttttagggcttttaatttaagttctttgaactgctattgctgcacattatgtgttatgtctgaattagtgcacataatacttacatttgacacaaactctttagtgtttaggccttctaatttatgttttttgttgctgctattagtacacattttgtaaaacaagactcaaagcaaatattgctttttactaattaaaagtagattatatttcattgatcaacaaaatttacacttgttacaatttattgctcatgctttaagtacaaacaataaaatacatattgcaatacatatcacaaaatatctaatacatccactcttttggcattcacaggtttgacttccatttagggattcatcgatggtgggagtgttatcatcaaaactcttcacaacttcagatttgtctttgcatgtcattgacttctcaacagcttcatattgatctttgttggtcacaaagttctcaacaccttcagatagcatggacacttctctctccaaattttgaatcctccttagcagccaaggaatcacatccttggatcattgacaaatgggtgggccgtaccacatccaaaagccacacccttctacttcctgccacaac

SEQ ID NO: 164423 - DNA, 1417 bp, Cannabis sativa
atatatggttgttgcaggggccaacatttggagcaatgatgatgtcagggcagaaagcagcacacttggccttgaaagcacttggactccccaatgctgttgatgtccagccagagctgatcttagctgcagctgattctgctgatactgcagatgcttaattatttggcaatggcaatggccatgaaagtagttcatggtagctaaagctgagactacagccatagctggagtggatctgtagtagttgttaggactaagagtctgatcgatttgagagttatttggttggtattgttaataagaataatgagggttgtgttcatttatatctctctattttatctttttccctcaagactaagactacttgtgtttggaagtgtgatcaattaatggcaacttttgtgtcactattttcttttctgccattatctttcaagaaatgaaaaaaaaaaaagtgattgttgtttttgattttgtgttttgtaaaatcagaaaataaattttgtaatttttaaaatgataaaaataggagactttttgataatttttttaatataatttttagtataaataaataaataaataaatgtaattaatttttaaattgaattattattaaatttttattttgttaaaaaaaattattagaagatatagttatataataaaatttccatagatatgggtggagggagagggtagaatattgtttgataggagggagattttttccttgtaaattttaaaaatgtaatcctccatttttagaatgatataagaaaaagataagatgaatatacaaatatcaaaatcatcttttaaaaaaataataaatattaatattaaaaagagtttttggcagctaaaacttcttaactattattttacttgtatttaatttttcaagcataaattttgacggcaaaattttctaaattacagaactattagtaaatttaatgtgtcatccggttaactgttatcatagattgtttatgcatacattcttgtacatgacgcgtttatattggtacacctgatattattatcttaaaattcattttaaaattaaataaaattataaaaagagtaaataattgtagcaaaattcccaatatttttactttacttacacttaactcctaaaactcaatttttggcgctaaaacccccaaaaccacaataccgttagcaatttatagtttcctagctgttaagtaccatgtaggcatatgcatgtgtacaaagggtattatccatgtagacacacatgacataattttattggccaatttgaataaatcttttaaaatgaatagaatttataataaattaatctaaaatcataaaaaaaaaaaaattattttctttagaccctaatttcctaaagtaaaaatgcaaaaaaaaaaaa

SEQ ID NO: 164424 - DNA, 869 bp, Cannabis sativa
attaaataaacttgatatctgagttcaagtatatgacttgcaacctagatgtatgtctgtaagtgttcttcgaaatgtggctaatgtgatgggagcatttgtggaatcggatcctaagaattttgtgggagtttggagggattattttagagttcgagtgactctagatattaacaaatcgttacgacggagaatgagattgactaaaccggatggttctactttctgggctacgtttaaatatgaacgagtgccaacattttgttttatctgcggtattattgggcattccgaaaggttctgtgtaaagctttttaagacgccactggatcagatagtgaagccttatggggagtttataagagccaagttccaaaaccgaaagcaaaatataggggcgagatggctgagaacaagaggatggacttcggggatggtggtcggcgagagtagtggaataggggagagggggcaagccgatgatacctatatggaaagtgacaatcagggcacggatgagggagagattggtggcgatatgaatggagataatgtgggatttcataatcaggttgttaatgagggggatatgcaagttggtagcaattctaaacatggaaagaatcctgtaaatgggaataatgaagtgaggaacgaggcgccagctggcttacatgccaaggggagtgttgtgatcctagataacaaaagaagaaagtcaacagagttagagaaagaagcttcgggcttggatctggagagtaatgggctttcaaaaaactcggatttggcgggtctctcttatggggctcgcccaacattatgagtattataggttggaactgccgtgggcttgggaacccacgggc

SEQ ID NO: 164425 - DNA, 935 bp, Cannabis sativa
tgggggattagaacggatgcactccatctccagtcttgggatgaatggcttctatggttcacaaagaaggataacagaccaaacccactcgaccttaacctgctgttggaaggggctgccgtcatttttgaacagatctggaaggagagaaatagaagagtccatgaaggacgttccactcctgtggaattgagtgtgagaactgtcatcaaccgccttaatgagttacatactgctagaggggctccttcatctcttcaattggattggcagcctcctccggcgggatggatttcttgcagttctgatgtctcaattggcaatactcaatccgcgggagcagcaatcctaagagatcacaatggaaccatcctcagaattgtcacatttcaaaccacctacaacgaaccgcttccaggcgaaacctatgctgtttgcaaaggagcagaggcagcgattcaattgggataccagaatatcatattccagtgtgattcttctttagctgtcgaagctctgaagtcacattacacggatattcaaaggttgcacttcaacatacagaatctgatccaaatgttctctgccttggttggacaacttaatctttgggaagttcaatggattcccagggagagcaatggtgtggcccatgaggtggctcggtgggcaaatcgaaataatagatttggaaacttcgatttgtccaattttgacgatttcctacagcagttgactgtagatggtcgtgtttctcatttagactagtctcgattgttctgtttctgttactttctgtattagttttagttgcttgttgtaattcctgttggacttgtttctctgttttgttggcagttttctgccgtctggccttgtgcctgttgttgttgttgttctggcttctggagccgttaatcaaaaaaaaaaaaaaa

SEQ ID NO: 164426 - DNA, 544 bp, Cannabis sativa
atctcttatcaaagctcgaatcgtatcaaacccgatttgatagaaaattatctagatttgaccaaattcaacccaaaaaagtaacttagaggagcagaacgggtcagatcaacaattgattcggatcagatcaaatttgacccgatccatttacactcttacgtacctccaattcccatggccaattaagttagtctcaaatgattttactcgttaattaattcatgtaattagctacaatatttaaccagaaccgaccttaggcatagattggttaagcccgtgcttagaactcactctttttaggagctcaaataaaataaatacttttgaaaaaatatactgtaattgtttttaaaaatactatttatttttatagcttaggaccaattttttttttttttttacttataactcatttcaactcaagagggactcaatatataacataacatatttatattttctcaagaaactggaaagtactatatgttatataaattaacaattaacccaagatctatttgtatataacatagaacac

SEQ ID NO: 164427 - DNA, 850 bp, Cannabis sativa
  modified_base (483)..(487): a, c, t, g, unknown or other
gtgtaagatacaaccaaaaatacttgtagcaaattgataatcacttcatattaaatatttatgcatttgatattatatattttagaagtcatgtaagtaatattactctccatttggaataataatgcactataataataagtctttttggtatgtagttatacagttcaatttacagcgcgtttagaaagttatgctgtcattatagattgttgtatagttaaaggtaattatataagagattattttataaatgcacaaaaataattaaaaaaattataaaaatacgtttgtttgtatggaattttaaatatttttatgatttttataattttatttacagaaatacggtatttttatgttgtacttttcttaatttgttgttatatatgtatattattttttgttgttgggtgttattttcctgttacttttatgttgttttcatgttatttctatatatagaaaaccgtaaaaatatannnnnaaaaaaatctttaaacgtaaaaaaatatttttttcacaaaaaatagtgttttatgtaattattccattatacaatttgacatatttatttgaccatataattatactataactgtgtaattagaggtaattgaggtgttcaaattacacacgtttaaagttattatttttgaagagtatttgtaaagaaaaaaaaagtgtttagctcttcccaagaagttaacttaataagagatttgttacttaataaaattacttgttagtcataatataatttttttcaactaaatgtaatttttaattacaacaaaaagttatttgtgaataaaacatagtatttagtagggatgcacatttttcccat

SEQ ID NO: 164428 - DNA, 2287 bp, Cannabis sativa
gttgttcgaaaagggtcgttcctatggcttgggttgtgtggctagggacacaaacggtgtgctaattgagggacgtacatctctattttttggagtgatggaaccggcattagcgggggtcctgggaattaaggaggcacttagttggatcaaggaagcggagtgacaaaacgtcatcttagagtcagattgcctttgtgcggttcaggctattcgtagctccttagacatgatttctacttttggtttgattgtaaaagactataaaagcttgcttgcttctcttacaaacgtttctatttcttttgttaaacgatctgctaatttagtggcccataactttgctaaggctgctattttatttcctgatcattttttcagtttggagcatgttccaactgatttggtaccttgtttgatagcaaaagtttctggttaataaagatttcttctattcaaaaaaaaaaaatatcacctcaattagaaaaaaaacatagagagaaagaaactttagtaggtattttttttacttgcaactaaattttgattgaagtttaataattgtataaatactgtgtacactattgtaatttaaaggttaagtctgcaatacatcatcttaaagaaatattttagtagattttttatttatttcgatatataggagagctttttaattttttttttatccgtgtacattatagttatttacgattactggtaaatttttaaaaaattcttgaataatttacaattgttaaagtttaaatattttattgcacacgtgactgttttttttatacgcatggtaagtaattgtttgaaccttattttcggcattgtaaactatttgaataatctgaaaatttacatgtggtccaaaatagctacaacacatacggaatataaggttcaaatattttatttcatatgtaatttttttttattatcatggtatgtaattgtttgaactttattttcgacactgtaaactatttagaattttctaaaaaaaattaagtaatcttaaataactacaacgtacataattatgataaaataaaattagactaacaagttttggtagatgtcgaaacagataacaagtataaaaatgatatttttagagcctacaattttttttatcaagaaaatagatttctattaatcacagacacgatacaaacaaacaaacactccaaacatgtagcatcaataacaaaccgcaggaactcattttttttaccaagttcctctcatgctctttctatttttgcttagaataactattaacactgtacaatatatcattctttatcctattattcactctaaaagagcaactattatagacacaagagtttctatttaaccaaatatggtaaacagtagctgaacaacatgctgtaataattttggctcaaacaccttcgtccatgtcttcaatccattgaatctaatcactaaacacaagagaccaggtatagcctatgcaagcttggattagctgaacaacttttgttatatatatttttccaaataatatttgtaaaccaagttgcatacaaatttttttctaaaagataaatataattttttttgttatatatatttttctaaataatatttggctgatttttttcttatattttttgaatttgggcaagttttcctcttataaggtataagattataatacattttttaaaatgattgtttcattacacttttaatatggttcgaaattctgtagagctttttagtctaatacttttcatgattatatacatacttgtagttatctaggacaaccagtaaacttttcaaaaattctaaatagtttataatatgtcgaaaataagattcaaacaattacatacaatacatataagaaaaaatacaacaaaacattttaatttcattttatcactttaactatttcgaattttctaaaaaaaaaattataggtagtatgtattaaataacaacaactaacacaaacaatcataaaaaaatagattacaaaattatcttagatgctgctacaaataagatgtgtattgaactataaatttttccttacttatattatctagtatagtctgtatttttcacctagtatattaataattatttaattttaagaaacttataatgtattttctttattttgtattgttcttcttcatgtattggaatgatacaacatagtatatggagtagagatcaacaaatacaagaacttaaattttatatgacctcaatgttaggaatattttaacagaat

SEQ ID NO: 164429 - DNA, 1250 bp, Cannabis sativa
  modified_base (324)..(328): a, c, t, g, unknown or other
gttcgaatctctcaggcgacgatcactttttcctttttctcctattctctttatgataattaatcttatattatgcaatctcatccaaccactcccaagcccagttttcttttcttttcttttttttgttaagttcccaagcccagtttttcaaaagttgtgattgggttgtaatgagtagtcaatgtaaaaatggtgttatatttcacacaataaatttataatataaaaatatattaaaaaattgtattttttgtaaataaaattataaaaatatttaaaattttgaacaattgtagttttgtaattttttttattattttnnnnnatttgtaaaataatcccaaaaagactataatatatttgtatcaattttttttttatttttttattattgtatctcaatacataattgtaaaatttgatacaaaatttaatatttttattaaagggtgtacttttaatgggtattactcatgaatgggtaatatttagtttttatgcttaatttttctatttaattagaaaaatctcactttttcattatatgggctgaggttgtttcatcggctgaaaaaaaaaatcggcaaaaaaatgatgaaaaaatattgagttttacttaaatatttttcatataaacttatttttaatttaagtagctaatttaagtgtagaaatttgaatttctcttttattattcgccatcggatcacaatctaatagcttaatatttttaaaaataatatttatagttaaatttatttactacccatcaatgggttatacccattaagaagtattccatatatatatatgaattttgatccaaaaaaaaaagggataacgtggggcagatcctttctcaacctcttcggtcatttttggcaatctcggggaccacatgttagccatagggactttatacctcagccttctttaattgggtcatcggtaatcacctcaagggttcccatcacacagatggcatcacctccagcaaggaccaagtctttcttaaatctcttttaagaggggctggggtaggtttcgaacccttgacccaagtaagggaggatgccagtaacggcaatctctaccactacaccacacgacacgtggtctgttatgtaaaatatcgaggcctgtaatctaacatcaatttatatactaggttattgtttatattttttaatttttattttttttgtgtatttttaaaatgggataattttacaaatacacaaaaacaa

SEQ ID NO: 164430 - DNA, 3362 bp, Cannabis sativa
atgctcttctaggtcacactgtggcaaattgtaacaaaggcagactgcttgtgtggaagattaaacaatagggtgtaaagcttgacatcaaagatgggaacaaaagccaacatgaagttgttgctgctggtgcagatgcacatcaactacgaaacactggagtggatttagttcattctatcgagaagttagcgccttcccaacaatattgattctgagataaataatgctaatttggctactaacagtagaaagccagaatagggggactctattattgagtctagtattactaatagcaagcatgtggttgatgaatttaaagcaggtgattggattactcctcaaaaaagaggttcaaaaaactcattgaaccctcaggcaaatgctatgagaagcaatcgatatgaagttttgaaggaaaatatcaaggggatggctgcctttggtggttcccattcttttcatggataattgtaatcttcttggttgaaatgttagagggttgaataaaaagaaaagcaacttgagttgttagaaaattgcaaggagaataaaattggttttggtgctttatttgaaacaaaacttatccatgagaatgttcataatgtgatgtctaataatttacctgactggaatttttattccagacaaactatctcgtacaaaatctttttgatatggatagacaagttggttaaggtagatagaaaatttgtccattgtaaaattaaaatggtcgggtttgagggtgagttctacttaacagtcgtttatggtagcaatcctttaagttagaggaaggagctttggagcaaacttgctgattttggttacttgcataaaccttggattatccttggtgattttaatgcgatgtttgagtacaaagatagatttggtggcagacaagtcaaggcgataaaaatccaagatgctcaagatttgcttgctttaggccaaattgatgagtttaggtgctcgggatctcactacacttggactaacaaatatgaggagggggtaagaatttactctaagcttgatagagtttttattaacaatcattggttagaataatacccgaacactgaggctagttttagatggtttttttttttttttttaaatcgttgctactgccttagaaaacatgttaaggttgttaaaaattgtattagacctttcagattttgtaaccattagatgttcatagatgggtataaagaggttgttcttaatatgtggaagggtaccaatatctcagatttgaatagtttttccaagcttctttttagagtcaagcatgttttgaagaaatattttatctctaaaaaagaggatatcaagagccattgtagcgagactaaagattcttttattagagcccaagaaactcttgctaacaaccctacttgtcatgtgcttatgcaagctgggaaaaggttaaaccgtgagttccttactgcccaaaaacaatatgctagttatcttcatcaaaattcgaaattttcttggtttcagtttgggaatgagaatacaagctactttcatgtcatcatgaaaaaaagataaacaaagaatatgattttatcctactgcattggtgatactgttatcgaagagtacctcaaaattgtagatcattttcttcatcacttgcgcaactttatggggaaaaagacctcagctacttagagaattaagttagattgcttggaaaatggaagtaaactgaatttgtttcaacatgtttagctaaccgacctttttgataagaatgatgtcaagagagctttggttggtattcactctttgaagagcgcgagtctgaatggttttggtgttgggttctttaagggtctctgggatgatattagagaggatatatcttaagcagtgctagggttttttgaaaaaggagtcccaaatgatcttaatgagagtactatttctctcattcccaaatcggatcaccctcgcaatgcgaatgactatagaccgattgcctgctgcaacacgatctataagtgcatctccaacatgatttatgctaggctttttgaagtgctcctgatagtttgattcacaacaaccagggtgcttttgacaagaatagacaattggctcataatatcttgatttttcaagacttgcgctataaggttatatgctaggaaaaatacgtcagctagatgtattctgaagattggccttagcataagcgatagtatggattggacttttgtttctgctttgttaaaaggtctttgcttccattccaaatttattccttgggttctaagttgcctccatggtgcttcttatgtccttttattgaatggccgatttcatggttcttttaatggtgaaaaaggtctttaccaagggaaacccaaagtctccccttcagtttgtttagatcatggagtatttgactagattattgagccaaaaagctaaggagaagggcttcgatttccacctctttttgtaagtctctcaagctggtgaatctttgttttgcagattatttaattattttttgcaaaggtaatgaaaactttatgaggcttatacatgagggcttcaaaatctttagtgactcaatagggttagtttttgaagccctcaggtaatgaaaactttatcttgctagcctaggcttaatgatgattgtaaatgtaatatccttaatatgttgcaaatggaagagggtaaatttcctcttaagtacttgggactccagcttagacctacgaaaggcgagtctctgattttggtattattctcgacgaagtccacaaaaaacttcataactgggctagcaagaatttatcttttgcaggcagggcacaattaatttactcggtgctctagggtataagaaacttttggatgagcttgtttatcctcccccaaaaaattacaggagccattgataaatgttgtaggaattttcttcgaggatgtaatggtaactagagcaaagttatcatctcctgtcttgggaaaaagtctgtctgcctaagaagtttggtggtattggctttcgggagggcaggaaatggaacattcactactacaatttgaacttttagtgacactatttagtgacatgcacaaaaatacgtgtcactaaaaagttaggaataatttttagtgacatgcacaataagactctaaatatttgggtaagtctcatgtattgtgggtcactaaaagtatggagtgtcactataaagtaaaacccaaaattattcaatttttgttagtttaaaaaatattggtctatagtgacacgctaggcgtgactgggtatatatgtccagactcacttagcgcgtcactatatcata

SEQ ID NO: 164431 - DNA, 1965 bp, Cannabis sativa
  modified_base (1908)..(1921): a, c, t, g, unknown or other
aatctatagtatcataagtcttccgcaagtccattttaatcatacaacttagcttgcaattcttcctctcataatgtcgaacattaatatcttggcaaatcaaaatgttatgagcaatgtatctcccatgaaaattgtacattactgtcatgttatcaatattgtgtacattgtagttatagtagacctaacatctatttttttttaaaaaaaaaatagaatattttattgtgttaaaaacagggtttcaaacatttagttgtaagtatatattaatgctccaacttcaagcttttattagacatatctttccatggttaatgactctagcttatacacgggagtatcatttttcatcgtactttgtcctcactcgcacgctcttagaggttttccaagaagtcatcactcatcccaaaattgcttcatattaagcacgcttaacttttgagttcttaaaccctattcaaatgtgtcttacatagtcttagaatcattccacttgactttctccaagcaatatacagtttttctggtctttcctcttacaaatcacgagactttaattgtcccacatatttattctttttgttttttataattaattatgttgtaactttgtttttaacaacaaataatatctaatttctaaaagataagtagaatatatacctattataattatagtataaactatcatatatataaaaaatgaattataatttatttcttcaaataccaaaaatccctacgtatatataagagtgtataataataaagtcttattcgtaataataataataataaaagtactagatatggaaaatgaaaaaaaaaaatagaatgtgtgggagtgaaactaattattgtataaaccaatcaatgtgaataggtttataaaattggatttgaatgtcaaatacccatgatacattataaaactttcattttaaaaaatggatgccggtaaatatataccaacattaattatttatataataaatataaagagatatttatataaataattagcaaaattttcaaaagtaaaggttgtagaaggtatagtgatagatgatcaatatatatatatatagagtccaacttggaggccaaacaaaatctaccaaacagatctaatcaaaaataatatatatatatatatatataaatatatctatatagatatatatatatatatatattcaacctagagataatacatacctagattttacacatacatcgaatgattgaacattaattattaataatatatatagtactataattaattaacacaattattaattataatcgaaagatagttttcgtcctaccctcatgtggacttaatttcaatacataatacatgttttcacactttttcatcatcatcataccaatatatacatatatcgtcatcacactagaaaataataagaaaaagaatgttttatttttatatatattttttttagctagctttatgtatatactcaactaaatacacttaggaagttaattaagcaatgtaaaagaaaaaaggaaaagagaataatatgattgttgtgtgtgaaaataaaaacaaaaatggggaataggactccttgtagtgaatgtaagacatataataagatatataaggaaaattatcaaagtagtacctatcaaaataggacttactattttatgttttcgggacatatatagttataattttttagaatttaaaaatttcttcagattgtttaatttaaggaattttgtctaatttcatttatttttaactaatttagtaattatttatgtactaaatcatgttccttaaactttagtatctacctacactaaaaaactgttacttttaggaataattttttactcacaacataaattttttgtgannnnnnnnnnnnnntagtcacaacaaaaaattttttgtgactaaaacatagtagttag

SEQ ID NO: 164432 - DNA, 1702 bp, Cannabis sativa
tgatctttgggataagaacgaggacagtctcattgatgggagcgatgttagcatcagagtttagaatatgaaggacatcgtggcaaaggtctctgccaatagtgtgccagttcttttgatagaagaagggatttagcccatcaggaccaagagcttgtccccggcaatttgaaaaagaatctgattaacttcagcaaaatcaaaattatgggccagatagtcataatgttggctaggaacatgcttattgacccctttaaggacaatgttaatggactcctaatcaatgcctttggatgtgaagagatcaaaatagaattgaatgaaagtgttggtaatatctctggggctggtgatagaagagttgtcatccaaggtgagcgcctttatgaaattatttcttttttgagcagaggcccgattgtggaagtatttggtgttcttgtcaccagcttgaagccaattagcacgagacctttgtttccaaaaaacttcttctttaaataggtgtttatcaagagaagattggagttggttggcagcattgacatcattcgaagaaatgggggattgggagtaaattttatcaatgttctgttgtaatatctttatactgttcttgaaactatttttctccttcctccaagagatcatgtggttaatgcaattattctgtatacttaaaaaaaatgtcaagaatagaggtgggattgttatggttcctattgacagcccaagtgttttgaaccaagttatagaaatcgggctcagtgagccaatcgttctcaaaatgaaattgtggtgtacttttcttgaaagcatgattaccatcgtgaataagtttgatggccttatgattgaaaccataaaaaggaagatgctgaagagtagcatgggggagaggggaatcccaagccttattggtgataccccaatccaaattctcatgaagagtgccatgtttccatgtgaatcggttaccagtaaatggcaacagtgaaagattatacttggaaacaaagtgctgaaaattatggatagcatgggaagggggtaaacagttactattatgatcattatagcccaggtagtcattgaaatcccctaaaatgagccaagggctgaagcgggcaatatcaaacaatcaatccaaatgtgtccaataagtatttttatcataaatataaggagaatcatagtaacaagacaagtgatagtttattttccgattaatggaaacattacaatcaatatgatgcaaagagtatgagaaaatatggatattcatggcatcattccaaagaggaaataaaccacttcctaaaccatttcttggcacctcaaagacatcatcaaaaaattgcctagcctaagttaaggaactagagttagcaactaacttagtttccataacaaaaaagatatgaggttgatgatgcttggttaggagtgagaagttatggaatgctttcgaactccctaatccccgagcattccaacttatgatactcatttttctaagcggggttgcatagcaacacctgcatgttcctcattgtcaaacatggaatggaccacggaaaatttagaatttgaggctcgggcctgctttgcatgctcctcacagaagagcccacctgacagttgcgaggggtgtaggatctcttcttagtggtggtagtgttgggttttatgcccttaa

SEQ ID NO: 164433 - DNA, 1843 bp, Cannabis sativa
attctcgtgcatcctaatttaatataatgtttagtcatatatgttctatttgtgtttcttctcaataaatttctgttaactgtagctgttaaagaggaccttccacttccagtaatggaaggcttggatactttagtagctgtaagtgatatcccttttcttgtaaaattgttggtattactaatgattatcacagtttcgttgatagtttttttttcctacagaaaactaaagccccaccaacacatattcagccagatccatatggtttgaaatttattcttctcagcgtatgagaacatttttgtctttttttcttagaaaagaatatgtttaaattttcttctttaacaacgtaggaattgttcagcctcagccaactcaatggtatccttcaaaatctgttaaaaaggtgagtgattctaatgaattgtataactttttttttggctgatagcggtagaactatttttattactattgatttggtagattttttctcctttcaatccattttgcttaaatagcttgattatctgagatgattgggtatcagtcaactctagatttttttttgtgctagacttcgtgtgagatgtttaagattgtgtgtttttgtactaagtaacttttaaaattaatgaatacatcttggacattaattttatgtaaaagagggaaagaattacagttagtcaaatttgtccatattattatgacatttttattatcttatattattatgacatttctactttcttttttgttgcagttgcctcttaatgctgttacatccattattgatggcttaaaaagattgtatactgaaaagctaaagccacttgaagttgcctatcgttttaatgattttgtatcgcctttactggtaagttgacccgtattctggattgattaatgccaagttttaggtaactcattcttatgatgtaagttgtattttacaggtgtagatgcactctttttctgtgtgcatgtattgtgttttcattaagcacctagtaacttgctgatttgtctttgcagactagtagtgactttgatgctaaacccatggtcatgctattgggtcaatattcaactggaaaaacaacatttataaagcatatgttaaagtgtgactacccaggttggataaagttattttattctctttgttatattttcaatatgcaataatatatgatgttggtttattttttttttcctttgtcacaggagctcatatagggccagagcctacaacagatagatttgttgttgtaatggtatgataatttgtcatcttcccatgatgttctgtgttttaacccattcagttttgcttatcaaaagtttttttaaatcaagatttgaagatctctttatcttgatgcttctattaaggctgtttttgatatctctttgttgtttggtgtattcgattgttgttgtctagtctgggcctgatgagagaagtattcccgggaacacaatagctgttcaggctgacatgcctttcagtggcctaacatcgtttggtgggtcatttttatcaaaatttcagtgtagccaaatgccacatcctgtgagtttatattttatttttgtaaaagaattattacccacatttttcctgtttttttacttatgctattctttttcttctataattgaagttgcttgatgaaattacatttgtggatactcctggtgtactatctggagaaaagcaacggacacaacgaagctatgatttcactggtgttatatcctggtttgctgcaaaatgtgatcttattcttcttctgtttgatccccataaacttgatattagtgacgaatt

SEQ ID NO: 164434 - DNA, 1311 bp, Cannabis sativa
tattggcccacgaagcattggttcacttgatgaagcgtgtgtggcgaagtgagcaaactaatggctatttatttttgtgcgagctttgaggagaacatcatcatttgatttcacctcggttccaaataaggcattgaatgttgaacaggtggacttcccagatgttagatctattttgtgcttttggaagatcaagcatgattgttgatcttggctttacacggatcgttccttgtaggtataaataccttcaaatactacgttttaccacttttaaccaaaattttaatttttttgtctcaaacccataattttttacagtaaaaaactagaacaaaaattggacgcaaaccaaacccttattgagcgcgacataaatttttgcattcaacttcctcaaattagagcttgaaaattcctaggtgcaccaccttcaatgatctcgactacgtcaccaaaagaagtagcaatctttgatttcaattctaaaatcgattttctaatcgactatgccaacgccaccgcagtaaggcttggtcgtctacatcatcgtgctgtggaaagaatttgtctacaactgttcctcgacgttagcatgtgctctcccaggccatatctctactcgaatctagaattatcgcccaattcatcgtcaggtaaattttttcctttttgatttcttaaactatgttacatgttcaagatataaggattatatgtaatttacttgctgtttgaaaatataactagtaaaaaatttaactaaattttaaagctgtaaaagattttaattaataccaacagagaaaaaatttatcataaatcagaattaagaacatcagccattgaagaacatgaacaatactaaatctaaacaataacatcaaatgtatccagactcaaacaaagataaaactaaagtcacaaacaattaacattcttcctccacaaattttaaatcacatattaacgtcaaagaacatcaatcagtcctggttgaagaaaaagaaacctagatctaattgaggaagagggtctttctctcttatttaagtgtttttgtttcctctttaattttgtagattcttttcttttttttagaaatattcccatcaaacataggagacttatcaaaagaaaaaaaaagctctcatgagttctcttatgaatatttacttattttattgctcaaatttcttattgcgttaggataagattgttgggttttgtgccctaaataatatacatttcaatataatcacatttactaattaatataagatcagaaatcaaattttatgttgcatggtt

SEQ ID NO: 164435 - DNA, 3777 bp, Cannabis sativa
  modified_base (3703)..(3732): a, c, t, g, unknown or other
caacaaatttaggtcgcatcttaattttttttattctatttcatttgaaaagcagtcatacagataaaactagggatttttatgtggtatactgtatttgggcatttttttacttttatactgccacacggcatagtttacttttatactgtacggtattatacaattttatactgtattttataaacagtatgaatcttcttatttttctcatatcgccacccgtgttgttgcatgcttttttttattttttttattaattattttttttttcagaaaaaggtgttgatttgatgttgatggtttgttcatgatagtttcctttttttttaaaaaaaaataatatcaaataaaaaaaatcatgttattatttgtaaacgccattgatgttctcttcttcttcttcattcattttttttagtttttgaaatttaaatttgtttgagtgtggttgattttgagcaattttcttagtagtgcgatgttgatcaatttttattttttgtttgaaacccaatttctctctaattttttccctcctaactgttgtgcattttctcctataattttccatttcggtttcttttccatggttgtcacacattctaagtctacctctccagtagttaaaaaatcccaaaatacccgtaaatttaagttacccaaatctacaatgtggaagtaaaaattgaaagacaatcctccaagtccttcttcccctgctccttccaaacgcaagttagttgctcaatctccttctaagaggatttttaaacgtcatcgagctattgaggaggagtctgattctgcttttgaacttgaggatgaattcattcaactagctaaagtttccaaggtcagtcttttttttgtttttgtttttgtaatttgtatgttgttgtgttttgatttgtccatttataatgtaataatgttttattttatttttatattttgtatgttttgttgttttatgttgttttatacattttataacaattgtattcttctccttctttttctttatgtttttctgtaggagaaggaaaatcccctattatgaatattccttctgaatctggggttgaagagctttctgctgatgttgttgttgaggtttgtggactttttttatttttttaatttttgttttgttttgttggttgtttttgtgttatttttcagctgttttgaaatgtatatgcatgtttttaatccaggactggacatgtaaatataggcgatcccaacattatcattctaacgtaatcacttttggttattattcaatcattaacgatattaaaactattctaaccccaacccaatcgaaaatctttttccaaattgtttttggtcactttcttcgaattccagagtacgttattcatttccaattattgcatggtctattgttgagggaagttcaacaacttaatgagatagaattttgggtatctgttgctgggaagtttcttagatttagtgtagaggagtttgccttagtgacatgtctagatcgtcacattgaatctgatatatttcagttcaaacaggataagaatatgctagttgaacattgtttaaagggtaataaaaaaattaccaagaattcaattcaagttgcctttactgctaacaaccttagggataatgatgatcttgcagtcaagttggttgtgttgtattttgttcagtgttacatgctcggaggtcaacttggaaaggttatctctattgaggaacttaattttgtggacaatagtcgttataatgagtatgggtgggggaaggggtgttttgagatgaccattgaatctcttaagggtaagattgatgctagtattaggactattaagaagaaggataaggatgtcgggttttataggttattaggttttccttatgcaatgcaagttttttagtgttgtccatatgtgattgggaaaattactttgtattcaaacataggcttcccaactggcctaaaatgaagaagtttatagtttctcagctaaaaatggacaatgtgaacaacatcatcttcaatcggcttttaaaataggtatatgtgtgttgttttttgattgtttttaagtttttttatcaatttattatgaattgtatttttatttcatttttattcatttttttttgtgatttttctgtttcagttgcaacttgaaaacattgctccaacttctgttgagagaaacagtttgaatttggttgattatttttctggtgacactactctatttattaaggataaaagaaaaggtaatcaagaattcgtttctaaatatgtgcccaatgctgttgttgaaggtgatgaaggtggtccatcatcatctaaggctcatgagcatgtaactcgttttgagtacgaggatttaaaaaaagatgtgtctcttgttcttagccagcagcagattattatgtctgtttttgctgatttgaacagaaagatgggtactcttattaaggtattattttttgtttcctttttaatgtagttgtttgttggttgtttttgtattatttttttattattcaagttttttctttttttttttcctagtctttacgttcagcttattgccactaatcgagccaaacagagaatgtgcttcgctcctcaaaaaatgatgatgatcttgttggtgatggagaaagagaggatgatgaagaaattaattttgaggatgacgatgagcctggagatgatgatgatgttgatgataatgccaatgacagcactggtggtggtggtccagatgatgatgattgtgggggcggagatgattgtggacagtctgtgtctgttgttgaaaaagtaaaaagtgatgagctgcatgttgttattgatggtggtgcaaagcctaatgaagatgtagtagatgcatctactgcacaagagtgcataaaaattattgataaattggttgatgcttcaaggatttttggtgatttgaaagaggtttgttttttagttggtttgttattgttttactggtttttttgtcctgctttgaattagttttgttttattttaattttttttgttttattaattaggatttattttctaatgatgatgatgatttgattgatgttggtgctactatggcttctggtgttcaagctattgagaagatggtatttttttgtccattgtttgttttaaagttgtttctgttttgttttttaatttttatttttttttattgttttgttatttttgatattagtttttctttttaagatggagttttcccctactgctgttgttgctggtcagtcttctatttcctttggttttcaaggtttggttcaaaatgatgtccgtgacattgttgtttttgaggagacaccaatcttaattcctagaaagagggacaggaagaagagggctgtgttgaagactccctttattgaactaggttaatatgatgctaaattagattcaatggctaattctcgtgatgattctaattttaaaatggtgaaatgtgtgcatggattatgtccatttgatgataagattggtgaacctgttgagccaactttggaggctgctcttgatgtttacttaggctagggtctccgatcgaagaaattgacgtaatttttttttattcttttgtgtaattttattaacttaagattttttgtaacaacctaactagcataggcgtattannnnnnnnnnnnnnnnnnnnnnnnnnnnnntgctaatcaacaaggtttatggaaaacgtgagtaattaaaatttt

SEQ ID NO: 164436 - DNA, 1909 bp, Cannabis sativa
aaaaaaaaaaaaaattattttcttaaaatataattttttctccaatttaaatttgatttattttctctaattattttttataattttaaataattaatattatataaactattaaaaatataccacgtgtacacattaacaatcctcgttagacaaaacttttaaaaaaagttagatcaaaaccgaattggaattcaaaagagatttagcccacaaaaattcagtccagagattgatagtaccaacctaaccttaaaattcaaataacttagccgcaatatagaagcaattatatcacataccacacaaaggttaccgtatagtcttccaaatattacaggtcttagactatattttgaatgtcaaattgaaaattcaatgttcgagacataaattggttgctatggtattcaatcttcaatgatataattgctttgccacttacattttactatattgaaagactcgttaacttaatcgataatggctgtatagcatgtgttaaaaggtgaaatcaatttgcgcaaacagcctgcctacaatgccaaaagtgttcatcgacaagatgttacagaaattgagaacatgagcaccatcaagatacacaaacttgaaccaaagaaatgactaaaccttataagcaatattttagtaggaaatatcagaaaaaataattaagaaacctaaccataaacttcttagcagaaatcaaattcttctataaaaaagagaaagtaagataatcacaaaggcatcgtgaaattgtgatactcaccaatatgatcaaaatttgcatctactgtgagccttcgttcaacataaaaacttgaaaatattttcaaatatcactctaaaagtagtacggaactcaacagtctgaaaacttaagtgtgcgctacaagccaaaattcatgtccaaaactggaagaataacaaataaatctctaacttaaactatggtttgcaatgatatgaagttatgaaaggcagcagacatctcattcccagcctgtaggagcagtttcggtaggcaattgagcaggtggaattgcaacatcccatccttcggcagccaaaggtactgcagctaaaaaaacatcagcaaagataatataatagtttaaaaaaactacccttttagcagcaaattaaaacaaaacttaaggcagtaaagaataaacaccggtatactaacctgcttcagtagtccagcccacagcgggaacagctggaatagcacctgagacttcagcgggccaaggagcatcggctatttggctaggccattgttcagcagagaggccagcaaggccagaagttgcataatcggtaactccatagtctgctccaacaatggcttcctcttcctcctctgttttagcctcctctggctccctatagaagaataaatctacctgcaaatggaaacaagaatcaatccaaagaaaatatgttttaaaaaggcaaggcttgaattaacattggaattaaacttattaaaaaaaatgtttagtccttaccataacatcccatttgtgccctgtgcggattgtgccacgcatctccaaaaccatccttgccaaaagccaaaacaggcacccaatactgtgtttccccttgttattcgcagggataccaatgtcaacgtacctcattggtgaatcagtatcgcagaaagcaatggtagggatgttaccgagagcagcttccttgatgggctgcaggaaagttaaacaatcagaattatccattataaaataattatgaacaatgcaagctgtttggaatgcagtaatcacctggtgatcagttcttgggtcagtaagaattaggagacgaggctcattaaaagatgtctggagctgattagtgaaggtaccgggagtatgccttccagcaatggcatgag

SEQ ID NO: 164437 - DNA, 526 bp, Cannabis sativa
gttgatttattgaaagaatcttatgatagattgttagaagtattattatatatactattactgtatttgttgcatatgatattttttctttcttctatatcatgtgtcaaaattatttaacaatacttgtacttaagtttcaatatataattatgatcgatgcttttcaataatataaagagcaattaaatattctctctcttttgttttttttggtgtgtttaaatgattatattattgcgatagatcatgtagaattcactgtgtcaaagtttattatttcaatattatcacaataattaataataaaactatattttagatgaactaacatgatatggatagttattcttgttttttaattaatgcatactaattaaaatcagtaggagattactgatatatatatatatattgatgctcgtgaaattgtattttctataataactataattaaaaacaaaatttacgataattgaaaggaacatctatagatttttatatttatacagttatatatatttat

SEQ ID NO: 164438 - DNA, 2857 bp, Cannabis sativa
cccccgccattggcttatcatcagacatagtagggaccacatcgtcatcagaaataacagcccttgctctcttcagcatacttcgcacaaaatctccaacttgggcactttgacgcacgaaggtcctcctggttctaggggaaatggcagtggaaagtgtggggcgtggttcattaataaccacccccttgcctcctcttatgtgtgagggaaggctggtaggagacagagcaatagcttttccttttgcaacatgggtggtgactgaataagtcataataggtggaggaatggaagtttccatagcaggtggaggtgtggatatggcaggctgagtgaaggtgactgaagcctgagcaggatgagaaacgggacttgaagtagggggatccacgtggaggaattggtcaactgcttgttgcaaaccttggtcatcgttgcgggtgcggatgcgaggaaaaaactcctcaaaagggatggagttagaaatttcaaacggattccttttatgttgagaagaggaggaagcacggagagaatcgttatactccaggataggaggaacgggaaaattatcacatcgaagaagatatttgggacacttgttgtaggtgtggtcaacaaaactgcataagtaacagaaattagggagatttttgtactgaaaactgatccattttgggtcggtaataccacggaaacgaatagtcataccccgacgtaatggcttagtaatgtcaagaaggactcgaagacggaggtaaggaccaaagttttccattaaagaaagtgggaatatttcaatgagatcaccaatctcatcagcaatgaattgcgccaattgagggcttttccgaccaaacgggatcctatgggcctggatccaaaaagggacataccgaacagattcgggagtaggagtaggggacacgtcaggatgggtaaagaccatgaggaacttatcgaaatgccatggctgctcctcaagaacacgacgtcggtctccgtcgcattgaacagaggccaagaacaatccagagtgatattcagagatttggacaggaaatctaagggtctaagcttcagacatagctttctcaatccaagagggtttggcagatttgggggacaacagtttgaagaacagacagaaagagttgacatcattaggagattggatggaaatgtgatcaaactcatgaatgagactgtcttcatcatcaagagcagtaatagggttagggtttctggaagaggacgccattgttatcagagaaaaagggaagacagaggtggtagacgaaggaggagatgatggtgtggaaagacaatagaacgaagcatataaatacacaattaaagaaacaaaccacagaagagagtacctggagaagaaggggtgcctcgaagagggacacggtgtctgagccatctcttcaaagcctggtgagactgtctggattcggagaagatgcgcaatgatgatttttgggtgtgagaagaagataaactaattgacggttggtttatctgtagtaaatcgacctgagaagaggaatagatatagtttttgcagaaacattaaatgctgaaaaaaattgtgccgccaaaattaaatgaaggtgtgagagagaaatgatattaaagaataattgagctcgagaaattagggggagattcataatgattagggtgacgtataagaaaattaaatgcaggagtcagggaagaggtaattaatgtagacagcaatatcttgaaagcaaggatcttaagccagagagaaagggaaactgaatcaaacctagctgagattgaaccagagataaggaaaactcaatcaaacctagctgagattgaaccagagcaaagcctgtaggaagcttcaagaagaagacttaaaagaagtgtgaatatcaagtcactcttgttatgaaggtcttgaccaaacttttttataacttaaattgttataaaaatatacaagtttatttttcctaaattattactaaaaaaatcatgtcttcaaactattatcgatactaaatattctccaaaattataggttaccaagttgtgaccattctcctttttgtactacatggattttattttattttattttttaaataaaagactacaaagaatgactaaattataataatattttaaatttaaattttggttgtttttcttaatggtttattttaccaaatatttaattaggtaagatttaagaataatgagtgatatatttataagttacaagtctaacattaatcacatttttaagctatgtgggattttttttttttttaaataaagaaaaaactctatagagaatattcgtattatataaaattataaaaatccaaataattaaaggtgaacagaaatatcctaaaaaaaaaaatagttgttttttttattcatttaaccaaatagcaaagatgttgtgacatcatagaaaaatttacttaatgaggtaagattaaattaatcaatcacccacagtaaaaaaaagaatgagtgatatatttataggttacaaatctaacactaatcatatttataagctatgtgagactttataatatcataaattatacttttataataaaggagaaaatatacactaatcacattttttaaagaatatagggtataatataatatttaatgaaattttattatttattattttatataaagatgaattcacctatctcttttaagatgagataaataaataaaaatatcagatatcaatataaatattcctctctacaatgagtccttaaaaaaaattatgatatttagttaaacctaaaaggaaaaaggaaagagcttttaaata

SEQ ID NO: 164439 - DNA, 752 bp, Cannabis sativa
caaataggttggaagaacaaatttctacattgataaaattggtccaaaaaataaagtgggcccctcacccactctgaggatgaggacccggagccctgcataagaaggatcacggaagctctgctcctagaaaacttcaagatgccccaaattgagttgtacgaagggagcactgatcctagaactcatttagccaagtacaacaacatgatgcaggtggcaagagtcagtgagaacacaaagtgtttgtgcttctccttacccacaccaaatctatcgaggactagtggaagacaaagcctatgtatacaaatacattaaaggtaatgtagtggtattcgtagttctttatgctaatgacattctacttattggagacaatgtagaaagattatcagatgtaaaaaagtggttagctgataaatttcaaatgaaaaatttgggaaaagcaagcaatgttctcaggattaaaatctatagagataaagagtagagaacattatcactttctcaagcaacttatatcgataaagtgatagaaagattctcaatggagaattccaaggaaggacagttaccgactagacattgaattactctttgtaaggatcaatatccatagactcctcaataggaggaggacatgagaaagtacccttatgcatcagcagctggaagcttgatgtatgcaatgttgtgtacaaggtctgacatatgctatgatgtaaggattgttagtcgttatcaatcta

SEQ ID NO: 164440 - DNA, 1206 bp, Cannabis sativa
agagagagagagagagagtaatggacgggccgtgtgaaatgaatggggcccaaggagcccggtcttagttggggccttgcttggttgctcctatatctgattgtcaagtgttttggttgatgacgtatgttattctttttaattaaatacttccaaagttgcgggttcactttctcattttacctattgtttaaaccctacttgacaaaataactttttgatttcaatattttactttatatattaatgatttttgcaccaaagcttccaagaaaataagtttgtatagtcccatcttttaaattatttaggtcaaaagttaagaatacaagtacacgtaccaaaggggccaaattaataataataattatagttaaatttctttgaaacaattttggctatctctccttgggactaggaactttgcttttagttgtacgttatcaatgagtatatatcttaattcattcttttttccatcaaacgggaaaacatatactatacaatcctaataattaaggaagttagctattttaatcagaggacgaatttgcttgtgctaagaagcctaagatcatatatttatttataattgagaagataaccctaattaatcttgttccgaacaaacattcatggtgcatatatatagcagtctaatattataatgattattataactttaatccattcagccaaatgatctactgtagtttcttagcaaacaaaaaaaaatgatttactatatatattaaattgctatgttaattattatttatatatttaaacaaacttcttatcaaacaatggcacttaataaaaataagaggtagagagttaagtgttgaaacatgaatacgatggatacaaagcctaaaatgacagattgtattctattttatttactatatataaaactgttagtgttataaaatcctccaaaaatataaataaccacatatttaactatatttctaaaagtattttaatataaaaaaatttaaatcatattttataaaaattttgctaaatcaaaaaagaaaaaaatgataacgagatgagcagaaacactagcctaaagtcattgttggagattgcatttatgatcttctaaaaatactatatttctttaaaatatttttctttgatggggaatgaggaaatacatgaacccggagaccactacttatttataagctcattata

SEQ ID NO: 164441 - DNA, 1275 bp, Cannabis sativa
  modified_base (1003)..(1007): a, c, t, g, unknown or other
tgcaatgatatccaaatatgaagtgttgatattgtagtagataattccagtacatacagctacacccaagtaaaataccatccttagccaataatatccaacatctcttctcatatttacaaatgaccgatctgttaatgtgtacatttgtttccaccaacttgatttgcttttgtttgataacacaatcacttcttcctaaaaaaacatgatcaacatcatcataatcaaattggtcatataatgtcattaagtttagtcgtaagtaatattttgttgtgacttaaagagttttttttaatagtgatgatcattaaaatgtgcatacagttgaattaattcgttgaatattgtctcttgtaagtgttgcatattttgaattattgtacttgtgaatgagaatttcttttatatcttgtgtggtcatcttgctcaatgaaccaactgatatggtagattcctgtgatttagaaaatggaaaaagatgttaattaaacactttttatgataattaatcgaaaattatgtactcaaaaaaagaaattaattaagaaccgattggtgtgtagaaatattgtcaaagtctgaattaacacatcgaaggaagtgatctgtaggatttgctcttataggacatgggaacccagcctctgcaaagaactgtgtatacaataatatatgaattaatgtgtatctaattttataattatgagatttttttcaaaataaaggggaattaagagcattagttaccaaaagagtttttgttagctataaataataaagaaatacattagaatatttatctaagagtaagaagataattataactaaatataaatatattagacaagaaaaatcaaaacaccaaaagccaaaaggtatcaaacacaataacaataataataaacagtacttataatactacatcctaataaaattatttttaagtaaatatgtatttatacatatactataatttaaaataaaattattaattttnnnnnaataaatttataaactatatattttattaaaatatatataaatatattttttcttaatacaagacttaaaaaatgtaaaaattattattacttataactggtctaaattagaaattaattattgataataaattagtttgtgatgtgagcatagaaattaataactaataattctttgtattttaatatgtggtgctatgatttacattgggaaattttattttttgcccttaataaaattcctaatatcaaaatttagaccctccac

SEQ ID NO: 164442 - DNA, 940 bp, Cannabis sativa
tgaagtcatattgaagagtggtaactataatttttcattataattttttagttaatttttatgtttgacatgttagaatattttttaatttttcttttacagtaatatttgtttggtagagttataatatcatagtactgaaaacagaaatcctgttatttcaatttatcacgtgtattcaaaaaaattttaaatatattattgaccttgtaactattcgatttttttaaaaaaaatttacagagatgatgttataaacttataattataacaaacaccgctatgaaaataaaattaaaaaaaatattcctgtatgtgttttcgggcacagaggtggttgtaacaagatgttgacggtagcacacctcttaagtatattgtaaaattttgataaattttaaataatttataattaaataaataaattttagatagtctattttatacttataaataaaagagatgtagctccaataaattttttgaaccttatttttaaaatgttagagcactcttaatagtttttttactctattctttaaaataatcaccaaaatactatttttttttttgttttacacaccatttattatttttctttattttttctttatatcatcttcatactatttaataatatatttttttaatatatataatcaaattaaaaataatagaataaaataaaattgaaatattattaaattatgtttaaatgatagtgtttctctacatgtagagaaacatttaaataaaataaaaaatgagtttacatcatttgttacaagatgtttttgcttcattctttttaaaaattttaatgaatctttagtgtaaatgagctattgagagtgcttagggtcggccctagacatagacggttaggcctgcgcttagagcccactcattttaggggtccaaataaaaaaataccttttaa

SEQ ID NO: 164443 - DNA, 1253 bp, Cannabis sativa
  modified_base (1226)..(1228): a, c, t, g, unknown or other
tttttttttttttttatatatactgataattaattcgcattgttgtattttcaagttattttcttatgtttttcttggttgatttcatgttaattttttttgttgattttatataattttggaaaactttataaaattgtaattttaaaaaaaataaaaaattaaaaaatgaaaaagaaaaatgtagaacgataatactgtaaatatgttttgaccgtataaatattaaattgtgctaaaattatatataatttgtacaagagtaaatacattttggattctgtgttttgcaaaagttaccaattagactctctattttgttaaattacaaaataaaccatatattttctaaaatagtaaaaaaggaccctgagctcaatttttaacaattttattttttaatataatcaactttaagacaatttctaacacggacagatacagaaaatgtaacaagttttatcataacatctttagaatagattattattaagttttattttgacaaaaaattagttcagggttctatttgtacaattttagaaaatacatggtcttttttgtcatttaacaaaacagaaggtctaattgataatttttataaaacacaggatctaaaatggtatttacctttttgtacaaaattttaaatatttgtacacattatagactttctttatatatatataaatacagattatattcacattcttgtattttcaatttcttttgttattttttatgttgtttttttggttaatttcatgctattttttgttgattttatataatttttatagaactttgtaaaattgtaatttaaaaataaaaaattgaaaaattaaaaagaataattgtaataatgtaaaaagattataatgtatatatattttgccgtataatattaaattgtgcaaaaattgtatgtaaaaatccccttaaaaaataacataaatgacaacaaagtaatatttttttgtgataaaattctttgaaacaatgaacattttaattttgtatgggccttatctattaaccaaattgagaatctaaagaggagatcttaattggatatattggcccaaagctagacgtggagttgggtcaagttccatgtggattcagatatgggcttttagagtactagtagggaaatttataaaaatactggaatatggattaacttttacaaaaatactgtcacacggaatttttttcaaaaatannntgtttttataaaacaccagtaaaac

SEQ ID NO: 164444 - DNA, 545 bp, Cannabis sativa
ccatgacctgggtcaggtaggtcgatttgcacgaaaactgaccgttggtttcaagagtccaactccacttgtcttttccgagatctgggggacccaccttttaaaattgtagaaacagtctcttgtttgaaaagagatctcaacttatgaatgtcccatcctccctcagaggagagtaaatctgcaactagacaaggattaggatcaagagatccatttggcttggggtagaagtcttttatgtggggaatcgacggatccccccaaatattagtgtccctcccgttggccactattttacatgctcctttcctcaagatagtcttggttttaacaacatttttctaaaaccaagaatcagagtctttatatatgcagttaaggaaatcttgccctctaaggtatttagcagtcagaatccggcaacacagagactggcaaccatttaagatattccattcccatttagcaaggaaggtgttatacccgaagttttgtaagcacatcaaaggaggacacgtgtcaagctgggaagaactcaaaca

SEQ ID NO: 164445 - DNA, 2040 bp, Cannabis sativa
tattattattttgttttttttaaattctactttctttattattttaacttaataatatgttttttgtttttcttggataatatgtttcaactagaaaataaattgcgctctgcatgcggtggtattttgttcagtaataattaaatcataaaattatatttgatatttttaatataattttttttaaaaatatgagtaactattttataaaatttttaattttttactcaattaaaaaaattaataacttcaaatattatagtaaaaaaataaagactaatgaatgctcgcacaaaaattgatttatttttatgggtacgagactttggtaattgtgagcaaagaaacattatgggtgtaatagtgtggctctacaacaaagttttatttttatgggtatgagactttttaattatttgatttgaaagtgttattcgcattttcgcgagcgtgacacgtgaatattaatcaaaaaaggtcaaggattcattaagccacccaagggcctcgcttcgcactctgggaggatagaagcgctaaactcgcagaactgatctctgcgagagaagtcttcctaaatgcagggcacgagagagatgtccgtcagctagagactctctccattctagaagatggaaccttctgctcccgcgaggaaaatggaccgttcactagaaggcatcagtctagggtacgctgttggcccgcataagttcagttcgcgcgtgccaggctacgggcctgctaaccgcgcctttttatgtacgatgtatgagattgtctcccacgccacgctactatatggaaaatatgtcacctacaaatcgaacggtgggggttcatccctatgaagatttattcgacgtggcccatttgatggagtcggcctataaatacccccgaagatgcacaaagtaggggacttctctttttcccttctttggcctttcaccttggaaccgaagactgaccctcgtaaaacacattactgtaaccccattaacaattccagaatattcctactaagctttcttttcttcatgaggagcttggtaaaaaggagaaaaagtccatccattttgtatttgtataaataatgattggctaaagagcctaataaaatggactcgtggactaaggagatttttcggtgcatgaaccatgtaaaactctcttgtttgttattatgctatttataccttcattactttcctaagctctaagattattcggttgccgaaaaacataatacgaaccttcagataagagccccaatagttgactagaaccgatcttggtcaaagttactcattgattgtaaatcatcactatcgggtatcaatcgtcattgcaagtatgttcccataatgacaggggcattttaggaagacaagtgcgatccactattcatccctgatcatcccaacgtgacttctagtggagtcactatagttgactagaaccgatcttggtcaaagttactcgttgattgcaaatcatcaatatcgagtatcaatcatcgttgaaagtccatttccataatgactatgggcattttaggaaggcacgtgtgatccgttattcatccccgatcatcccggtgagactactagttgattcactatagttgattagaatcgatcttggtcaaagttaatcgttggttacaaatcatcactatcgggtatcaatcatcgttgcaagtccgtttccataatgactagaggcattttaggatggcacgtgtgatccgttattcattcttgatcgtcccgtcgtgactactagtggattcactacagttgactagaaccaatcttggtcaaagtgactcgttagttacaaatcatcactatcgggtatcaattgtcgttgcaagtccgtttccataatgacggggggcattttaggaagacatgtgcaattcgttatgcatctccggttgtcccgtcgtgactactagtagattcactatagttgactataactgatcttggtcaaagttacttgttggttacaaaatgttgacttcgcttttag

SEQ ID NO: 164446 - DNA, 1141 bp, Cannabis sativa
tagaccagaaaatgctgcttgatatcagaaagctagttaaatagcatgaatggaaatatcacagtgtgttgatgcagcaacaatagatttttttttttttctgaaggacagcaacaatagattacacagggcaagtttttactttctttcaagatttaaagagaaaaagaaacaagtatgaagaaataaattaaagaacaataaacttaacagctacaagcaacctttccaacaatagtattaacctaatataagcactaataaatttcttggaaattagaaaacccacttgaataaactgcaaataaacgataaaataaaaatcttaattctttttcccaaatcttattttaatcagacaaaaccagaatattgctagtggagcctcctccctcaaaattgagaatcgcgaatttcttaactttccaaagattacctgaaaaccacgagactttgccccaagaaatcccgagcagctagctgcaccacattggcatcgaactttggcaccgccataccattcaaaattgtagttgtatgccagttcaattccaatagggatatcttgctttgcaaatattccaacccttacttcccccaagacattccacttcctcgtctcacagttaggttggctgaaaatgtaaccgaaagaaaaggaaaaaacaacaaaatattggcaagatcaagtttgtgggataagatatagtacaaaagagagtaaatcaatttttcaattcccctatcaatatttattttttcgactaacgttctgttgaaatggctcaccatgagtgatttataaatctcgcgtggctacccttcctggtggcgtcaatagattcagaggcatcaagagatattataaatgcatccctaacacctgcatcaaagccacacataatggcgaaacgattagttttgataaaagataatgtaagaacatagattgctactttaacagaaaccttgagtttcataagcttgtgatctttttttggcttctttccatgatatcacttctccacaatactcaattatgaattgtcctgcctgcagtacgaaataagaaagaggagtttgattaatcaaccacatctttaatcaattaaatgctataattaaagagagagagagagag

SEQ ID NO: 164447 - DNA, 1044 bp, Cannabis sativa
cagatactggaaagctttgcaaacaggatatggaatgggaaaattgacatggttaaactcctatcacatggcatattcatcatcagattctagacctgtgagtttcgtgatgatgttcttaatgggggatatatatttttcaataaaagacatgtaatcatgaaaccttgggatccaaatactaacttcaaaaaagaggatatccatacagtacctatatgggtgcatttagaagatctggagctgaagtattgggggcaacggtctctcttcaagatcattgatcaagttggaagacctgtcatggttgacaatgtgaccaagtaaagagagagattgagttatcctagaatacttattgaagtcaaaatgaatcaaccactaccagatatgatcaattttgaagatgaaaatgggtccaatacacatgtgggagttcaatatgaatggaagccaataacatgtaaaaattgtgccggcttgggtcattctacagaggagtgcaggaagaagagtgaagggaagaaagagtggattgtaaaagatgacaaaagaggcaaagtagtggaataggggattcctaaaacagatgcagaaagatttcagcaagttactaagggttggaaggcaaaaagaatcctctgatgtggttatgacacaaactgggaatagctttcaagttttagaagaagttgaggatattgggcagaccacaaagcacaatgatggaaatagtactatgcctcaaagtgataagataggagaggggggagggccctctcttgtcaatggataaaatgatatgttggaacattcgaggggctaacagccttcacaaatagaaccatattaaacattttattatgtctcaaggtgtaggttttgttggcctccttgaaacaagagtcaaagctcacaaactttgggctttgtactcaaatgtgtttcaaggatggtgtttctcttcaaacttaccatggcataaaggtgggagaatagtgctggcttggaaccctattatatttcatgtaaatatagtagctt

SEQ ID NO: 164448 - DNA, 2086 bp, Cannabis sativa
gcttaatgggtatgttaagttaggtgagattgagttagcaaagattacttttttaagaatgagtgttaaggatgatgtttcttggagtactatgattgttgggtttgctcaaaatggttgttttgatgaagcttttgggttttttagagagattcataagttgagattgaagcctaatgaagctagtttaagtggggtgttatctgcatctgcacaagctggtgcttttgaatttgctaaggttgttcattgtttgattgagaagagtggttttgtgtggatagtttcggtgtgtaatgcacttcttgatacttattctaagtgtggggatttaggtatggctcggttagttttcgaaagaatgttggagaagaagaagagtgttgtttcgtggacatcgatgatagcttcacttgctatgcatggttatggtgttgaagctatagagctcttccataagatggaaaattgtggaattaagcctgatggggttagtttcatttcggttttgtatgcttgtagtcatgccggtttgattgaagaagggtgtagatatttctcgatgatgagagatttcgatatagaacctactattgaacattatggttgtatggttgatctttatgggagagttggtaaattggagaaggcttatgagtttgcttgtgaaatgccaatttcaccgaatgacatcatttggaggactcttttaggggcttgcagccttcatggtaatgttaaattggccgagcagataaagaagagactttcgagattcgatcttgacaattctagcagtggtgatcatgttcttttgtcgaatgtatatgccagtttaggaaaatgggaagatgttgcttcggttagaagatcagcgagcgagcagaagataaagaaagctcccggatggagcatgattgaagttgagaagctagtttatcggtttatggctgatcagaaacaagatgagattgtgaaagaagcttatgaaaaattgagggaaataatgttgagacttaaagttgaaggtggatatgtacccgaaatcgggaatgttttacatgatgttgaagaagaggaaaaggaagattcagtgagtaggcatagtgagaaactagctgtagcttttgggatagctcgattaagagaaggaaatgttgtacttcgaattgtgaagaatttgaggatttgtagagattgtcatgttgtgatgaagcttatttctaaggtttatggattggaaatagtggtgagagatagaagccggttccactcattcagagatggctcttgttcttgcaaagattactggtgatatgagcaacaccgaaatgaaatcgaagaacaacattttcgtcgtccaaaggaactgttgattgtgtccatgctgattgtgcttgatgaagccatgattaacagctacagacagatccaaagaatcttttgaagaagccaattttgataaaatatagttaaatctgttatttgttcactgatataataataataataataaattttactttaatgttttataaatttaattagatgataataatattataattgttatttaaatattacgtacggaatttttgcataaaaaagatatatatattttaaattttaaaataagggttagcgttaaaaaaataaaaagataatttgaaaaagaatatgttaaaatttataaaggtagttcgagtaggattagaatataataaaactatttagattacgattagaatagtgtccgtacgtctatatatatatatatattatattacattatattattttgataaaatagaagtgaagaaatattggcaaccttaataatattagagtaatattagatataaagaatttagaaaatttgaagatggataaatatgaaggagatttagaagagagtttgcattcttctccctattggattaggggttccatgcttggaaaaggtgggtttggttctgtttacctcgcgagaatggttaaagaaccatcaccattttatgatggagctacgcttgttcgtggcttccatccaatcatggctgtcaaaacttcacgtcttgaaaagagt

SEQ ID NO: 164449 - DNA, 1236 bp, Cannabis sativa
tttattttcttcctacttttgtatatctagaagctaaacgttgccaagaaacacgaaagaaaaaggagatgaaaagcacatgcaattctttcatttcaaatatttgaatcctactttaccataattaatttttttaattattattttgctttttaaaaggaaaataaataaaatattaaaaaaaaaatctccttttgaggaatatctgtaaaatcccacccaaaaattgccattatttcttgactactttcatttcatatatgaaccactttccattagacgcgtgacttcacttgcctctacaagtcaaacgcgcctatttttttaaacggaaacttcattttgaaagctgcacctccgggttttctacgcaaagcctacattgccacgtcatcatcaatccatctattgtcgtgggcccatccactgccatttggattttaattcgacttattttattttttaaataatgacgtggcaggtgctgtaaaagaggaatcgaaggagaccaattccattcctggtccacccaccttctatgtggatctaagatcttgacattttcaaattgattcaatttataattattaaattttctgtgtttttttaatatatttgttgttagtggtcatatatcaaattaatgggaaaatgacattaaaacactttttttcaatgatcttagaaacagttttttctactaatttgttaattagtctttatttgggcgtcgtgatatgatattttattcctattctcttttttggtggagaaatcaaacgaatacgataaactttattacgagtgcacaattttatttatttatttatttatttttggaattaacacataaaaaatggatttgatataatactttctaaatttctattttaaattacaaacatatccttaaatttttttgttaattaccattaaatccttatatttttttttttgacgaaccttatattattcaattataagataaaactataatttagaaaacttcattttttatatatacaatattataatgtatactatctaaaaatatatatatattataatacatataaatatacattttttttttttactaatctataattatagttttttcatatgattttttttatataaaaagaaaactgagctcaattttttatttattatcaattagtatttttttagttataatttttttttttttatttattatcaattagtattttttta

SEQ ID NO: 164450 - DNA, 779 bp, Cannabis sativa
aagctattttgttagctgattttctttaatgaaagttgcaatctttgtttaaaaaaaaaaaaaagaatagaccaaatatcataatgtcattctcgttactaattatcttactaattaaaaattcaggctggccttagcttaattggtcccccttctacaaacagaaaaagtaattaaggactaaatattattatatatttgtgaaaaagcaagtactaataaatattactaagtatacttggaattttcgtactcatgagcttttgcttttggtcataggttttggattagtttaattaatctattatgtattaaaataagaaaaagctgtgtaagatatttatttaagatatatattcagaaccacttttctttctctctcaaatttgaggatttgtttatagtaaaaaaggacaaatgtgctctgttaaacccaccattaatcttaaacataatatatataataataaagacaggtttaattcatggtgcatgcatgtgttttttctctctttttatttatttattattattttttaaagtgcatgtgttgttgtgaagtaacacaaattttataatgatggcgtgggagaggtttgcaaccatttttgttggatttgatctgagttttgagattcaatcaaaaaaaaaaatctgagttttgagagagcaggtttgcaactatttacttattataaataggctaattagtaaatttttccctgaactttgacatgtactaaatcgtgtcttctgaatttttttggccattaaaaatt

SEQ ID NO: 164451 - DNA, 1541 bp, Cannabis sativa
cccatactccaataaatgatttgtttaggataatttttacttatggctaatacatttgtaggttgtcatgcaacatttgttaaaaattatgatcttactaatttaggtcgtttaaagttacttctagactagttttatttaatttatcatttttttttggtattcatacatatatatatatattattgtactttatgttcatctgtatacgtatatatgtatgtataaatgtgtcgtttaaaggtaattcttagattttggaaccctcttttttaatatgttctgtttcagctacttggagctagcaatattgccttgccgacgttttctgcataacaatcatgcaaattgcctccaacgcttggtaatgatgacacgagggttagcagatccactggcatcttcgtattgtcgtttatatatgacttatagtttgcggaagttgccctcctatgacattggtaaacaacccatgctttatgaatgtgaaaagtgatttaatttaatttataggtgctaggaaataggggaagagaggataacaagaaaataaggaagacaaaaagatgaagggcattggtagatctaagaaaacatgtttcttagagatcctgatcaaggttgactttattgcaaagctgtttatttatttgtacccttttgtaactattgcatagataaatgcattctgcataacatcaaaaatttatagcaagaatttaacatggtgtcacctaacaataatgtaacagtatttctagttaatagtgttaatgacatcaaaacgatgtactcgcggatgatattagcaaagggaggtgcagagggaaatttgaaaagcaatatgagattgcttgtcactctgatggaaccaactattgagtttatcatgcaatgcatatttaaggatgcctctgaggtatgttatatagtgaatttattttaccttaaacagtttccgtgggagggatctaaatgcaattgttcttattgtgtatactatctgatatgtgacaccatatgcaaaccttaaaagcctagtttgttgtaactacttaaatcactagttgttggaacttaatgtgatatttcattctcaatcatatatagtgtttgctgagattttcagaaaccaataaaatatatgtgaaagctaaagaaattgttgaataataaagaaaataacactagagtttttatgtggttggggcgttaacaagctttagtccacgagttaatattattacgattaaactggaaaagccttatgatttatacaagtgtttgaaccctagattttgcctgagcaattgaggagtgagattccaaccctttgtttgaatgggtcctcttatatttatagtgctagggctcttattcgtttttactcccactgatagggtaaatacaaataatattattgacttgagcccatctggtggagcccggcccatgaggcgctgactgtatgctgatgtggatgccacatcatattgatagttgtcaaaaccgtgtcttgttttcgtggataataaagacac

SEQ ID NO: 164452 - DNA, 1665 bp, Cannabis sativa
taggaaagagagtgtccaatagaggcctggagaaagctactgtttttgaaatatttagcttttagtagggaagtaactaaggagtttgggttggaaaaaatgtgccaggcttgtttagcaagcgtggcttgattatggtgaacgatgtccttgaaccctagaccctcaaagaatttggaactgcaaatgtgggtccattttctccagtggatcttatgagtacctgaagatccccaccagaaattggccataatcttgctaaactacctacaaattgaaagaggaagcctatagcaagacatggtataagaggggatagcttggatcactgctttcaggaggatttctttaccatccttagagaaaagatgttggttccaggccgataatttactgctagccttttggagtaggaagagaaatgaggatttcttagatctggataggcactggggaacccccaggtgtttgtcaattaaaggcttgtcactcatttgcagagaggtcagaaaattttgtttatcgttagaactggtgttgggcgagaaaaggatggaggatttagcaaaattgactgtttggccagtggcctcattgtaagtagcaaggatatccttaatagcattgttgttcacattattaacatgtgtgaataacatgctatcgtcagcaaaaagaagatgggagatagaaggggtcgagcgacagatagaaatcccattgaattggtgatcaagagatttgaggttgataactgtggagaggatttcagccaccaataagaagaggtaaggtgataggggatcgccttgtctaatacccctagagggttgaaaaggaggggagagatggttgttaatgcaaagcttgaaagtgaccgtggaaatgcatttgagaatgagggatacgaatttattggggcaacacaaatgagaaaggaaaactctgatgaaatcccactcaaccctatcaaaagccttctccatatcaagttttaacgcagtccaccaaattttgtcgctcattctaatattgattgaatttatgatctcattggccatgatgatattatcaaaaatgattctgttatgaagaaaagctccctgattatgagggatgagatcttcaaggacagttttcagcctattggcctttttaaacaattttgtaaacgatggaacaaaggctaataggcctgaaatcttgaactctcgaggcattgttcttcttggggataaggacaagggtggtctcattgataaggtctagattagctccattgttgaggatgtcgaggataactttttctaaatcttttcccaccaaagaccaattcttttggtaaaaaaaagggggttgagaccatcaggtcccggggcattatctccaacaagttggaaaagtgctcttttgacctcttgagtctcaaaggtttttgcaagatagtctgaatgattagttgaaatatgcttagttgtacccttaagaaccgagtcgatggcattgagttcagagccttgagaagtgaaaaggctcgagtagaaatggacaaaactatcagagatgtccttaagattggtaacaacagtgctatcctccagggtgatggcctttataaaattatttcttttcctcatggaggccttattgtgaaaatacttagtg

SEQ ID NO: 164453 - DNA, 1268 bp, Cannabis sativa
tagggcataaaacctaacaggaagggctataaaaaagtctcccctaacaaaaaagaaagataatataaactaagaaattaaaatattgtcttaaagggggagtagtaaaaggaaataagaaagaggggtttaattaatcaacttttggaggaagtcgaggacccattcgctcagccaaggcctgctccagcttcttgttcttctcccagaagtgaaccaccgtagcttcaggatcaggcataaagtggcgacgaagttcaaacttgttcaatttttagcacataaaacttcatcctcgaagcgctttgcataatgcttgcatgtcaccagagttaataatgcatccctcgcagccatcgcgacctccttctggtttggtcccaaaactcacgcaaatcgttaagctgaactgacatatttgctacaatttctatgtcagtcttatctagctcttcaagagccttgagtttcatagagattccctgaatctcctcttgggcatttagaaggtccttctggccagaggcaatggtcctatccttggcctttagagcctccttataccgctccttgagagccttctctgccaaagtgtcattgcaaagagtctccatctggctctttgcctccttgagcttcctcaaaactctgtccataccacctatctccaaaacgcaaacccttggtcgatcaatgtcttggaaagacgaccgacctctgtagtaatttggcagctatcaataaaaaatgggtcaaatcttcaagagaaccaaaaaagaaaaaaaaaacttgaaaattgtatacttacagaggtaaaggctacgctcatgccctggatctggtagacagggttggaggaggtgttggttgcgtaccttttagtcggaagttgaattaggtcggcaacaaaatgaattaccatcttggaagcaaaaggtgatagggatgagcccatgtagcatttgaaccaatcgatcaggtcctaaacctcctcagtatactcgcctcgaaagggcccatcatggactcccttagccactttttaagagcctcggcctcagcatcgccttttgacagctcatccactacgtagttatgtttggcaatgcgaagctggatccattcttcatcaagatggacaggggtcaagagaatggctagtggagcaagaaagtcttcaactccacccgggatcccagagtcagttttaggaccgaaggaggcagagcctttaggattttttgaaggctctggaaaggaaaccacac

SEQ ID NO: 164454 - DNA, 1660 bp, Cannabis sativa
  modified_base (1536)..(1540): a, c, t, g, unknown or other
ggggttacagtggattccttacctttttatgaaaaagtgtagaaagacatcaacagaaacagtatatgttaagactgcaagtgataactataaatggaaaatgaaattacaattttatgatggaaaattttggttagaagaaggttggccagaatttgctaagcattataatctaaaaagaggctacaccctcacgtttagatatgatgggaattctgactttaatgttattatattcgatataaatacaatagaaataaattatccttctgttcctgacactaaagaattcttaacccctaagaaagaagttataaatggtgatgaggtttcatcttccaacaacaaaatgaagaaggcatttgcattgccatgtcctatgcctataagacaagccaaatttaatggtgaaatagaattcgtaacacctaagaaggaaagcatggatgccactgattttgtcaaaatttttgatgagtttccacaacctagaatgcaaagtagtgaatttcaattagttaatgttccacaatatgatccgaatccaataatgacaggtatgaaaactttctttctaatcttgatcttggatatgtcaatttttatgttatacactttgtcaattttgtctaactcttttctcttgatagaacaacttgatattctacctaaaaataatggtaaaaaaattaaaaaaagatcgaagattccagaacatgttaaacaactaaaagggcatgaaaaaagtttagcacttcaaatggctgatggttttagatccaaacgtccatttatcaaagttgtcatgcaaccttctttcgtgtatgaaaatcgaatggtaagttttactaatttgagatattttcaatttcaattgtatgttttcttttattgtttgattaattgttttttttgttcttaatttttagacactttcaaactcatttgcaaaagaatatataaaaaatacttcatgtgatgtgatactcaaagttttggaggggaggagttggtatatgcatttcaaatatgaaaagaatggtaaaatgagtggaaaagcaatgttaagaagtggatggaataaatttgcaaaggagaataacttgaaagtaggtgatgtttgtgtgtttgttcttcttgagggtgaaaatgacaaaattgtatttgaagttgtaatacttcgtctcaatggagattccaaaatccccatttcttacttatgaacacaattagcatagcatttagatttttaaaatgtttacttatatttgtatttaataataatttaattgagatgataattttagtgaaaatatttgaatttgtttgacatttgtattgataaattttagctaaataatatagatattttttataatgcactcctctaaaaggattttattgttgcattctcctgaaatagatggagaatgtattggtggacttcttttagggatgcattgtagaagtatccaataatatttattcttggttttattaattttataatattattatatatttaaaaataaaaannnnntagatattttatataagaaaatttaaatttaaaatactatttttaattttattggtttaactttgaattaaaataaaaaaaattatgtagatattttatatgaaaaaatttaaatttaaa

SEQ ID NO: 164455 - DNA, 1394 bp, Cannabis sativa
  modified_base (796)..(798): a, c, t, g, unknown or other
tttttttttttttttttaaatgcttattttctttcaaaactaccaaattatatatatactgtatttttacaaaaaaaaaaaattaattacaacagaaaaagactcatcaaaccgaagagctcgacgaacactaggggtgaaagcccaaattggttctccaatttattatttatgcatggttctattgtgacattattattattattattatttaattattaataattaaaaaaattatttataatcataaaggcaaacaagtgtaaaaataagggaacaaattatagaaataatggccgtgagatacatgccctaagctaagctaagctaaaaaatattaataatttaaataaggtacaatatgaaaaaacaaatgagggtaatgtgacatgtatgcttgataggtaagattaataaccacatgctcaaattattttatttttaataatcactgtttaaattttatttgagaattaatggaccacattgttgtctttgatgatgataattattaagcacccaataaaataatgaaatcaaacaaagtattcaatttcacataaagttcttaaagtcaaagcatcaaattaaatcaaacaaagaattgcacacaaagtatatatttatatttatttgagttaatattaatttttattagttttaataaagtatgagttgattgaataattttttgatgtgttagaggatctctaatggaagtgtaaataagtggtgaacaactaaaatatagttcatttaataaaaagtgtgtttcaatggtgtgccaaaaagtgannnaaatttggcacatagcaaattttatgttaaatttggcacaacatttgctatgatgtaaaatttatataacaatatatgcactacttttttatttacatttatgtcacttctattattttattagtatgtttaacaaacacattaaattataaaagatttatattattttttttattgtcttacatattaaaataataataaaattaattataaagttattagattttattttttttaataaaacattaattagatattaaattttatatcaaaattttacaattatgcattggagcacaaaactaaaatttggtgtaaatttaccacaaaactattttttgtactaaatatagcacaattttgacatctcccattggagatattaactcatattattagtgatcaatggctaatgggcttagcatctatgtacgtaaagtctatttgaagcataagtgtgagtttttctagttaactgaagtctttgatgagcagactcagttcaactagagttatgtagttaagttttctcttaattctataaatacattcggtctcattactattgtataccttttgataattagataaataaa

SEQ ID NO: 164456 - DNA, 532 bp, Cannabis sativa
tcccgtgatagggtaaccaactctcaccctgacctggtaaataaacagagcaaaatatcaagtctctccaattgccatggaaatcttaataagaaggtatattatcatgataactgataatgtaaattttatgttttctttttggttctatgggaacacagcaatttactcacctcaacatcatcttgaactctctttagagccttgccaaatattttatacctataaaaaaaacatgttttcgaatcaatgttaaactaaatgcaaaactgctacagcaacagccaggtagcccactatgacacttactctttgggttcgaatatgagctccttgaaaacggcatatgctgcagctgcagcaacaccaagtcccgcaataatgagaagactgtaggaagcaccttctgtaaatgataatggcttctcgggaatattatatgttggagaatcaaaaggatcctcaacggtagatatgtcctttttagtctgtcaaaggacatgtagaacaaagttatgaagatactttaagg

SEQ ID NO: 164457 - DNA, 1227 bp, Cannabis sativa
  modified_base (1139)..(1140): a, c, t, g, unknown or other
cgtagttgaagcatatgattttctaggtgttagtattatcgaacttgattgtgtggtattgatacaagttgttagaattttaaatgtttggacatccacttttggtgtgtcgttgaggattgtaaacactatctttttttagtgatgtctctttacgttttgtcaaacgatctactaattgagttgctcactttatagttaaagcatcttgtttatatttgatcgtattttttggactccaatttttttttttttttatgttgctgatattattaagactgagttggtctaatttaatgaaatttacagtaaaaaaaaaatctattactatattttttcatatgatattttgtaatatttataaataataataaaaatgtttatttggtccacccgcaattggaaggaaatagttaacttttatttttttttatttatttattttttttatttgaaggagtaattaaatttaagaacaataattattagagtaatttgtggtgtaaatatttaagtttgattttagattataaattaatatctaaatttattttttaactgtaatttctgagtgttatatatttaaattaatttttatataaaaagtaaaaaatttaatgacatagatcaattaacaattcttccatagttattgaattgacatttaattagaagttaaatatatatttatgtcctaaattattgtaataataataataataaataaaaaagaataagaataattaaattgagttcgtagttgattggggccaaatcagaaatttcaatggcagagcagaaaaatacattgaaaacaccaattctctttgattttatctccaaaaacatttctatatatgtcacatcaaattcattgctatcccttaataataataataataaagtatgaaataattattattcttatttttggcaacctatttatggattttattgacaacaaaacaatcataattcattcactcacgttttctctttttctgtttctatatatattttgggtgcatcaatttttattttatataaattttatatctttaattatattaagtttttttttttctaattcatatgcttaaaaaatatatctattgaacaaaaataaattatattttaannattatgacaaaaaaattatatgaaattttctttaaaaaaaataaaaatatatatatacatgagtgagttagaaaaaattataaaaat

SEQ ID NO: 164458 - DNA, 1414 bp, Cannabis sativa
agaaggaagctggaatccttcatgactctcaagcccctaaggattgggggtaaatattatccatgtttctagattaatgacacgtgtacttccaagacctaaaattaaccaagacgtgcccttttcataggtttaattaagttaatggattaactaacaacaaagtcgggttactgctgtagctttggatgcggacacaagtccaaattataggcatgttaaagtcagaccattttggtcttggaaggaccatctgtctagaagatgaaaggtccatctaagtgaatatagattccttcatcagataatccagaatgggcaaatgaagagataattggaaacctctaaaaaccatcctacgcgacatcttccagacatagggtcccaccatgtcagaggtttgtcccctacataagacctaaggtgtgcgtgcaccatcaaaaaaagcatgtctttttgtccaacgccatattctctgacattattgtacacttttagctatgcacgaaacctatcaccatcaaaagggtccccactcgtacgatgaccattatctcgtaaaataactcttacctaaccgacccaaagttaatatcaattgtattttgctccattagtgggtttagttaacatatttcaattttacccataaaccagactcaagcctataaatataacattaccccctcatgtaaagggttcgaaaattatttcacaacttaagggctaaagattagagttcttgaagtttggcaagaacattctcgtgtaaaaatactctctagcttttcaagcttaataatattgactcgtggactggatcattaacgccccaactacgtaaaagtttttgttgcattatctttaatttattcttctttaaccttaatctatttcttaatcggcttctaaagatctcggtaaacaacatcaaactttgaatatttctaacaagtaccctaaaatagctaaaaatgtaaaacaaacaatttattcttttatcttgtttaattaattacttttgtttatataaacaatatttatgtatatattcaaaaatataatatttaaataagaagtttttacatatttaatcaaaaaattgaagaaaaaaatacaaaaatacgttaatacagataaatttttatttttatggtttaacatttttctttataaaaatacggattttagtaaactgttcgatattcttttttagttgttttatagtttatttatagttgtcacgatgttggttttctcgttgttttggttgttttatagtttttgtaaggttgtttttttgttgtttttgagaaaatcgtattgttgtaattttaaaactttaaaatcatatttttgtaaataaaaatttgggaaattacctcatatactatattttaacttcttttttttt

SEQ ID NO: 164459 - DNA, 1301 bp, Cannabis sativa
  modified_base (1203)..(1208): a, c, t, g, unknown or other
tttgagtaaaatgaaaagagagggaaatgagcctctcaattttgaactttggggtttttataggtgtcataatatctcgttgagatcacaacacatgacatctgaaggttaagagtcgcctcatcaaacaactcacaaagagcaaaattaagcgtcccttcaaaaggcacaaaccctgaaggattttgatgatgtggcaccactgaactataaaaccataattaccaactgccattaaagaaaatcttaataaacatcactcgcagtgtgacaaattgattatctctcgggatagtttcttcatatgacaaaattatcatcgtgaaaactaagagcatgtattataggatgaatttttcacgtaaaataacgagtacaatctcgtatttgatcaataagtggagcccattccccaatagaaaaaagataacgtgtcaagaaagtaattgcgactgggtatcctcgcatgatagaaattaacgtgcgaccgagacaaggtctagtcgcacactatgcctcgcatagtaaaagaggaaaaaattgagacatagagagaggttgtatattttcctctgacaacacattattgtaatatcgctattagtgtaattgattctacatgttttactttaataataattataaaccaatataaaattatttatatgatattatctcatagtggtgcttgcaccataatggctaataagaccatcttcaacgcaatatgtaatagtttattgaaatatcaatactgtaaattactttgaatttttcaaaaaatttatgaatgatattggaacaaatattgctgtaaaaaattattctaacttttagtttaagatataaaaattaagtaaaagattataatagataatattaactaatactgaatatagaccactcaaaaagcccatttggcttggcttgacactcaacattcgaacattgtggaaacaagctgctcaattgagtcaattcagtttccatagatatcactgtcagatagtgtctcacctcacacgctaggaatataataatgtgatcattaacattaatgaaaatcatcaactaaaattgatgggctcacctttccatttgacaaaaaagaagataataattaaaaagggaaatgatttgaaatatattgattttttttttaaaatttagcaaaataattaaagggaaaaaaacagaaaaatnnnnnnaaggaaaaaaaaaattacaaaaatactataagtcggccaattaaacatttatacagtccacatataaatatttacaaaaataccacatgcact

SEQ ID NO: 164460 - DNA, 1766 bp, Cannabis sativa
  modified_base (1599)..(1608): a, c, t, g, unknown or other
  modified_base (1709)..(1728): a, c, t, g, unknown or other
aaaaaataataaatatttaaaaactaattaggatttaatgtaatattaatagtaatggtaatgataatagtaatagtaatgtaatagaataagaatagcattaggaattgattacgatgtttgatttgttgttgcaatgaaaattagaataagtgataaattgacaaaattatctcctactttattttttaaatttatataaagagatggtattatagtcattttaattttattttatttagtcatttgtgatgtaatcctaattacgtaactttttgaatgtaatggagattctcatcactatatcactttttaaagcaaactaaatattgtaagggtaatcttgattctattacgatcaccattacaataaactaaatatgattgtgtcctccaaatttttcaaacaatcaataattcttttttaacgtgaattgtttaattcaaatacttgtttccaatattactaataaacatctgatgtggatgaaaatttaaagaatataattttgctacatattaaaatttaagagtataatttaatacatataaaaattaggagtgaacgatttgatacataatatccttgtatattttttttttatttaaacattatttatatatatatcctccaatatttacattatgcttatttttgttgaagtgtttacatatattattttagatgtttgaataaaacatttgttataaatatattaattagaaaacccatataactactaaattataaaggtaacttatacaatgttatctacatttaaataataaattaacttaatagaatttccatttacttaaaaagaatagcaaaattaacttgtataataataataactagggtttttttcctattaaaatgtgagaactattctatgatcataagttagaatcttcttctccaagtttatgtataggaaagtaaaaatgaaatagtaatatatataccacctacctacctagctagttaattaggtaatattattatactacttaggctatgggtatgggtttcaattggtggtcaaattacgaaactacccccatacttgtacgtaaacattaataatatgcatgtatgtcggtgaacatagggcagagtcaaaattacatgggaattaaaagttagcatttaaattagtaatatttatataaaaaaaggaatataattagtgggttaattttgtttttgtttatattaattaattaaaaaaattaagaaagagagagatggagagggaaacatgggagtagccgaggaaagagtgtcgcctcctataatcttacttttttttttttttttttcaaatattgctttaatttagaataaatatatgatttttgcctctcaattattacttttgtagttttatccttgtactttttttcagttgcaaaaatcctttcaaatcatacatatcgttacaaatatttttctttaattatatatatatatatatatttgtaggctaattaaaatttttatttcttaaattttaacatgtattaaattatgctccctgaatttttctgacagttaaaaatttttgttggagtactgagattgttagatttaaggannnnnnnnnnatttcattcaattttactatttaagtgattgtttatgtactaaatcatagtcctcaactttgatatctaccaaatcatgtcattcgaactttgacatgtannnnnnnnnnnnnnnnnnnntttcatccatgttagatttttttactaaaattggacaa

SEQ ID NO: 164461 - DNA, 1132 bp, Cannabis sativa
  modified_base (633)..(657): a, c, t, g, unknown or other
  modified_base (740)..(747): a, c, t, g, unknown or other
  modified_base (833)..(834): a, c, t, g, unknown or other
  modified_base (1014)..(1016): a, c, t, g, unknown or other
ataatatagtaatttttattgtttataataatatgtttgctaaatttgaagttttatttgatggtggagaaagattattactttatttgattcagcgttttagtttagagcatgagcattgttcaatctcatatattagcaaattaagcttgacactaaccaaataacttgtatgtatgagatccaaattgaagtgtagttactgaactttgatatgtaatagttcttgtctcccaagagcattaactatagtgtagcttaaaatattgctaatcaaaaagtaggattaattaaaattaaaaaaaaaaatattagttttagtaaattgacaagatttgttacctcatgtaaacactgtatttgtcttatttttttaatccatttatttattttaattggttggagtagtttataaattaattttaaaaaataatagagtttcaagtagagttgtgcaaaaatgatctaatctaataataaaccgacatccaataaactcgaccgaccgatccaatccaataaccatctattaacattcaacattaaaattaaaaaatatattatatttgcaccccataaaattataaatacaccctattattgaaaataaaatataaacttaaataatttttnnnnnnnnnnnnnnnnnnnnnnnnnaaattttttcatcacattattttatgttaatttcaatgcttattttgatttcatttttataatttttctaactcatgtatatnnnnnnnntttatttttttttaaaaaaatttcatataatttttttgtcataatttataaactataatttaattttatttgataggtatattttnnaagaatataaattgaaagaaaaaagttaaaaataattaaagatataaattttagggaaattctataatgcacccccttaaaatggatatattgatgcacccttatctgttttagcacccgaaagaattttttagtcaaattttttttcatggtcatacacgttatagttatttaagacannntgcaaaattttaagaaatttggaaaagtttaacatgtcgaaaaataagttcaaacagtgtattgtacatgtgactattttattttatacgcgtgtaaaatagaccgtttgaacatt

SEQ ID NO: 164462 - DNA, 858 bp, Cannabis sativa
tgtccaaagttgtttctacaggtttgacaagaattttccaagtccctctccctcaagtgccggaagcaccactgctatctctaaccctgcagcaccacaagctaatgttctcaccactacaagtgaatggaacatgacttggtatccagattcaggggctaccaatcactgcaccccagatcctgcaaaccttactcaaagctcagactacaatggacaagagcaactgtttgttggtgatggctcaggtttgtctattaaacacatagataaaacttttctttcttcaaatttgtctactcagccccttgttcttaataatttgttgcatgttcctgttataactaagaatttgctaagtgtatccaagtttgctaaagataactaggttttctttgagtttcatccttatacatgttgtgcaaaggaccaggataccaagaaaattctactgcaagagagacacaagaatggcctctatacttttgaaggtctcaacatacttccaacatcctccgtcactgctaaacctgaacacatggcaacacaggacacaatatactctccttctattcatattgcttctttagaatcttgtacacactgcaataatactaaaaaattctctaaatttgatgtgtggcacaacaaactggggcatccctctaaaagcattgtgcattctgtactaagaacttgtaatctttctgttgataataaaagttcacattttgtttgtactgcttgttgtttaggcaagatacacaattcgccatttcccaaagttagtacccttattttgttggaaattattttaccaagatctatttactatcatgtatgttggattaacaacct

SEQ ID NO: 164463 - DNA, 2195 bp, Cannabis sativa
  modified_base (231)..(235): a, c, t, g, unknown or other
  modified_base (430)..(438): a, c, t, g, unknown or other
gtgaggtattgtataaatccccttgataattttcttatatagatatatatatatatatatatataaatcattaatcataataaaattgaccttaaagttttatcgaactgattagctatctacatgatctctcatatatcctgctatgaacacaattaataatatcccaaaaattaaattcaattaataatagttagggattattttacaaatacataaaaataataaaannnnntacaaaaatacggttgtacagaatttaaatatatttacgatttttatgaatttttgttatttatatgttattttttgttgttattttgatattgcttgaatgttatttttttgttacttttatatagttttcttgttgtttctattattaatcgtaaaaatgtaaaaataataaaaaaaaaaatctttaaacgtnnnnnnnnnaaaaatttacaaaaaaaaatagtgttttatatgtaattattatccctaatagtttcatataggggtgtgtataaatcgatctaattcaataaaattcgactgatcaaattgcaactgacagtcaaatattagatatccaattgtgatcgaatcgaattagatgttgtttttaaatatctaattgcattgaattgaatagtagatgaagtgtctaaaaatctaatacattaaacatccaatcgaactaattatagtattttcatttagcttggatgagtaattagattttatattattatacgtaaattaaatctatatgtatatataaaaattagcattaaaattttactttttttcttggattggatatagatcagtccaatccaatacatactggacttaaaatattggattgatctaattcgattcaaaaaatagtaggtctaaaatattggataaatctaaattaaaccaataaatataaataaaatacatccaatgataaaatcgatccaatttaatatctaatgaatattagatcgattaaatgattgaaattaattagatcggatcgaatagtaaaatttaatatctaatatataattagatcgaatatgaatatgcctaaagatattggatgtatgatcaaacactccttacatatactttgattttattcttccttacatatataaatgaaatattcgatcgaattttatattttttgattttgggatcaattaataatatatatatagttaatagtataaatgtttaattattttatgatttataatagaaaaaggaaatatatgtttgtttccaaccgaacaacattagtaatatgtaataccatatcatatatgacatggagtcgtacgtacttgtctccgccatgcacataactttctcttcttattaattaattccctgattaataacattaaattaatttcttcattaagtgagcattttcattacgtatctgtatatacaacttaacaccaccaccatatacatatataatcataggagttataatttatcaaattgaaataataatatatgtgattttggatatataactaaattacacgacttaatgcatgaggggcaattttgtaaaaagataaaccttattcaaagagcccatatggcagaccattaaacattgtgttacttggttaaataaattaatttgtagtaacagtttatgtacgtacgtagctagggccatgtatatatctctgaatctttatataataatatgcatgaggatgagtccctctcatgcacccacccacacacgacacctctgatatatatatatttcaattttcaatggtagtgaaatagtgagtaatagacagagagagacccagtagtgacagtagtacgactggtagtactatatatatcatgtcttgttgcagataatatataattaatctatggtttgtgatttcaccacaaagacacacatattttggttgtttcttctatataatatatactatacagtatttactctgttcaacgcgtttaacaaaattatatgtattatttcctttttttcaaactatttatttttatttttttaaaataatattaaaaaacataactttttcatgtcgatctttttccaacaacttatatataaatgtacattttgtttttcttttctaacgcgtatttatattcttatatatgtgcttcggactcggagaaatatattcgctgcatatatatatatatat

SEQ ID NO: 164464 - DNA, 1324 bp, Cannabis sativa
gttatttctacacttcacttggttggttggttaaaagttatgtataacttttgcttatttgtttcttacagatttcagcatcatgcgatttggccgcagaagttaaggtaccaaaattaactgctgagagctcgtgggatattgagatgtgagaaactttctaattcataagcttgtcgcttgttttcctttgaacaacttcaattgaatgctcggacatcactatgccattaattggtgtatttctatttatggggcatctccgtgccatcgttgattaaataacaacttatctttcaaaacttcatttgccaatttaagataacttgttcctactttatgcatttctttttcaaattagagaaatgtcaagggaaattcactaatttaggcatattacttggtcctttctttggtggttgaaatgtatctatgcctgcataacattttctttctgttctgtttggtatgggtgatataacttcgacccacctcaaagggtgatctcttatctgttaattccactcttatgctaattgttgttgttgattgttcattattttgagttgaaactcggatttgttttgacttgtattttggctgccattttgagttcccctaaaagacgccgccattgagggaatcacttaatattctttttttttttgtcaagacttaatattcgttttttgttttcatattattttactagtttaggatgctttattttaccttcttttctcttgctattgtgtttctctacctacctaaattactattcattcttcattcttcaaatgttatatccctccttttcttattagtttatatttgaacaaataaaaaagttattatgtgttgtaatgtaaaagttatattgtaattactagattatgtagtataattacataatatcttaacttgggcgctgggctcaatgctaggtgtcaacctggtcccttttatggcccttcgaaagttctgtttggtttttggaaatagttcaatcttaatcttttctgaaaacggagaacatgcttggaagagttctcggaaaacatcattgataaaatgtcaacctgagcgttaggtcagccccaagtgtcaacctgagcgttgagtcttgcttctggcacccaggaagtgttgtttttacttcgaaagtacctatttcctcattttttatgaagatgatgcaaaagttggatcatcgatctaatacttcaaagtcgcccaaattgagaacctgggcgctaagtgcccaggcactgggtgctcaaaaatgaattttctctgaatttgattctgatgtctcaaatatgtt

SEQ ID NO: 164465 - DNA, 1149 bp, Cannabis sativa
ctgctgaaaaattgcatgcaatgccaaaagcagttgaccattatgctgtcaggcaacatattacaccaatagttcaatagatgacgagtccaggggtaagctgatccgcgatcacaagctgctttctccaaaacacttcccagaaaaaagacatcttgtttgatgcactttaaggcttctgcaacgatgatgatagctgcagggatacctgaacaattgtctacaatagcttgagatagttgttcaaaacctggtttagaaatgacatcaccaactcttccctctaataaaatcaaagattatttcccatctagaggctttatttggtactcccttgtctttccattatgatatttcaacatcgtaccagttataagaaccttatacatttgctcacatgcagagagcagggtgttaaatactgatataatgtcttctacatcctgtttaggaggaacatcatccagaattactagaaaaaatttcttctcttcacgagcatccttaacctttttagttagtctctgtttcaaaagttttagcttctcttgcttcccttcctcagcatcttcctcccagtcctcgtcattaggggaaggagatagtgcctggcaaattttgtcatataaaatttgctcattgtactttctatttagagatacccataaagagtcgtagatgatgtgtcttttcttgactatctctcttgccatcatcgtttttcccactccttgtttcccattaagaatgattgttgttacattgccatcctccagcagttctcgtatttcctttgttgggattaaactcacttaacctctcaagtcagtatgcccatctatttgcctatttgatgaatctgaagaaagctgctgcaatttttgacagttggctttaatcccaacttaaaggggacccaccagcaactatatataggggttcctctattctaaaagagagggttgagggagagagttctgatctctaatctccaatgctcatactttaaattcagtttagagagagagagtccaaaatcatagtgagtgtgtgtggagggatgtaattacttactgtgaggcatttttttataattacttactgtgttgagttgtaatcttgggctcaatctattgtgtactactgact

SEQ ID NO: 164466 - DNA, 1554 bp, Cannabis sativa
aatcagcagtttgcttctactttttgtcatccttaatagtattacagacaacacgtttatcagtcgtcagaacataagcaaccttttttatagcgaggaaaaataatattttttgtctccatcttttaaaatagtttccctcaaaacgaaaaaagtttattaatatcaacaacatttgagttctcttcggtagtcctggcagaaacacaacttcttaaaaatgtagaaaatagttgttgcacaaaataaaaagaaaatggatgtctttctcctattagttatgatgcattatataggaacaaacataatgaagtaacgtgaagaaagtcattttttctgatcgtggggatcatgtgaacgttgctgaatatattgatgagaaatcatctctgattattaactaattaaacacatagaagaactattttaattaatcaaataaaaataataatttatgtgaaagttcagctcgggttggtcaaacagacggcagcggcgcgcgtgtggtggtcctatgtgtgaattctcaccagtgtcatatttcttttaaagtgcatcttagatttctttggaagttttgtcaaagctgtagtagtcatacaaatcatcagataaactattcaggataaaacttttgcacaaaaaatcattcccaacccagcttgctaaatcagcagtttgcttctgcttttcgtcatccttaacaatattacaaacaacaggtttatcagtcgtgtaaacataagtaaccttttcatagtgaggaaaaataacattttctgtctccatcttttaaaatagtttccctcaaaatgaaaaagtttattaatatcaacaacaccagagttctcttcggtagtcctggcaaaaacacaacttcttaaaaatgtaaacaatagttgctgcagaaaataaaaagaacaagtttattgaattaaagtctaggttgagtcataaatgaggtcgctctctttaagacgttcacggcactactcagaactgtgcaagcagattatcagcctcgtcgtccctagaataaaataacctagtcgaaacactatatctgatctctattgcatgatagagaactgtcaaaataccacacacaataattttactactgctcaaatatatttgtaatataatcgtataaaagtgtatataattttatctgagagaaaaggaatgtctttctcccattgaatctgatgcattatctaggaacgcaagagtgaagtaatgagaagaaagttgtttttttatagatcgtgaagatcatgtgaacgttgctgaaaatacagatgagaaatcatctctctttactaattaattaaacatgtttaaaaattattttaattaattaaataaaaataatattttatgtgaacgttcagcttgggttggttagatggactacgacagcgcgcgtgcagtggtctaatgtgtgagtcctcatccatgcacacaaaagtgggtaccctattggccccaatccatatatcaaagttgcacattatatacacttctaataaattgttcctattacattgtggg

SEQ ID NO: 164467 - DNA, 1536 bp, Cannabis sativa
atatataattatataccagaatattcagaccaagtaattaagatcttaatggaatccaaatccactagactaactaatattactggaatataatcactctatatctaattaattatgccactattccatgaacaggccaccaaagaaaataatggcacaaaattaatacttctttcaacttgatcaaaaaatttatgtaatgtcaattttgtacagctcacacttaatttattttcatcctatcacattaattattattacctacgtttaattaattaactcttattatactgattttcagttcatgatataaattatatatatagtgcatgcatgaaatctagagagctaaccctgttaatcccagaaggaagagtctcagaaagaggtttaagttgaatactcctggctcttcatcatttctgcacaaaatttatatataaacaaacaataatatatatatatatatatatatgaacacaaatatataagagagagagagagagagaaagaaagataataaaaagtatacctgtcgtttcgatggtaaaagaaagaaaatggtatgagaaaaatagaagaaagagcatgtgtgtaaaccacaaaaacaaatggactcattccattagtgatgacagtcttagcccaaatggttaagataatagtgcaagcctccattgttaccattgctccaaatggtacacattccaatattttttgaaaaataccacccttaatattctccaacaccaccatctttaattaataataataatagttttaaatttattatataatcagttcaaattataataagtgcagtttctgatgatctagattataaatctctctctctctctctctctctctatggatttattttgtgtgtgtgtgtgtgttgttaaagtttatgtgtcactttcccttttatataattatgagaaaaagaaggaagagaaatgataaaaggaacgtgaagctacgaaacgttggtttaaaagggcaacccttcgttagatggggaagctatttttcaaatttgagtggatgtggctacttggatttattcaacctctataaattaaaacattaaaaacaattatatatatattactatgcacaaccctatatagctatgacgttttcatttttaataattattaatcatttttctttttttttttaattctatgctatatatgttattaggtgaagagaatttgttattagctatttggtccaacaccataataaggtggctttaacgtccccctttaaatttttttaaatttttattggggtttttccagagaatcatgactcttatacaaggatacgtcattttttggcttcttcattgagcgacaactgatcttacaaaccaacacgtgagtgttaacaaaaaacaaaatggatataggtagctagtaccgatcaatttatttaagccctcttaaactgtgtaatcccatacctacacagtctcaaaattatcacaattaacggtacttttccttacggatcacaagactactg

SEQ ID NO: 164468 - DNA, 3326 bp, Cannabis sativa
taagtatacagttttcatttgcaatttaattcaaatccactgttcaataaggtttattaacaatttcatcctaaaactatttttgcatagaagttttatttatcttcatttcttattcatgtattagtgaacttctttatttgtagtagttatcatgtagtttgtttattgttgagaaagaggaattgaatattgaaacaggaaagaatgaaattcagttagaacaaacaaggaagaggcaagtcttttatagcttggacctcagtacatatcagacctaagaaaataggacttaacttttaacagataaaacagaataaaccgactcctatcctgacatttgtaacaacaactaactgaattaacagaataaacataaaatgactaaagacccataaacaccaataaacactgaagatggagagtgtatgtcgtatactgacatcttggagatatgtgaagtgagaattggtgacgacaggggtttggtgaatgcatcagctagttgaagtgtagtggaaatggggatgagtctgatggagcagttggtgatcttatctccgatgaaatggcaatccagctcaatgtgtttcgttcgttcgtggaaggttggattgtttgcaatgtgtatagcagagttgttgtcacagtagatgaatgcagggtgtggttgaggtatgtggaagtcatttaagaggtactgcagccaagtgacttcacttgtggtggcagccaatgctcgatattcagctttagttgaacttttcaagatagttggttgtttcttcgtgcgccaagagatgaggcaatctcctaggaatatgtagaacccggttgttgatcgtcttgttatggggcaagatgcccaatctaagtcggagaatccacggagatgcagcgaagaactcctggaatagaggagcccttgtccagggttccctttgatgtatctgaggaggtgatgaacgacttgtagatgagtagtacgaggatttgccatgaattggctgagtgtgtttacgacatatgtaatatctggtctagacaaggtgaggtagagaagcgttccaacaagttgtctataatgagatgtgttgtccaaagtttctccttcttcgttgttaagcttttgtttagggtccatgggtgtcttgctgggcttgttgcctatgaaactagaatcttcaagtaattggagagtgtatttttttggcatataaattacccttcctttgcagggaaatctcaaaaccgaggaaatacttgaggtctccaagagctttgaatttgaatttttgatgtagtgatgtctggagctggtgtagattggtaacattaggacctgtaatgataatatcgtcaacgtacacaagaagagctatgaaattatcatcggatcctttagtgaacaaggtgtaatcagcttgagatttcttgaatccttcttggagaagagcatcggacaatttcttgtactattgtctggaggattgttttagtctatagatagatttgtgtaatttgcacacgagattttttcctgcattaagagaagaaggcagggcaagaccttgtggaagagacatgtaaacttcttcgttaagatctccatttagaaaggcgttattaacatcgagctgtaaaatgtgcccgttcttaatggtagatatagcaagaagtaatttcagtgtaaccatcttggcaaccggggaaaaagtatcaaagaaatctagcccttcttgttgcgtgtaaccttgtgcagcaagacgagcctttagtcattctatgctgccatcactattgtatttaattttgtaaatccatcaatatcctatagctcttttgttggttggaagaggaacgatggaccaggttttgttatctaaaagggcctttaatttgcattgcatggctttcaaccaagctaaggtttgtatggcttcaaaatacgttcctggttctttgatggaagaaactgcgaaaatgaacgctttgtgagattcagataagttagagtaggaaatgaatttattaatgttatgtggagtggaagaataatcctggatgagtgaatagcactcaaaatccttagatagctcggtggttttgattgtctactcgatcttcttggaggatcctgggttgtctattgtgttggagcttctggtggaacagcaggggtagaatctccctgtgttttattgacattggtacttgtttcatttatctgaatagagggatttggtgcattactaggacctgtaggatactcacagacaggggtgttagttatcatagaatgagggagcacaatatgagtaaaaggatccatgttagcatcctcattattaagtttctgaaatgggaaaatgttttcatgaaacactacattttgagatacaaacatgtgtctattgttgatctcatatagtttatactctttgataccttaagggtatcccatgagaacacaagttcgagctcttggggagaatttgcttctctgatttgacaaagtggatgcaaaaaccaaacacctgaatgagcgaagatgttgataatcaggcaacttatcaaaaaaaaattcgtagggtgttttgttatctaataaaggagtaggaattctatttattagatatgctgctgccaatacacattcattctagaactttatgggaactcttgactgaaaataaagagatcgagcgacattgagtaagtgttgatgcttcctttcagcaatggcattttgctcatgtgtttcgacacaagagaactcatgcacaatgctgtgtttagaaaacagttccttaaacaccagttctggtgcattatcagaacgaaaaaccttaaaaatctacttgaattgagtctgtatgtcaggaattgaggtacaatgaagctaacatcaaacttatgctgcattaaaaaaaaaatccatgtgaatctagaaaaattatcaactaaagtcaagaaatatatgtggttcgtgtgtgacacaatatgatatggtccccaaacatcaccatgaacaatatcaaagatttattagaaacagtattgctatttggaaaaggaagttgtctttgtttagaaattggacaaacataacaaggtgtacttttgtgtaaatcagaaattttacaattcaaagtatctttaagtaaattcaaacgttcattggataaatttccaagacgtgagtggcaaatctcagccgagacagagaagacatgacttggatttggcgtagtatcaagaatgtacagatctttgacagtactacctcttccaatcgtcctctggctgacattgtcctgcattgt

SEQ ID NO: 164469 - DNA, 1387 bp, Cannabis sativa
tttagggcacaaaactcaacaaatacctcattctataatttgaaaaaaagaaaaatagaattatatttttgggaaaaatttagatcttaattcttaattagtaaaaacacattatacataaaaaaaaaataattacataaaatattattttttgttaaaattttacatttttacattcaaatacttattttttaatatttttatggtgttttattaaaacaacaataaaataacataaaaataatattcaaacaatatcaaaacaacaataaaaaaataacaaaaaaaaatcagcaataaattaacaagagtacaacataaaaatacattaaaagactgtattttttgtaaatgaaatcataaattgttatagtgcaccaaaatttggtgatgaaaattggtatatgtaatgcatattaagttgtagatatttttttatattatatctcaattttttttatatgatatcgtatattataattatgtattatgcattatgtttgttttttataaattatattgcgccgaaaatatataagatttaaatagtaacatgtacatgtatttttttttttaattttatttcttaatgtcataaattatttagaattttctaaaaagatattagaactacaatatacatgaatattatatgaactaaagaaataagatatgaaatgaaaaatactcctacagcatagtaaatgtgatgtgtccaacctaaaaatctatctacatatattctaaaaatttagtcaaatttcattttagggagactgctttagagttcagtacaagaacaagagaagtagcaagcaaagtagtaaaagcaatatcagagacattaggactagaagaggattgcatttcaaaggcaatgaattgggatgaaggcttacaactcttggctgccaactactatccagcttgcccagagcccgatcgagccatcggaatcccacctcatacagaccatggccttgtcactcttctaatccaaaatgagattagtggtcttcaagttcaacacaaaggccaatgggtcatgttggaagccataactaatgcctttgttgttaaccttggtgatcaaatgcaggtaattaatgtgctcagatgagactaacattacccaagttactaaaatttcccacaattagacatcttaagatgacttgtaacaatttgatctggttgcacatgaattagctactcttcggatggattaataacttgttctttaggatgtattttgtcatttagcctgtatgatattattcatttatcaatgatttttgtcatgttatataaattaacaattaacccaagatctatttgtatataacatagaacacagatcggaagagcgtcgtgtagggaaagagtg

SEQ ID NO: 164470 - DNA, 790 bp, Cannabis sativa
aaataatactatattaaaagtgatggataaactaatacttaagcaaatccactcatcatattttttttttcggctctttttcatatttcataattggagtaattatttttagtcatttatgttgtaataattatccttgcatttatcaaaggtctcctttaacgtgttttccaataaatgatcaatcaggctcaagtttttctttacaattaaaagtgaatatgatatgaatatctatctcttttactacttttaaaacatcataattgcataatagtctagtaatattctattttagtatttttaacaaaaaaagtctttttcaatttaatatatatatacaatccagttacaatctactaattttaattaattaattttcatatatgggtcaatattattgcttcttgctgtaataagagacaggatagcaaaaagaatcacacaagttatgtgaatattcctgtagagtagtgtagactctagtaaacagaaaagattgttgaataatgccttcacaaactccatcaaaatttacatatatagcaacaacatatatacccctttaaagtttaaataatcatcaatataatattttaaaatatcatatatttaaagaatcaccaaagaatgataatagacaatgagtagaaaaatcacaaatatactctcaaagagattctaaaatcattcactttcatgacatggagtatcaaagattaggggaattttcaaaaatatcattcttttatgtgtttagaatttttaattataaaaatacgtctgtaaa

SEQ ID NO: 164471 - DNA, 1247 bp, Cannabis sativa
acaataatagttgatccttgcgatgccattgtaagaacatgggattgtcattaccattgatgaacttcgaaggaggagcattattactgaagagtaacttatcaagatcatgacttatgacagtaggtatgacttgcgatttccaggaaaggaaatttgtgtgatccagtttcaaattaagagagctgttagagagtttgagacggggttccatggttctactatcgaaaaggactgagctggcacaacagcggtatcagaggctttagcttaagacgagtggtcaccagaggagttcattggcactagtcaagggctctgataccatgaagaaagaaaatagaggaagaaggagaaataacagagtgtgttttggaagagaagaacaactgaaagctcatattctttattgattgattaagtgtttatatacacacaagaattacattctgttataacaacaaactcaagaagctaacagtagctttgactaacactaacaaatcctaaccaactgacacatcggttagttggttatcactaacaatcaaaagcttattcttttttaatggaagatgagatatatcaagattttaagaatacaaggataagagattttagataactcatgtttgtgtaatatgtcaacaatcgcaattggtaattacgagcacattgtgttttgggaatataagcgaacaagaattcctcatttcatcactttgtcccgctttggctctgagaattatatatatatatatcatttgataattacttgaacagtcagtaagttaaccaaccaaacacttcttattatttatgccaataggatatcttgaacatcgacaccattcaacatttccctcatatatataaatctatacattcattctgtatatatttatatatgaatataatgttaaaattttatatctcaaataaaatttatttcaatataatcagatttactaattaataaaagatttgaaattattttatgttgcatgattcacatgattgctttcatgattaaatgtttaatgtataaattctattaaattcaaaaaatatagttattcatgattatagtgttgtcaatacagtagaatataatcatgattatatgtttcaaagttttatgtcctgtgattcatcagtacattggatttacactaatatgataacagcgataaagtttacttacaccttagataagtgttatgtcattttcagggtattggcaaagt

SEQ ID NO: 164472 - DNA, 2787 bp, Cannabis sativa
gggactactgactgtcacagtcaaaacaaaagcttggaaaactttgtcaataaaatctcattcaaggcgatcatatgattttgacatatcaaatttgacccctagaatagcctctcgaccttgcctacgttgcaaatcaagaataatctcttgagccaaaatataattctttgttatccatcatcccttgatagagacaggttgaaaagttttactttcagaagagaaaaatagaggaccagaaatgagaaatgaaaggaaattcattcattcaaggagttcattacagtacatgctttatatacagttcatacacacataacgaacataacaacctctaactaacttcctaaccaactagccaagtacacaacaccttacaacaactaactttaatactccccgttaaggtggagtgtatatgttgcaaattctcattttgtctttgaagatttaaaattgattaggaagtagagccttagtacatatatctgctatttgttctttgcatgaggtatgaactatcttaataactccttgttggaccttttctcttaccaagtggcaatcgatttctatatgcttggtcctttttgcggaatatggaatttgcaacaatttactttgctactttgtaatcataatgcaagatgtctggtcctatgtggtcaatgcttagttcatttaacagagatattaaccacaccaactcacatgtggtatttgacatggctctgtactcagcttcagctgaggaccttgatactgtatgttgtttttttttacttttctaagacaccaaagatcttccaagaaacacacaaaaacctattgtagacctcttggtgtcgagacatgatgcccaattatcatctgtgtatgcctcgaattgaatctttgagcttgctggataaaaaagtccctgtccaggacttcatttgacatattgcagagctctaaatgcagcatccatgtgattcatttgaggagggaccaaaaactggctgagtttgtttattgtataagctagatcaggtctagttattgtgagatattggagtttgccaatgattctcctatacagtttaggatcaacaagtttgtcttctccttcttggcttagttttagatttacttccatgggagtattagcagtcttacatcccaattgtcctaagtcttcaagtaattgaagaccatagtgtctttgggatataaaaataccttcattatttctagcaatctcaataccaagaaaatattttcattctccaaggtctttcagcttgaatttattgttcagagtcacttctaatttcaccatagaagccatgttgttgctagctaatataacaccatccacatagacaaatagaattatgatgcttgattcacttctttggatgaacaaagagtgatcagatgctgaatgctgaaatccctcttcaattagagttgtagagaacttctcaaacaactgtcaagaagtttagaccatatagagacttctttaatttgcatacaacattaggtggcatctcccccttaggactataccctggaggtaaagtcatatacacctcttcatgaaaatctccatggataaaagcattactaacatcaagttggtgtaaaaaccagcctttaatggcagcaaggacaagagtgagcttgacaaaaacaagctttgtgacaggggaaaatgtctcattatagtcaataccctcttgttgattgtaccccttttcaacaagccttgctctaaatctttcaatggaaccatcaacattatacttgattttgtaaacccacttacaccctatggcatggtggccagcaggtaaactaacaacaatctagcttccattagtttctaaggctttaattacagtgtccattgcaacatcccaaactagtatgcctttagcttggtaaaaaaactctcgctcgaaatgactagaaatggctagcacagttgctcgaaactttggtgatagcctgctgtagttaagtatgaaaaaaagagggtgagcagtagaatcattatgtacttgagattgcacattgtaagtaaggtatgatggttttcttgtttgtctagatggtcgagtactagtgacatgttcacgtataccaatgatattaggttcaagaaagtgtggttgaatgaaaggtgttgtactaggatgatgtataggtgactgtaattcaggttgagagcaagaggagtctacaacatgctgttgggaagcatcaacaggaaagaaagaaaaagattagaaggaacagaaccctgcaacacaaagggatcattttgctcatgaaaaataacatccctaaagcagaacaccctatttgtattaagatcaagaagcttataggctttcatccccatgggatagcctaaaatatgcatggagtggctctggggggaaattttgttcgcagtccctaaggtagaggcatatgcaagatatacaaaaggctttaaatgatcatagctgggggctttggctttgagtatttcaaagggtgatttgtgttgaagattaggggtaggagttctgtttataagataagcaacaatacttatgcaatctccccaagcaacatttaacaaatgttgatgcttcctttccacaatagagttctattgtggcctttgcacataggaatgattgtggaaaatgcctaaagaagaaaataatgcaggaaattgaagttctttagcattatcatagctaattcctttaacttgtgcattgtattgagttttgacaagttgca

SEQ ID NO: 164473 - DNA, 1112 bp, Cannabis sativa
gtctgatgtatataaatatatataaatacttggaagaaaaatttacatcattttactttatttagtcatttgtcatctaatcctccttacatagatttttaaatgcaatggagattctcttatataatgtaatcatcattatattgtaactccattacatcactttttaaaacaaaccaaatattgtaatggtaaattctcatttcattacgattactattaaaataaaccaaatattatatattatgaccttagagactaatttgctttaaaacaaagttcatggaggaacttgctcaaatttatatatttttaggaaccaattcaaaaaaaaaaaaaacaacttaccaaaatcaatatagtttagggtgcacaaatacaaataagtcatttatgtttatcaaagtataaacaaaaagaccagaaccaacttgacaaagttacataaaatgttagttaccccaacaataaagatcatctatggagtacctaccaaccattgctttgaatagtatcccaacaaatcaatagtaaaaccctctcctataacaccattttaatgtctccaaaaagactagtcctcaggtgagatgaaagaagcggccgccttaggtctcctaccgcgcaagaccttattttgaaaaaaaaaaaattaaattatagttactaataaaataaataataatactcataatattaaatatgtgttgtagtttatggtaatttaattagtttaacaactttacttttttactggactctaatttttatttttacctaaggcctaaattagtataggaccgaccctactccgaacaagctaagaattccgctatcaaacaaattttttaggaataacaacgaatcatcagtcccttattttctctaatcactgcacaggccctagcagcccctgactagtgcatatagcgacatcaacattcattttgaacttgttcaattctgagagtctctaaatagtccctgctctctggatgcatccaggactggccctaagcatagacgggctaggcccgcgtctagggcctactcattttaggagtccaaataaaaaaaaagtactttttaccttcctcactgttcaagttccc

SEQ ID NO: 164474 - DNA, 3109 bp, Cannabis sativa
ctctctctctctctctctcggtccctctcgaattcgacccgtgctcatcgaaaccaccacgaattcgacctgttctcgtcgaaaccaccacgaaccgtcgccaccaccactacccgtgctcgtcgaaaccgaacagaggccatcgccaccacaaccacgaactatcaccaccaccaccaagctcagtcaaaggtaaggttttttttgaaaaaaaaaataaatttttcatagatttggatgccaattattgcatgttgttgagattagtagaatttttgtagattttgtgctctttctggtgataggttgtagatgttggatatatttcaatggtgtctgtattttttacagtgtcatccatgaaatatcgataggatatcaacggtagatcaaaatggggtatttgattgtttgaacatatttttgtttttattttttgactgtatcttgataggttatcgacatattatatatggtttgtcgacatattcgagtaggattatttttaaactatttatcgataggatgttgacaaaatatcgatagtatgtcgacaaaatatcgatagtatgtcgatattatagcaaaaaaattaaactgggttatatagtatttttatatcgatatgatatcgatggtatgtcgatatgatgtcaaaaaatatgataatgatctatttttattctttccttgaatttcgatgtaatattgacatattgtcgatattttgtcaataggtttttgatggtttttcgatgacatttctgattttttttcccttttacagatggctctgaagcttatagttccattccctgagcatttaacaggtcgtgtgacctacagaggaagtgatgtttttagcaagttgatcaaagtagaatttgagaagcacagtttgactgatagggcaaaggcaagccctttcggtcaattttggtaggctggtgctttatcatttttgtcagtactattccaccaactgatgctggataaaatgattgtgaatgctgagaaggatgacgaaatgtggttttacattacacgaaacgagatgaaatttggtgtggtcgagttcgagctgattacaggcttcaacttcacaaagaggccagcagacgatgagaaagaagccatgtcaaggtctaaccggttgataaatctctatttcaaccagtcagataatgtgaagatagaactactttagaataagttcctagcctgagaggtcctgaaagacgcgtacaagctacgattgtgtttgtttgtggagactatcttactaaacagagagggaaatgcatgtattacaactgacatactaaaattggttgaagatcttaattttttcttcaagattctatgggggaactactcatttgccaaacagatgcacaccctccaaaaagacatattgaaacagaaggcaaattatgagaagaagctgaagatggatgttcagcacgaatgcaaatacactgcttacggctttgcacttgcattacagtattgggcctatgaggccattatagaggtggggagcaagtatggttcatctcaagggattcattttccaaggatgataagctggattagcagggctgacattaaaaaagtaggaaatcagtacattattttcaaaactggcatgatcatttaatttttttgaactggtatgtttgtttttctaaatatttttgtttgtcgatatgatattgacataatttcgatgcttttttgatgatgtgctttagtgtttaatatttttaatattgcgagtttgtcgatagtttatcgacatgttgtcgataactgcttaaattattgctgattattttgttgttaaattgttttatgtttcattttatcatttttgatatgatgtcgataggtttttgatgcattatcgattattgttctatgtttaagtaatgttagtttgtcgatacattttcgacaatttgtcgatacttatcgacaatttgtcataaatccttacacttgataattattttatatttgtcgacatgatatcgataggatgtagatatgttatcaataattttagtgtgtttgtttctgttcttgataagatatgatgtcgatggtttgttgataatttctgatgatttgaaaaaaaatcgactttttaattaatattaacacttattttgcatttgttttgttatatagacattcgtagtgatgaaggggctacatcctcgctggatgaagaggcatatgccgagaccatcacctgcaatggtgctgagatcctggttgagatggatgttgatgagacacaggttgaagacaacacccaagactcttaatttttcgctagccaagctaagagagcctcagaacattttcaatctgctgctattctggagattgaacctgctgctattcttgagactcaacctgctaataaaattgatgtggttgacatgttgaataggatagaggaagatgtgaagggtctttacgcttctgagacagagttgaatgatgcatatatgcgtagccacctagaactgaaggctggccaagaccatatgatggagcagctaagatctatcagtacttcactgcaaaataggccaacaaatctagcaccagaacctccagcaactctggctatgggtggagatgatgaggtccttcctgacgggtatgtccctatgaggatgctccagctacccctatcgatgcaggtattatctgcatagatgacatcgagtcacagggtgaaattttggctttagaggcagcacctgaggttgagtttggaaggaggaagagaaagaggcctatttggttttgtagactacacagagaagaagaagaaacagaggccttcttcgacgtctgatcccctggctccacccgatgagaaattgaaggatactttctggaagtggtgttcaggattcattctgaaccatcgacttcgagatttgcaaactggtgattgcagtacatcattcttttagaagttgttgacgcagcaggaatgacttacagattgcgtaagtaaactaatctataattttactacattttataagtcaagtaatctacaattaatatatttggttgtctaact

SEQ ID NO: 164475 - DNA, 953 bp, Cannabis sativa
  modified_base (530)..(537): a, c, t, g, unknown or other
  modified_base (892)..(892): a, c, t, g, unknown or other
aaggaaactcctcattccgattaaagccaattttatggtgggtttaggggtgtatgtgggttggtcatcttatagcatatttttactaatttaatataaatattgagttgtaaatatttaattgtaatccgttttaattaaaattagaaaaagttaaacccgtgacccgtctaatgatttcatcggtttagtcgggttaacccgtctaaacccgttcttttcttttgtttttttttttttttaaaaaaaattattattagtagtttctagtattcaaataattaaatttaaaagaataaaaatatattatttatatttcaagttaaaaaatattataatttaaattaattttaataacattaatataagataaatataattgagtaaacataaaaaattgaataaaataacaaaaaataataatatggtatagattcaacttcaatatctaaatacaataaaaattattaattataaagtataataagttttaagtaaaattttaaaatgtctaaactttaaatacaaannnnnnnnactaataaatgtaatttatgtaatatattatatgttattccatttttcgcactatgacgtggcaacgcatactggtggcacgtgtctgctattctctacatttgactggagagatattctgaacagacatcagccatacatctgtacatgcaaactttgcctaatcgaacagagcaagggcagatgatccggacaacaaacgaagtcatttttccgagcagtgtatcaagacttaactacttcagttttgatatcgtgaagcttaagcacacaagcaatccctacaatcatgggatcgtatcaaagggatatgggaagttttccgaatctctcattttatgtattctaaatatgnaatgtatgttcttaccaattatagatattgtaagcaaaagggaaaccttccctcatgcatt

SEQ ID NO: 164476 - DNA, 1379 bp, Cannabis sativa
gcctatcactaggatcgggcctgtgtataatattactgaaaaaatatataaaatatttaaactaaaaaaaataatatatagtttagtaattagctgaataattattaaatcgatgtaggaaagtaaagcacaaatttaaactcaaatataaaaataggttggcttatttaagaaaaataagttaatccgagtaaagcacgacacgaaaatattaggtctgtccttcaaaaatattggcactgtaatgaatgtttagctttattttgagaattagcatataattagggcgtattatcaaaagtaggtttatagttattatttttgcaattatagagttataattgattctaggtgtatcaattataatatatacgaaattttatgatttttaattttatgcccgataacagaagaatatgatgtttggcctatagagttacttagatatagtagtactttagaaatagtgggggtaatatagttagacatttggaatgtcgggagtattcggtgttgtgatttgagaccactttacccctaactatttgagttacttcttggtgaagtaagggtaattttgtccttttgcctttagtaatttgtgaaaaattgagttaaatctttagtgtatgaattgtatagctgaaataatgcattaagtaggtaatccctttattattattcattaaccaaaaaattagaaaatctaaagtctctccctctttctccttgttcggccacacccaaacctaagaattgagcaagttttttcttctattcaaaacaattcaagggggattttgattgctgtagctcaattgagttgtgaggtaagttctttcttattccttgactttcaagaagaaaagttaggttttcacgtgtaattttaagttttttgctgttgtttgtgtgggaagtgtttggaaatattttaagaggttatttcttagttaattatgttgatttaagcttttttttcatggttgtggttgagaaagactaaggtttgagctttcaagctcaaatgtaggtctttaatggtgaattgtgtttcaggggtagttttgaccttaaattcaaagtttgattttttctgcagagaaaaatggttcatactggttttcccaggaggacccccaaaaaccgtggaccgttttgggctttcggttaaccatattttttagattttagaccctattttttcatgttttatcaatatttagggtattgccacactatctattgacagaaaaacttttagttttgagtttaagtcttcgaaaagtgatttagcatataacttattaattttacgtatgttatgactttgagacctataaatcattgagcagcagttccactcaggttgaccaaca

SEQ ID NO: 164477 - DNA, 686 bp, Cannabis sativa
tattgacccatatgttgtaatattgccatttcacattatatgttaaagacatacacccataaatatagataacgataacctaatagatctaataatacaactttgttgggagacccctcaaaaagagaattggatgaaccgataataattttagcatcaatttccacaaaagaaacgaaaaactctaattgcaaatactattttaaagcatacgagattactaacacctcaacttctttaagagagaaaaaaccagccaaagatttagcaaaatattctagggaaatttacatggtatactaacttttgccatttttttacaaaaatactttcaggcgaatttttttacttttaactgtattttttttataagtttcatactgcagtatactgtgttagtttccactggtgttctactggtgttttttagttgttctactattgttttgagttgttctgttttgtgttttactggtgaaaacacagtatttttgaaaacttttccgtgtgacagtatttttgtaaaagttaactcaaattccagtattttcgtaagtttttgaatattctaatgggaagccattagaattatgaaccaaagcctcaaagccaataatactgttttcactagggctgtacatcggtcgatttagtcggtttatactatatattttccaacccaacat

SEQ ID NO: 164478 - DNA, 2455 bp, Cannabis sativa
ctaaagagtgtaaggactacgtaccttcaaataagttgtgcctcctgcgaatgtaaaagccaactaaaattaacccaccaactaatgcaacgattatagccaatactaacacagctttcttcaccttacgaccaactcttgctttttctatgattagtttgaaacagagcagaacaaaaaaaaaaaagcaaacatattatgaaattgaaagaacaaatacattaaaaattaaaactaactagttgagttttgaaatgtgtacctatttctgatgctgacactcgaatgaaaagatcttgtccacctgatgaaaactgtcttatatcaaataaatctccaaaccaaagcacacaaccaatgccttgtttaatatctgagtttgtataagcagtgcaagagcaattgctcaagcaattagccctgcactcccttagattcacactcttattcacccaagtatattgagtatcaggcactttcaagccagaaaatcttaagaagccatcttttgctttttcatggcaattattaggaggagaatctctgacacatccttctgaccagtacatagctttccagttttcttcatcctttggcttaaaacccttcaaacattggcatactggattattggttatgacacattctgaatttggtccacagaagccatagttgtcacattggtcccttggaactgagttataaggcttccaaattctctctgcttgtatccaaaccatgcgttgacgaacacttgttgtttgattcatcacaattcttgatatgaccgacttgtctttgaggtaataaatgtagtaaacttcatcatcattgtacacaaacgcgtaatcgaaaagcgggtttggtctcaagtcaggacttccactgaaacttatgccattccaagggccagttcgataaaattttgaagacccttttaagatcattggttcagggtacgtatgttgttgctgattaagctcaatcccataagtgaaatctccattacaagggtcatcgaaactcttccatgctgctaaacgccttgtgagatttctcctcaagtcccatcccaatttcattccgggcacagtagtatcggttggataatcaaaactttcccacaaataattctctgtattctcatctttctcatccctcaaaaccaaattaccgttatccaaaagctgcaccaatggttgttgtgctggtttcaatgaattggttgaccacatcacactctgattctgccccaaaagcacaagttctcctttatcgtttatagtcaatgagccagatgaatcgttgatgggtttacacctgtttgcaacccaaataaaagtttgaactgggatgttcttgtaccaaattcccagataacgattctttgaattgcctggactaaaaaatcccagttcaaagtttccttctttggaaaccaaagttgtgttctctctcataaaatttgatggtctaatgctatcaactaccgtagaagaagttactaaaaatgaaaaggagttgaaaaagaaaactataaacattaaagaacagatccccatcattagtttctacctcttgatcgagctttgtgaagacgatggaataccagtaccctcttcattgagctttgtctttctcgcacagtttgactattctaagtaatattgtctttagtgcttggactataaggaaaaatttaatctaaatccgttgcatatattgacgagtactgttcctttcataagcctattcacatgagtttcgtcaaaggaagaagaaaaaaaaaagatctaatagcagaactcgtgtggtttacaatagagttttactggataaagaaaaaccacattttaattaaattgttctgctccacatattcaaggaatttccatttttgctcaagaaaaagtttcacggccttaatcttaatcagtagtaattttgttgtggtaattaaattgattagtgagtaatgctatgctatgtatgtgctcttttttattatgttttgtaaaaagtgtgcgccgaagaacgagtcttaattaatttgtgattggacaaggacacaatggtttttagtagcttattgtatttacttattatatttgaaaaattgaaagggtcgtttggactaagtaccagtttccaccacccattttggaaattaacttttagactccgtgttttttaaaaattacaattcgtaccctaaagtcaaaatatttttaaatatgacccaaataaaaaagtgttatacttacacaatattagctacaccccaaaattataaaatcattaaatcctttggtttaaaatagacaatttaaaaagtaaattactttataaaactattctttttttaaataagtagttaagtactgcactccaccttttgaaattatagaaattcattaattaagtttactatatttccatcaaaaaaaaaaaaaaa

SEQ ID NO: 164479 - DNA, 1829 bp, Cannabis sativa
atcttggcgactcggttatgtggaaagcaatcctatatagcagaactgtaatactcagattaaaataatatttaattttttatttcttttgtttttctcttctcttgagatattaattgtgcgaggataattatctcatttatctgtgttgttagtgagttgaaattatttatagagtaattgtattaatttttttttaaaagaaagataagttgtattaactacaaaagtaaatattatagtatttttacaaattaagtaattacttataattaaagtcgaatacaaaagtccactttagtttttattaggaaatttaattgattatatgagtgatattacataaatttattatggaattttaaaaggaatagttagttttgaattaatggcactatttggagataaaaaaatattgtaactggagttaaaatttagattatggctagatttagtaactttgtgacatgtaatgtatcatgtgtatcgatcactcttggagatttagtttacttagtgttgaagatatatgtttgtaattaaatgaagatgcagttttaggtttatacttttgggggcttgttggacttatcctctttgtttcggacatatggcttgttgagaatttggtagagtattgtttgcttattggaagcaagtatatatgcgataataagataaaaatgatgacagttgtatcatttcttttgttaagaaatttaaattaataaactttaaccattttcaaaattaaatgcttatgcaaaccattttgttttacatggaaataatttcggcctctttactgaccttgaccgaatatgttggaagattaacaattgttaggtaattttatttattatttaattaattatattgagtttcagttggttgatcaagtaatctctaaataaaaactatatatagagaataagactatttaaattgaatatacattctcactctttcaaataaaaatctcaagactaagcactatcctcataacttttcggccaacacgcataaaccaaacctcatataaataactacactcattaccaccactataaaagatcttcaagcaccatccttttatatcatgcctacattgttgtatgttatagttgaaatacatgctccaagccatcaccattcttagaaacgccaagaccctatgattcaaatacggaagttaagttcaaaattattctttggattcagctaagacttatacaagatttttaaggttcttctcaagtttgattatgaaaggaatattagtgcaaacattctctatctctctctccactctcaaggtaaggaaataaagtagttttatatgtgttgaactgcataatttaaattatatgtgtattgaaatatgggttgtaatttattattaagaatgtgtatatggtatcgagaatgtatggtatggacacaatatgtgtttgtgaatcggtgtatattatggctgttatatagttgttatgacttgtacatgttgtatgtatatctatgtgttgcatgttgtatgtggtatgctaccgtttcaggtacaaatgaggggtcatggtggggtatgatagggtaaggccgttgaatgtagagataccctaccctgcatttgtctgattcgtgtatgatattgttatggtaaggtatgatacggcgacaatgctgttgaatgtagagataccttattccataacaatggtagggataaatgttcccaggttattatagggccaatgtaggcccagattatgtatgtaatagtcatgataagatatgactgtgtatggttatttcatagtattatagttatt

SEQ ID NO: 164480 - DNA, 1020 bp, Cannabis sativa
  modified_base (724)..(726): a, c, t, g, unknown or other
agacgatatggaattgcataacttcgacgtatttcgtcaattacaccagaagattcttggttgctatatgtgatatttgtataagaaaaattctttcaaaaaatctatattaattccaaatatttttataacatgatgtcatattttatattatatcacttatttagtattaaaaaattaaaacttaaaaaagataacaaatattatttagtatcgtgcgaagggcggattaattctctaatttagttaataaaaaaatattattatgaaaccttacaaaaaatttggctagcaaaattatttaaagaaagttataatggtggtaagagatttaggtaatgtgcattcattttctaatacgtaaataaaattagtcatatataataataattattatattttaggtacattagtttttatttaataaaattgctattatttatcttcatcaaaaaataaaaaacaaagaaaaagaaaaattggtattatttatgcatggacgggtaaactctccaaagaaaaataataggggtaagttgtaatatacccctttttttcatcagttaaccaaaaatagccttagtttaaattcaattgaaatgtaccctcttttataagtccattactgattatacccttacataagggtactgttcagggaggtgagaaatattttttttattacataaggttataatcgggatataacaaataaaagagggtnnnaattaaatatatagaaaagaaagagtaaaaatgaaattgcttaacaaaaaaatgggtatagggtgcaatttctacaaaataatgaggggattttttttatatatatacgtgattatataattaggctttggacgtggtcacgcattctgtcaattgtgtgactagtgacgcacaacaatataatatatatatatttatattatatcaacaaacatagtacaatctaaaaaagtgacatgtgttcctttaatttttttctttttctgacacctattattttaagccaataaataa

SEQ ID NO: 164481 - DNA, 2236 bp, Cannabis sativa
  modified_base (2207)..(2210): a, c, t, g, unknown or other
tatcttctttagaatttaaaaaataaaacatgcaatatttggttaaacttttgaagcttttaaagcttattcattcatctctccttttttatttatttaattacttttatattttttttttctattttttgttttttagtactataattgatataaaagtattatatttaaataatgtagagaaaatatagagaagttcatgaaaggtatgttgtaattgtaaaatttttgatgtaaaataaaaaaaaaatttagtgttttggtaatttattttaaaaaaaatagagtagagaagttattatgagtactattagcttattagctaactttatgttgatattttctttcttttaatattttttcaatgtgaaaataaattaataaaaataaactattatctatgtaataatagtttgatagtcctacccagaaagaaaaattgagcttattaaaagtgacactaaaccaaatttacttaaaagcatttctaatcatgttctctaaatataatttttagctaaaatagagagtgagtttttaataaataagctctagccataaaaaaaagtggctctctataatagagaatggatatgagttctctagatgtagagaactctttatttttttgctaaaattttttaatagtattttaatcaaaattgttattacttttttattattttattaaattaatttatatttaacaaatttaaattataaaatattattgaaataattaaacactaactaaaataagaagtatgattggagcaaaaataaaaaaatgactctattttaactaaaatttagctaaaaaaataaagagtgtggttggagatgctcttatatagcttagtcataattttctgtatgacttagcaagttttttttttagcttttagaattaaaaaaaaatcttttaggggtgtttgtacaaaaattgaacaattattttttaatataaaagttcttttagaagaaattagaatttgtagcttctcccaaaaagacttttgagaatttatttttaaaatttaaaataatttatataattcataatttacttacaaaaaatctttttttaatgacatccaaacactttgaaaatcacttttcttttaatttttttttttcatataatagttatctaaacactaaaaataagtcaaaatttatgtttattttacttttagctataaataaaagtagaagcctaatcaaagaaaaccagtagtaacttatggccaaagcatacaaaactattaaaattattagcagatgtattaaactttaagttatatgcaaaaaaaattaattaatatataaattatgatttttttttttttgaaatcatataaattatgaatttatgatcaccaatttttctttttaccaaaagtatatacgtatcttaagcatgaaagtactccagctaaattatactaatacgctacctatatatagatatatagtttactgttataggtcaaatattctgtaaagtgacttggtattatatatatatagagtttgctggccattatcaaaggaaataaagtgtaaataattttacttttttgtttgtggctacttataaaacgataacccaattattctttttggtagttggagacaaacttagaggaattactgaaaattaacataaaagaaactgcccttttctcaaaaaaagaaatgtatatatatatagtaaatagacttttgtatgtgacaactacccaattaaagaatattattgcttattttataacttttttgttcaaagataattagtttaacaatatcacatattggaatttggaacttaattattatattgagtaatatcactgatcactaaggcgaatcacataggatataagctaccaatggatgattccaagaaccttatgtatgtcatcattattaaattaatttatctataaaagggtttattataatatttacgtagtactagtccaagcggtttatgctattttttttttcttaaaaaaaacaaaggttgttgaattaatttaattttaattatcaataatattataatatatattaaaagatgctatagctacaaaaatgttggtacaagtttagtattcgaatgttttttttagtatacaataatccattgaatactttcggttcttagaatctctaaaaaaaaataatattctaattgagaggtnnnnactaaatagagttacacttgaaaaaa

SEQ ID NO: 164482 - DNA, 2864 bp, Cannabis sativa
aattaataaagaaaatttacactagtttgtattatagtattcatgaacttagattttattgtaataaactcagaattagggtcatagttggtgtttgagttaaggttgaggttggggtctcgggtccaggcaagaaatcccaattaggtttagggtctagtcaaagttggggtccaagtcttgaggtcgggatctcttgatgtaaaagtttgtgattcgaatccactcagattggattcacggtgaattagtttaaggttgagctcaaaaaaataaaataaaataaaaaaacctcgtttattattattattattttgagaaaagaaaaatgaagactttaatcacaataaattaaaggtttaattaatttgaaaataaaaaagctctaaattgaaatctatttttaataaaagcaaaattatcttttcaagcgtgataatattgctcaaattgaatctacaactatttatttattaattttaatggtgtgaaaatatatttattcaaaaaaaaaatggtgtgaaaatatatgacatatatataataatcaattattaaatattcaacactaaaacaaagttacccaactaaaataactaatccaatatatattttgcaaaatagtgtagatggggatccacatgctcctagaaaagaatagcccagattaaaaataagaaaaattatgacagctaaaaaaccgtttacattccccctttattgcatacttttagcgaatgaacttatacactggtgccaaacatgcattacagaggttgaagcaagaaaaccttaaactcggctctgctcactctgcctgcatgtttgggtccattgtggattgtatcctccataacaccataaattaacagaaaaaataaagggctaagaagatctctctcaaagttgatggtgagaggagatcttaatgatttaggaggaagttgtaaaaattggactggggaaagtaagtatacaaaactgaaatgcattttgtccttcggttaccgtcttctttaaggctcttctacctctaagtactgggagtgagatgcagccaaaagagcagccccgattccagagccatcattagagtgctccactaaaatgtttgcggaaacttcctcccccaacaactcggtgagggatttttccattgagaccctgaatttagtgtagtgctcgtacaaaccaccatccaatgccactacagacttctgtttatctcccaattttactgtgtctcttcccaatttcttgaggattcctaagatccctgcggctgatagtcgagctcctcgagtggcgacaatatcacaaatctccactattgtttttctcgttttgagggaggtgttagatatctgacaaagagagatggacaacttattataaccatcaaacgtggaaataaactggtactaattaaggaaaataatatattctatgatgtttagtagggtcctaatgtttagttcaactgcagagaaagtaatcaactcaaaggttgaactgtccctaactagttagtctttcctcacctaaccacccaacaaaaataaatgaactgaaagagaagatatgattattaatatagtaatatgtgcaaagtaatgcacctctaggagatcctttagcttgcttgcaaccttcttcagatctggagatgtgtcgtgatgcatcgcagacatgtcgggtgtcctacacattaacactgacaagttaaaaaccctaccaatctagtcaatcagaataggatgtagacatatttctggtgtaaatttcataagcatcatacaagcattgccaaaagctcacagacttgcactaatatattcaattccttaatcacaagtatatctattcattactaatatactcatattgtcctaactaccaatttcaacaaacataagaattaaactgactgaagagactccaacttaccttagtataaagggaatttttagttttggcggaacagtatcaccaaaaaactcagcttcttcagccagtttacacaaaactctacggacaatgtcccccaagtacattccagaaatcaacttttcaaatatctgtagacaaaaattaaaaacacttatcaaatgcacattcaggcactcatgtgaacaaagctaaagtatatcacatagctgaaagtatatgtatcattattacctgttccccaggattcaaactgtcagaatccagtgcttgatcatattctgttaaaggaaggtgagatgaccggaagttaccccactccatgttgatcacctatcattgggaaaaataaattagcacatgtatagcactcggttacaaaacctaagttttgaaaaaagctactaaccatctctcctgacttaggtaaaagaccctgccacttgggaattgcctgagccctctcaacataagcagcatttgttccagttcccaaaatcacagcagcaatgacatccgggttggtgtatcttcctccagccaatgtaccaattgtatcattgacctgtatcagattagcatatcaggataatttctaataaaagaataataactaatggagagagaagtattagccgtaatttagaaatcatttaaaacagaacaatggtgaattatcctctatcagttggatggcaatataatgattcaatgaaccaagcaaaatatcaggaaagttgaaaataatgaacgtaccaaagctgtaacccgcatatcaagtccaattctttcaagtgctttggtcagctcacccaccacatcttgtccaacctaattaccgttaacaccacaaaaagaagaagaaaacttaaatacatatcttagtaacataatatacagatacttgacacagattt

SEQ ID NO: 164483 - DNA, 1028 bp, Cannabis sativa
  modified_base (684)..(693): a, c, t, g, unknown or other
aatctcaaaagatagaacaagaaagtagtgcatttataaatgtaaatgtttaatgtgataattgaatatactaataaaataatagaaatgacataaatgtaaatgaaaaagtagtgcatttattgtgatgtaaattttacatcatagcaaatattgtgccaaatttggcacaaaatttgctatgtgctaaatttacattactttttggcacactattagaacacactttttgttaaatgaactatattttagttttcaccacttatttacacttccatgagagacgctcttagacaccatcctaaatacactctaaacatcaacattatatagctatgtcaacctgttaaatgattcatcagtattattttttaaaaaataatatgtcaactttcctcattcttataaaagttaacaaaaggaacttaattatgataattaaacatgaatggatgaattaagaaaaaaaaaagaaactttatgaagaacatttaatgatcttattcgagcagcttgagattcacaaaagtgtcaaagcttgagaaaagtatgagaaattattagggttttaatttttgtcaatttagttatgtaggtaacattagaataattttttaaatataaaaaataaaatagtaagaataatttaagtggcgtttagtaacacttttttaatcagttttnnnnnnnnnnaattagaaaagtgaaaatatttttcaaaaacatgttatatgaaacagttttcacttttcaattttttaattgacaatcaaaattttaaaaaaaaaaaaaaagttaatttcaataatttttttaaacattttttttcttaattaatactttagactccgaccagatccaaacccaaatctcccccacgtgacctggcgctgaacccgaccgctgacccgaaccagaatacgactctggacctagacccgacttaaataaaatcaaaaaatgaaaatgaaaatgaagtttacaaaatacacttttgttttttatttttaaaattagatcggaagagc

SEQ ID NO: 164484 - DNA, 1227 bp, Cannabis sativa
gaggtggtcccttccaagtaattactaattagtagttttcatgaaattaaaaccgaaactttattattataatatctggtggtgttgaccattaccaattctcaattttaaagtgatttaaatataaatgttgcttattctcaacaaagaaaaaatataaaaatgttgttgctgcacgaaactaagtgtatgtttgacatcataattaaaaagattgtttttttattctcatttttaaaaataattttttgaaaacaatgccaaatatgttctaagggtctccattttactcttattattagataaatgctaagagcatttctaatgttactcttaattttttttttagctaaaataactaaaaatttaaaataaaaaattatgtttattattattgttgctccaagctctctactacttagaatttaattattttaataataatttataatttaaatttgttaaatataaattaattttagaaaatattttaaaaaaataatagtatttttaattaaaataatatttaaaaaaaatagtaaaaaagtaaggaacttccctaggtttagaaaactctagttctattctttattatagagaactattttttatatagttgagactcattttttaagtctaacttcttattttaattaagaagtatttaaagagtataattggagatgttctaaaagtgtctaacactaatactaaaaggtaccagacgtagcactacgtacctaaagtaatgtgctattaatataattatttttataaattatttataaatctctatcatgttaagtattacttgtgctttagaaagtgtgaccttatgcgtgtccagtccgaattccaaacttgactttagaatattcttctcaataacctaatttttacaacttgtcatatatcatggcatgaacaaaaacttgcagctaagtaatggacaagtaaagaaaaccttgatttatttattttatttttctttttgacaagaataaatatcaagaagatcttactaacttttagtgatcgttgaatacacaagattagattcaataattagatacgttaattcatccaattcagtgttttagcatgctgaaagtttagataactaaatcaagtaatctcatctacactaaaacaaataaaaaaaacaaaagaaaacaaataattaaaaaaactaaccatcttctgcacaacttcaatactagatgcaat

SEQ ID NO: 164485 - DNA, 622 bp, Cannabis sativa
  modified_base (550)..(587): a, c, t, g, unknown or other
ctgccactagtagctacaaaaggaagaagacgacaactggggagtaggaggaggaggccacggtgcttgaaagtggactgagggagaaatggctactatctagggagggttgagattttgttgatgatttggttttgctgagagagatgataagacaagagagattgagagtgagaatcctagggtattaatgtttaccaattctttcattttgctaaatattttaaaaggatatttatttaattcttttgtccatttagggccattttgttacaccatagtttcttaaaaatcttttaaataagtattgatgctattttttcttaacaaataacttgagtaaaaggcaaacttcaaaataattttgtttttttgaaagaactacaaagttcataaactaggaaaagatactaggaatcacaaggaggattccttctccttgaacaataccaacattgtgcctagaacatctaggacttttagctagtgaatcagcaaagtattggaacttctaggcatataaaagaaattactgttgggttttatgccnnnnnnnnnnnnnnnnnnnnnnnnnnnnnnnnnnnnnnttaataaagatcagaaataactttttatgttgcat

SEQ ID NO: 164486 - DNA, 1034 bp, Cannabis sativa
gagagagagagagagaatttaattagtaagtgaatgaaaaataaatgtgtgagttatcatttttaaaattatgtgatatttggaagaaaaaaaatagctaataaagaaaaaaagaaaaatcgtgtggtttttttttttttttatatataaaaaaagatgtgtgattttagagttatcattctttaaattatgtgatattttttttaaaaaaataaaaaataaaaaaagcgcttgaaagaaaaatgtgagttattatatttgaaaaaaaaaatagctattaaagaaaacatttgtttggtttaaaaaagtaaaaaagtaatttggggcaccaagccaattaaactcaatcactagcccttggccatttgtgatttggggcatagatttaattggtgaattgccaaaagaaaaaggaggagtaaagtatgtcgtagtcgttgtggactacttcacaaagtgggtcgaggataaggctctcgcagccataacagctttaaaattatgagagttttactgcagtgctatcatctgtgggtttggcgtcccttacaaactaaattctgacaatggtaagggataattagcaaggggacgcacatagaaaggcgaggggcactcagtcctctaaaatagaaataaacatacatagagagagtattgctatgagcctatgagacactcatggtacatagtaccacgatttaataattttctataatatttattaaagtaaagcaagtgggatctgatattgggttgcaccaatagtaatattatacttcataacagtgctaggcaccatgcgtaccctttagtatttttcttatatatatgtattttcttataatatatttttaattaaaagttgtatttatggtgagcatgcccattaattgatttgtgagtatgttgatatagattattaaagggaaatttgaatttctatgcttgcattaggggataatttttcccctaaatttaaaataggggatattggtaaaatgggataacattttcttaattcccacaatacc

SEQ ID NO: 164487 - DNA, 949 bp, Cannabis sativa
tatatagggatagatgtaggtcattcaatatgtatagtacttccctttcaaaaaaaaaaaaaaaatatgtatagaacttatgagcacataaattatactctagattaatgtatatcattgtaagctttatatttctattcaatcaaagtttcaatgcaatgctagcgtacatgtcttacttttttagtttatcttacaattaaattaaattaataacaaactataaattttgacagttgagtttataaaagtttatcccaaaaaatacaggagtaaaaaattacaagagctgtaattttctttgtaatggcgattacattagaaaggcattacaagattttcaaaaacaaattaaacagaagtacgtaattttatttgaaattttgattccattacaatttttaattttttattatgccaactgaacgtgtacttatgacaattttggcaaatgaaataattgttattatatttttaaagggaaacgattttttattaaatggttcaatgtaaaacgagtcctattaaccaatctgagcgcattacgaactcgttagtcattacactgacaaagattagcatatttgtaagatatatactgaacaatgtgtagcctgtaaaagtatgagaatcaagtaatggtacacaattacagaatcaacaataccatcgaaaggtctaggaccttgaacaatttgaagcaaagctctcgaagaaaacaaactaagccaaaacccgattaaatcatatattacaacaataacatactagaataagatggatattgttggaaattgttgtgttccaatagaaatattaaatcaacaatattataattctatgacaaataatacaaaaaataaaaatatagattaaataatgttacaacactaaacaaaatatacacataaaatagagaatatagagacgaagagaagaattacaactc

SEQ ID NO: 164488 - DNA, 605 bp, Cannabis sativa
aacctgttgattagcaatggactgcagaattaatttaaaatcacgataacatacataaactagtagggtgttacacctttcatggccatctctgatcctgatggatcgctcaacaggtatacttggctacgtggaggagccttcctcttcttcttcttcttgctcgaagccttctatccgggcacagcttcttctgctacctcctcagcctttggtacaaaattagtcgaaaaaagattatacttggcaaagttggcaactgtggctaggagagagatgttccgttcatcaaaagagagttgtagaatttttttgagccctcttcctgagttccaaggtgaacaaagggcgatagtaggacgaaatctgctagaaactagtataattagtgtccacccccttgacaaagtaatactcatttacgaagcctcctatctttgtcacctcggtgttcgtggtgctcattaaccatgactcttcgatctatgaaaagtaaaagtaccctgaattattctgcttaggacttgactttagatcgaacaaccagtttgtgtcatggggggacgactcaccctatccttgtgaggcatagaatacgaataggg

SEQ ID NO: 164489 - DNA, 799 bp, Cannabis sativa
tagactttttatcttcatttttttaaagctattccatatttttttatctttcgtcaacgtcaaaataatctttaatttagtattggattttacaatgtcttgttcagccatgaatatcgatctatacctctagtttctcagtcaacccataagttattgtccttttttgagactttgccttttccttttagtgagactgtttattgatcggtaattatttatttgtaaaatgtaccttccatatatgaccttcctttctcatccaacccacaagatctatgttttgttaaataaatattgataagttttatgtgttgttctattgggtaaatgttagaattattgttgtgaactcatataattataggcataattattaaccatgcgtctaatatttgcccataatcataatgagatattttacactaaattgtattaaaagcacatgaaagcacccttgtaattataattagccattaaattatagtctaccattaattaaactatataagtctcactcattagggttaaaggggtgtgatgtatatttgatataagaggggttaactaatagcaatgaaattgacataagggaattgctccacattggcctctcttcaagattcaccattgaacttttttttttttggcactcatcacattgaaagattagaagtatcaaatggctcgtatggacaacatccgttaggaggcatgttttattgctcatttatgccctaaataaaatattagatcttcgttgatatttatgagcattgttgatgataataaattaatg

SEQ ID NO: 164490 - DNA, 1152 bp, Cannabis sativa
atatgggattttcattctcttttgtatgaattcattttggtttgggggttgtataaggaaattttagatgttgaaaccatttttcttgtgttttcccccttctttttgacccttattagtaccctttatttaaatgtttagatgctatacatttttgtaactgtatacgcccaaatataagtgatggatgtggttcacaagaacactcgagattgttatattagtttcagctatttgtaaagaaaggtttcttatctcatcatatttttactaactagtgttgtgtatgcaatatggtacagtatttacattttttctaattttgtgcttgattataataataattaaatttgaaaaaaaatgctaaattcctggtgcctagggcccaaaaccacttttattaaagagattattttagaaatgtccaaaaaaacactaaaaatttacatttttatggaattacaagtttttattttacgtttttgcggattttttttttcttacaaaccgttgtttacacattgcggaaatatggtataacgttgcaacaacataaaaataacacaaaaccgtaaaaatataaattaaaaaagctcataaaaatatttaaaattttgtacttttaggtgtattatggtgtattatgtaaatttgtcattaataaaatagtgatttaatgttcccaaaaaaaaaaaaacaaaaagttcagggactaattcgctaaaactaaagtttaaggactaacttgttaaaacttatttattaagggactaatttacgaaataaaaaaataagaaccaacttgccagaatctataagagcatctccaatgataactctttttaatgttgtctaaaatcttcacattatctaaaaatataatattttatttcatctctcttacacattatttttgcaacattttcttttaaactatttcaatgttaaggatttttttaaatttgctattacggtctcacacattattatttcatacattatttgttttgattttgatgctaagttttagcatcaatttcactctttagtttggcacataaataagtccaatggttaatttttcttagggttatttgcggcaaaacccctttaagtggacaggtttttacaactaaccccctaatctaaaat

SEQ ID NO: 164491 - DNA, 1784 bp, Cannabis sativa
tgatcttctttttctgagaaaaaataaacgtacgtgcctagctgctagcattctctgtcaaaatcgtttctttatataaatcatatatacacgtagttagattttgaggtacaacttttatgcaataacccattgagccaggttggagttattcatgtaggtttttaaaaagaaaaaggaaattagtacagcagttataagtactttggtacgttaattaatttttccattttatttcttcttggggctggctaagctagggcaccataggtctctttttttattttttatattaatcaaataaaacatcaacagtgtttggtgtaataaaaatcacttgattcaaactcatgcattagctacagcaatcactagttctgttggaaattctacttgaataaatttttttgccttttaagttctcctctaacagttggtttggttttaataattaatacaatctttaatttcaaaaaaaaaaaaagaaaaagaaaaatgaagataacttgtattatctagctagaccacgaattgcaacgtcgacccacatggaacaaagttacacgtatgaaattaacacgatagagctaataataaaaaaaaaaaatagaaaagattaaacttataaggtactgagcttaatattacaataacaactgagacaacacccaaaatatacatgcaaacttctaactaattcttacattaatatatgtgtgggtgtcatgtgtgtgaatgcatgtatatatatattcgactgttatatagttttttcttaatttccactgtaaaattaatccatggtatatatgtatatgattggaattattaattaaccatatgcactgaagatatacatatataccgtgataaatattatgaacgagtttcatcatatataattaattatatatacactaataaaataatgacaaatttgtttaaataaataaataaaagacaaattaataaaagtttctgtccaactccaatgcataatagattcttctatatcacaaacattcccgagaatatttataaatcaaattatgaagaaaacacggttacaattacaaattaatgaaattaagtcttaaatataatagtcatacttagactcttttaatgacttaacgtatgctttgaccacacatatttatataaacacacaatacatacccacccacatgtaccctccccatcacttaatcaattcatttcacagctacacgagtgtcacacccaaaaaaaaacgtcagaagtgatttgtatgtaacaatattaatatttaagtatttaaaaataagaaaaaaaaaacataatactattattgacccacacgcaaagaagaaaaaaaaaagtcaaaccatgtcatcaaatttcgtttgacaatttttttttttaaaaaaacggaataatacctcgctacacttattcgtttttctaaatattttataagtattaattattgatacacacgagaatattaagattcagtttcatattaattaattattcgattaaataaggctctatagtcagagttcgatccttgaatttttctgttgaagcttcttctaccattccctaaaataaatataatgatgcataatgtttattattaattgaatcaaaccattttcaacgtgtagttgataaaaactaatgtgttgttcaccgaagacaacagctgcttaattttaatttagataaatataaatatgagctaatgtatagtgtcgctccagtatgttgttgagaatcatgaggttccatctcaaaac

SEQ ID NO: 164492 - DNA, 524 bp, Cannabis sativa
  modified_base (491)..(494): a, c, t, g, unknown or other
ccccccccccccaattaacaccttcaatctacgaaatcgagcaagaagaaatgaaagaagagggtatggctattaacgccatcaactctaaacaaggtttgtttttatttttagaattttttttttcaattttgggataattcatagttttggtatacttgcaaataaatctagaacaaacttgttctaggtttatttgcaagtatgccaaagctatggatttgttcataatagtattaaaatttaaatttttagtgtttgtgtatgtgtgagattatgtatttatacaaatatatgtgtatatgtatatatatatttttaacatttgtatatatgtataggtttgtgtgtgtctatatttttatatttatatatttttgtgtacgtgtatatataaagatatgaatgtaggtttgtgtatatatttatgtttatgtatatgtaaatatatatgagtatgctcttaatgggtattacccatgtatgggtannnnattcttgaccattggatcaaatatctaatg

SEQ ID NO: 164493 - DNA, 621 bp, Cannabis sativa
gctaaaggcccatattgtagtagtgagttctcccataataatgttttcctaacacaataatatgttggtaaaattttgtaattaatttttttaaatatataatatttaatttaaaacaaaattcaattattttttaaattaaaaaaataaaacatgaatgcttaattattaataaaacacaacaaaacataattttaaatgttctaattatacgtgcataacattataattgtctaaaaattaaataaacatataataccaacataagtatatttaattttttaactaaaataaaataaatactactacaaatcggttgcgtcatcatcaatatcatcattgccatgatcattattatctctcacctttgcccggctaaatcaaacatcaaactgcagtggcaaaatgtctatttgtaatgtcggaatacttgcgctcgcaccaatgctcgcatcattaggtcttgatattgacttgatttttcttaagagcctaattttcctttataatagcctccacatcgatcgactgggatcctagcatgaaagatcactactacaaaattgggctttagaggcggtttttaagggctttcagcgtcggtattggcgaaattcgcta

SEQ ID NO: 164494 - DNA, 718 bp, Cannabis sativa
agttgtgccacttctcaacgttatagcattagcatgagctcttggatttttaataggttgagaaggtaatatttcaaaaagtttggcttctatcttggccatagatgtaggtatttgccccatagaatttgccaaactcttcaacgttttgcttcagttgtctactgaaactgtagtgcattcgtggccaaggaattaatcaagtcttcaatagagggcttggcatttgacggtttgcttgttgggcttgaggcctttgttgatagttaaacccaggtggtctagttggtgtagcttgttgttggtttccataactaaaatttaaatgatcacgccatctctcattatatgtgttcgaataaggattatattgccgccttggttgatctgagaaacctccaatatcattaatatcttttgttggcctttcaaatagagtaggacaagtatcagtagtatgcaccacaacataacatatcccacaaggtcacactggttggcctaaagcgagttgttgcactatagatgttaggtgagctagttgctgcccaaattggttattaataagagtgttcacttcattaactttcttcggtggcataacatctccgcgaatgtcaaattattgtgagttggtaaccatattagaaaacaagctcctgttggaaagcattttaccaggatcttagatctactcacaagtatgttatttaacacc

SEQ ID NO: 164495 - DNA, 2216 bp, Cannabis sativa
ctcttttactctccatccatcctccacttctccattcctaccaaacatagctttagtttttcttcttttttcgtctcctactaaacaaatattattttcttcctctcttagttttttctttcctttcacatttttctactctaccaaacataaactggaagctgatgataccctctgactctgagcttttgcccttttgccttgtttgtgtttcagagaaaaaaaaataaacgaaaaactgttcaaccatggcttcttcttcttctcatacccatattgccgagggtcacacagaaattcctcctaccgctcaccattttttcaatactattcttgaacaaactcctgggaacaccaagttagtaagtaaattattactactctctctctcactgcatcaacttcaattgattatttttcgatgatttattgtgcatgtacagtacaccagatattataagttgatagccctgattttgtggttaaattcgtctgaatttgaggaaataatattgtatatacattttttcctttacttttttctacatgagttgtcaaagattatatatttaattataggtttttttttttggcaattctttttaccctaagtttgtctaataatttgtctactttggtttggaaatcttgtcaatgtgccaaaattagtggatgacatgttaaagtaagtctctttatgatatgttgaattttcaagttctatatataatacttaatcatagtctctgcaacatgaaaatggtgcttctttgatttgtatgatgaggagaatatatgtatataatacatgtatttatataggttgcagtcatgtgtagttatgttttctggtagctgaactatagtgtaaattatctaccattaaccatttttaatggtcttctcttgtgcagcaaattccaaaggcattttgggtgaaatattgtgactccttatcaagtcaagtaaagcttccatgtggatcaagaggggagataggattgacgaaaagtagtgatggaaaggtatggatagaaaatggttgaaatatattggcataacactttcttaagctggggaaatctgttaggttccatttggttggaggtgaggaaatggaatggaatagaaagaaagcaagttttattctattcttttgtttgtttgaagtaatgtcattccaatggaatgaattttctactaatatggtggaaaggttattcaattttgaaatggaaggaaaagactattccaatacaagatgtttttgtcaatttcttttatgcattttaaatttcatgtcattctattcctattctcatttccattcatattcctgtgtttccattctttccaaccaaatgcaatcttagttttttggatatgaagggaactctcgttcaatattatgatatttgacaataatactctagagattgattatcctcttactcctaatcattttcagaagcataatgttgatgttgattcttctaatgaaaattcagaactgtctggttttctaaaaccagagacaagcctccattaccttgttcttggccccacaagaaaaggaaaactagtctctatggtaaatctgaaggtattcatgatcatcctaaagatatacatatatatatatatatatttatataattttcatgtaattattaactctttttttttttcctatgttttaactgatttgttgaatctgtaactgtgtggagaatcttctgtaccaaggcgtataaaacctcaaaaaattataagaaaacaaatattgagaggacaggataaggctgaggctcttatgagagctaaaggttttaagtctaatgacccatttttcgttgttctcatgcaaccatcatttgttggagcttcgtatagtatggtaattacttataaagcttcttcttataatttatctttttagaatgtttgtcatattgacattgttcttttgtcaaggttgtaccatttagctttgcaaaaaatcacctcctaagtgtcagtaagcatgaagatgtgatccttaaggttcaggatgagcggatttggcctgttaggtactattatagaaagtatgcagggcattcacaattcagattcgagtggggttggaaggcctttgctagagacaatgatttgaaagtaggtgatgtttgtgtctttgttaagagacagaacattgggataatgttatttgaagt

SEQ ID NO: 164496 - DNA, 1177 bp, Cannabis sativa
atcaatggaatttctgagcttatgtccaaacccaatgtctctgacttctttccagtactggcctggtttgatttgcaggggatatctaagaagaatcgtcagttgattcaaagttttgataggattgttaatagaatgattagtacaaggatgaagattgaggaaaatggtgggaatggaaacaatgatttcttgcagtttctgttgagattgaaagatgaagaagattccaaaactcccttaactttaacacatgtcaaatctctactcttggtacactattttccacattttgtaaatgtcaatgttatgtaatttagatcatattgataacttttctactttattgatcaggatatggtagctgggggaactgatacatcaaccaatacaattgagtttgccatggcagaggtcataaacgcaccagacgtaatgaagaaagcccagaaagagttagaagacgtaattggaaaagacaacatagttgaggaatcccacatttccaaattaccatacttacaagctgtgatgaaagaaacactacgcttacacccatctttgccacttttagcgccacattccccaagtgaaacatgtgttgtgggaggatacactgttcccaaagggtgtggcgttatcatcaatgtatgggctattcatagagatccttttaactgggaagatccattgaagtttgatcctgagagattcttaaaggacagtcctaagtgggacttcactgggagtgacttcaagtatttcccatttggatctggcagaagaaattgtgcaggaatagctatggcagagaggatggttatgtattctttggctaccctcttgcattcatttgattggaaaattcctcatggtcaacaattggatctttctgagaaatttggtcttgtcatgaagatgaagatacctctcgttgctattcctacaccaagattatctgatccttccctttatgagtagacctatctctctcatatatgttatgtgtgcatttcttcaatgtgcaactactacacaattgctttttacgagtattgtttgtttttttcctatgtattagagaaccttcaatagagttattgaaaaaaatatggtgtattgccatattttaactacaactctaatggtctactaaaatttgtcgtaaatttgacat

SEQ ID NO: 164497 - DNA, 1312 bp, Cannabis sativa
atgtacttattacatatatatataattaaagaaagaaaaaagaattatatatatattatttatatggatgacaaagtcattaggttgatgtatttctggattatatatacatatataaatgatatatatatatatatatttatggaaatgcagagagatgcagaataggatcgacaccgcagaacgaatggtacttcttcagccacaaggacaggaagtatccaactgggtctcggacgaatagggcgaccaacgctgggttttggaaggccacaggaagagacaagtgcattcgcaatgccttcaagaagattggtatgcgtaaaaccttggttttctaccgaggaagagctcctcacggccagaagagcgactggataatgcacgagtatcggctagaagagcaagacaaccagcctgatcaccatgaggatggttgggtggtgtgcagggtgttcaagaagaaaaacctattcaaactctcatcatcatcttctactgctactaataataatcataatcataataatattaacaacaattctcatcatcttaatattaacaatgaattaggcacctcgcccactactactactactgccaatatgatgatgatgatcaactcatcctcatccaataatttatcatcatcagatcatcatcatcatcaacacaacctgatgaaccacaataacagcatgaccaataataacgcattcaatatccgatcagatcacaacaaccagcagtactaccaaatgcttcgccaacctcaacatcaggaaagtaccactgaactcccacatcttaatttgatgatgcaacatcagcaacaacagaacgtggctcttcatcacaacaacactacttacccgacagctcactacaatagctcatctctactccataacctcattccacctcacaagtctactcctcttttgcctgcatcatcctacgatcactacgcccccgctggccctgctcgcgactgcgagagtggcaacgatactgctctgcccttgcgctacccatccaatactaactgtgaccctcagcagacatctgggcttgaggtaggtgctggaaggtcggacactgatcaagacccagaccatgcatggacaatgcttgaccggattgtcactactactaataataacacaagtagtcatgaacatgaagatgatcatcatcatcaacatgagtcaactaaaggggtaaggacgaccacgttatttgaaaatgtcaacagcgtcgacgcaccctctgtctctctttctgtgtctcctcacattaatcccttatcttt

SEQ ID NO: 164498 - DNA, 895 bp, Cannabis sativa
atcctatgacattcatggatggatgatatggtaccaatgtccaagttcttactttgtgaagtgctcccatttctgtgctcatggcattgttccaatgtggattattcaaggcttctttaaggtttttcggttcagatggcagcattgattcatgtaaaggatgtcttgttgccaagtaggactttggtttagatataccattttgagatctagtgcgcatatggtgagttctagttcccgtgacagcaacctgtggaatagtggaaggttgattggcattatttgattgagtctcagcaacctgtggtgtagcttttgtttcagtacagggtggagtgtcaatatttagttgtgtgtttatggtgggttttgtttcagtaggaaaaatggtggtagcagtatggtttataggagatgaagtagtttctggtatgggaatgggattggtaacaggtgggacagttggctggtagctgaggtaaagggcatgagagtggtatgtggtgatatattggcaggttgctcagtaacaaaggagccaaaattatccacaggaagagtagaggaattagaatcatgattaggaggcctggaagtagaaaaaaaagatgtaggtacaatagagacaatttgagattgtaccttaggtgctaatgtagataaagttgcaggaaatgtagtttcatcaaagactacatttcttgcaataaacagtctgtcttgagaattttcacataggtaacctttgtgaacagaggaatatccaagaaatatgcattgctgggatctatattccatcttgtgcttgttgtaaggcctcaagtgttggtaacatgcacacccaaacggtttaagaatggtgtaatcaggaatttggccaagtaaacattcaaga

SEQ ID NO: 164499 - DNA, 2064 bp, Cannabis sativa
tctacagtagatatagctatcgtcggagaaaagcatgtgggaaataataggagctctgttagctactctacagccttttaaaagattagatgactcaaaccttcttatgatagaagaaaatccctcggcacatatcaagaatagataggaggacaaaggatcaccttggcggatgcctctttgaggagtgatattgctgatttctttgccgctattcaggattgtgtactgcacagttaaaacacattgaagtactagttgtacaaagtgttcatgaaagcccatcttcttcatcatagctccaataaaaggccactcgacacgatcatacgctttactgaagtcaagttttaaggccatgtagcctttctttccatgtcttttcctcttcaagtagtgcatgacttcatacgatatcataatgttgtcagaaattaaacgccccggtataaaggcactttggtactctaaaataagctgcgggagaacctctttgagtcgattagctattactttggaaattattttgtacaggacattgcataaagagattggtctaagatcacccatagtcataggattctttttcttgggaattagaaccatattagtgtgatttaaaccagtaggcagcagactagtacagaaaaaattcctcaccaactttatcacatatgctctgacaatgttacagttgcgtataagagtattgctatttagcagtttcttctataagtggcgtcctaagattggttaacaatattgcctaaaagctatttttttaagttaaatgagacccgatacttaattacatcaatagcagtatgacatcaaggagggtgctaggcaccagtggtacattttagcaattttctaaaaacaatataataataaatataaaaacataacatttattgtgatataaattttacatcatattacattataattcaaatttaaattactttttattatgtgacatatttgtattacaatttaacacactgttacaataaaatttaaacaaagtaaactatattgtgcatttttatcacccatttgtatctccacgtagatgctctaaagtcatatacaatttaacgacttgttattaatgacgcgtttactaaactataactgaaatcagaataatcaatgggagaaatgaatcggtttaaaataaaaaataatcgaaaataatattttattatgttgtttactaaattgtccggaaagaaaaccagaatcatattattttgtttacataattaggaaaggtaatcagaatgctttaatttgacgaaattgtcattattagaacatgtaattattttttgtttatagatttttaaaggatatatttgtcttttttatttttaattaataatattaaaattaaaacaaactaagttaggaaagggaaatgtattctttataaaaatgggaaaaaatattttcctttgttttctacctaatttgtgtacgccctactactttctctatttctaaaatttagtaaacagttgtatgaaaatcaataccatactatttattccaattctctttaagtaaacatgtgataagatttttatatgtatcaattttaccctcaagtcaaatttttgactattagtatttttaaaaacattaattaaaaatatgtattataatcaattaatatgtatataatttttttttatatattttcagtgggtctgcccatggttttggtattggcttcttcccaatgcaagccaattttcgatacgaacaacttgttaagatgaagaatttattcgtacgatatatgcgtgtgacattgtttataagataaaatataaacatatatattttgttttgtgacgagtgaagatgaaaagatatacaattatataattctacaataatttgattaagttttaataatgggataaatactatgtttggtgtaatatgattagaaaaagtaaatactattttgaatcttgtattttgtaaaagttaccgattagaccatttattttgttaaatgacaaaatagatcatgtatttttcaaaatggta

SEQ ID NO: 164500 - DNA, 939 bp, Cannabis sativa
tcgagttatggagtcgaagattgagaggctttcagctacaatggcagagatggaagtgaagattgatggtgttattgaagcttcaaaaaaccatgaaaatataagtaatttgcaagctcaacttgggagccagttgaagcaaataatgggctcggatttgcaatattatcaaactaaaatatttcgagctgtaatgatattggctacaaattatgatctattaagggttttctcatctctgcctccagatttgaagaaaacttttatttttcatattgctgatcatggaatatgaggatatttgtactaatattactgtttttacactgtttaatttttctatcaatttgctttgatttctgttttggttatctgtttgatttattgttcaatgaaacatctaattttaacaaatgttcgcatgtggccatggccgattttaggcataagcgggttagacttgtgtttagggcttatactttttaggggctaaaaatatcagtaaaatgttttatttgacttttaaataaaattaagtgtatcataaacaataaatattcacaacatggttggttgaggtgttcataaaatagctgatttaatccaatctgtacgattcaatacaatccaatctacaaagtttggattggattgaaaaattcaaaatccgcacttgtcggaattgaatattgattggcatgtaaaagtaatcaattcaatcaaatctataaaaaaaatagaaaattatatatacaaataatattttaatgtagataactcgtagagaataaatacaacatggagaatgcggtattagcagaaaataagggtccattggtggttcataatatcgtggtgttgacaacctcaagtcaacaactacaagtgattcttctgccaccaatggcacctctttcttacttttctcaaataacctct

SEQ ID NO: 164501 - DNA, 847 bp, Cannabis sativa
gtaagactaacatttcccgaagaagacataagtgtgaatatattgattatgaccttccgaacgaagaaattaaataagtctctcaattaaacttggcccgatccaatctccaacatgggtagtgatttaaaaaaaaaaaaaatcactattgaagattatattatttaaggttgcgttattataacgtgacatccaatataatacagtgaaaattatatacaaatatatatgtgtggataatataaatataatccattgcttcagcataatcctaccgtcatcttcatgatcataattaatttctacattatatcttatatattgggttaattaaagttttctgaaatttatgtaaattcaaaaggataataattgtgtaaagagccaaagaaaggtttcattatactctcattttataacttttctcatatctatatctaaataattgaaatatttgtgctcctaatagttcttcccacaactaaaaggggtgctactttttaatggtctagatacatatgctctctcatctccaataatatcactctttatatatacatagatatatatttatatttatatatatgattgatctcattccctccattattgtattttagtgggtttctttaaaatcccacattaagttgcagatgttacctgccctcatgactgatagaataacaattattaacaaatttaatcataccatagacataataatttagtaggtcaaccccacaattaattttaactatattttattgtactgcataagttaaatatattgggtatatatgtatataacatgtaactgcaatgaatatcaatggaaaatttgagtttg

SEQ ID NO: 164502 - DNA, 1045 bp, Cannabis sativa
ttattgtgggtaccttaattaattaacaaagtaaatgatcgtaagattataggaattgtatttttgaactttgatattttactttttgaacttttaacatgcatttgccaaatcatatttaatgaattttagcatacatgtatcaatatcaatagtccagaaatttttttaacggtttttaaaattcaggagttataatttagtatatgttaaaattcaaaagataaaagtagtattatttaaccatattactatattgacctctataggcactaccgatacccatacccgttcaagataattttttttgatatatttttgtttttatgaatatccttaattcaaaataatgatattttattttttatttttttaatatattacaatgaataactttattatatatgtaaataaactataatgtttatatacaacctaaaaataatacatccctaaaaaaatatcatctatctatacaagctctgatgatctattcattcaaacaacatcgaataaaaagaaatattctcactgtataaataccaatggtccaattaaaagtataaaatttttacagctcacacgtagtcttcgagattgacaaaataaccgaaagatgaataaaaaaatctttaccatatgatctgcttctctagttaaaaaaaaaggtacaaaataaaaacatcaaagaagaatttgttatatattagtaaaacaacaaagaaaaagtaaataaaaatgcaatacaatattaaagtagattcaataggagtaaaagtaaagttttagtactatacatggatattttaaatatgtgtgatattacgtgcatggatttgaccccggcccatataataagtaggtaacgcacttactagcattcaaatatgttatgtatataagtacggacaaaatggaagggtgtagatagatagacatacatatatgttgatatatagtatattaattaattgaataattaaataattagggaaggaagaagacgattaattaatttgatgactatttgagggagaaggaatca

SEQ ID NO: 164503 - DNA, 2069 bp, Cannabis sativa
tatatatagtcttgaattacacatatcaattgatatagggctatttacaaaatcatggggaaagatggaaaatttaagtaaatatgacattaaacttaatgtcactaagtgtttaattaggaaaaagagcatttgccctttagttgtgctcagaggcagttaagtctacaatggttttttaactgttttttttccaattttcttctgccatcttcttctttcccttaatttctacaattaattgctccctttaatccaaatacaaagcatctgcccaggttaatttgcgtgctttgtttcatcgtaatggacccttcaaatgacaaaatgaaggtaaagatcacgctcaatgaagaagaacaaacagtatttgattttgattttagagaaccaattgactctaaattggtactagatcgtgttttgtatgtatgaatattgactacaaagaaagtatggctttctacgtactacagaggcaaatggttgaacattggaatggaaaatttcttgtgataatttctgagaatgagaagatgtttgtgctcacttttaggtgtgaaagagacaaacaaagagtcttgacccgagaaccattttatttttagaatcatcatattgtgctttacatgccaaatgttttccaaaatgtctcttcatcgaatcttatttattcgcctttttggattcaagtttacaggctgctatttatgagcaaaaccaagaagttggctgaggcacttggaaacaaaataggtgaattcattgaagtttttgaagactcactctttgaaggttgggatctatttttgcgtattcgagtgaaaatagatgtcaccaaaccttaactggtctctctctttgagtgttttgtccgttctctcttgttgagagtctgttagtttgtatgttttttgtcctatactgcttgattgttttgtttttgctgtctcacttggtacgtgctctgttatggcatcaaccagtaatcatgtggaagatcttgaagagcgttggaaagagattcaacttgaagaagaggaggcagaggagacattctatgaggataatgaagcagatgatgattcgaacattgacaccagatggtgtttggttggtcgtctactcacagggaagatatctgactttcgcatttttcaaaacatcatggctgatctcgggaaacccggcagaggaatgtacgcaaagcagctagatcaaaaccgatttttgttccagttttaccatgagtacgacatcgaacgtgttatctcgggcagcccatggacctatgaccgtaaaacattaatcattaaccggctgaatgaaggtgacaacccccgaaccatcagtctcaattctcttgatttgtgggttcaaattcatgatttgcaaaatggcttcatgactaagaaagtggctacggatgctggaaattatgtggggacttttatcgaatcagatccgaacaacttcactgaagtttggcgggaatatcttcgggtgcgtgttaagctttctcttgattctccactaaaacgtaagatgaagttccggaaacgtgacggtgcctctttctatgccacatttcgttatgaaaatgttccaacattctgcttcatctgtggtttgatgggacacgcagagagactttgtcctaggaatttcgacacaccagcccatcttcttgttaaaccttacggtatgggtatgaaagctcttcctctgcgacatcaaaattttgcagctccgtaccttcggtcaggcaaggttcctgcaaattcaccacctggtgtgtacacggatgctgctggagctaattttgggcaatcaacagatcctattttcatgggaatatcttctcctgatatttctcattctaaatccaagaataaagggattatgctttatgatagtcaacaagctgatgtggaattgactcaagctgaacttaaaaggaaacgatttgctgcagaacaaaacaatgggcctactgatgtttcggctcatgcagaattgggctcaaaaaacttaaatatggtgggtgctggtatccaggcccaccaatc

SEQ ID NO: 164504 - DNA, 976 bp, Cannabis sativa
ataccatttaatatttagtattgagaagtccattctctatgctaaatatatcaatatatttatatttatagcatacaaaattggcgatctatttttctgttataaaatttagatttaatatgttttcaaacataaaataatgaagaagaaagaaagggagagatatgtaaagaaaaaaaaattaaaataaacactactaatataagagttaaaagtataagcgtaacaaaaataagtaaaaatacaaagtataattgtgaagaaataaataattatattgctagtcgctattcatatagataaaatgaaattatatactattcattcttttttgtttaattatattccattatcaaattcaatttttaggctaacacatggatggtgatattattatgctagttttcaatgctaaatgtcatggtgtccagcagtagcaccacaataaagtttatataattactatacaatttaatattagattttatttattttattttaataattattataaaaaattactaaccattttataagtagctaattcttattaatgtcagacaccttggtacctaataacaatgttctttttccaaaaccattaatgctagcttataactataagaggtaaggaatattaatattgtaaatacgagctagactttatgacacggcacgatcttgggagcatgacccgacacgaaaaaatataggcttggacatgacacaacacaaagctacaaatttgtacgacacgacacgaaaagaataggcttaagcacgacacgatactacaagcccaaaaatacgacacgtaagaacgaatagacatagctcaaaaaatacacattaataatagaataattatcttttctaccccctgtacttatgacactatactattatgccccttaatctattcagcttgttacaaatagtccttgtataattttatatgcatacatttagtccttct

SEQ ID NO: 164505 - DNA, 1528 bp, Cannabis sativa
  modified_base (1010)..(1030): a, c, t, g, unknown or other
acatctatgaattttgcaggttttggcgaatggtcttcaaaataatttttttggtaaattggtccataaatatataagtttttacaaattagtacctgaaatttattttttggcaaatcagtcctttgaacttttaattatttgataacattgtccctactattaataatggtagttttattgactattatttatttatttttcatgatttaacttttcttatttaatttaatttttcttatttaatttaattttttttattttcaaaattaatgagttgtggcttagcttctataagcactttttttagcttttagaattaaaaaagtccttctaggggcatttgaataaaaaattaaaagtaactttttaatttaaaagtctttttggaagaagttagaatttgtaatttctcttaaaaggacttttgaaaaactgttatttaaattaaaataatttactcacgaaagatcttttttttaatgatatccaaacactttgaaaaacaattttcattaaaagaaaaaaaaagatcgatcttcacataatagttatctaaacagtaaaaataagttaaagtttatacttattttatacttctagctataagtaaaaatagaagtttagtcaaacatggtcgtaatataacaagctagctagctactaatttaatatactaactattttatatacctttttgttattttaaaaactaattagttatcgtataatataatataatttaattagtaaaattctaaaatgaatgttaattaagatttaaaaatatatataaaatagtaactaatcattataggctaattaggaattttgacccctaaactttttcatgtattaaatcatgtcccctgaacttttctcaccgttaaaaactctccctaaactattgagattgttggatttaagaacttttgtctaattttatttaattttcctaattcagtaattgtttatatactaaattatgctccccgaactttgatatctannnnnnnnnnnnnnnnnnnnnttgacatgtaccaaatcatgcctcatgaacttttattcttgttaaactttccttactaaaattagataaaagttcttaaatccaacaatctcaataatttagggaggatttttaacaatcttaaaagttcaggggtaatgatttggtacatgtcaaagttcagagataaaaattctaattaggcattaccatatattagtaacaaaatgatttcttttttggaaataccgaaaaaacatatgcttcccacatcttgaaatgtttcacattgaaaagtagatcataatgatattttttaggctcattcgagtaactatgtgaccataaattatttttaaagtttgagaggagagaaagaaataagaaagagagaaagaagagaaatagggtgtagcatatgagaaaggaaaaaaaataagagagaaaaaaaatgtaaataaggattttttttttttttttgaataaaggagtttcattaaaaattaacaggcatcagcc

SEQ ID NO: 164506 - DNA, 942 bp, Cannabis sativa
aagcatttagagtcagattttgtcagagtgaaaaagtaatagcaactttcaaaacgcgtcactgtatctttttttttatacattttttattattttacagatatagtgacacacaaaaaatgtcactatattaagttatttttttaaaaaaataatattcaattttttttagttaagatattatagttttgtgatatattacttttcttttttaattcacatttattgttcttatttaattcaatattagggtaaaaaaagtgtacaccggctacattaaatgatactagatttctttttttaaaaaaatgatactaagattttttaatttgtctgaataatgcaatatggataactaatcaaacacaaaagattttataccaaaagaaaaaaaatactgagaaaattacagtaagaaactaaatgaacaaacacaaatataaaacctaaaacaaattactgtaacatacttcaaaaagaatatataattgttttaaagaaaatacaagaaataacttagttccattgatagtgtcgatcttcgtccaactagctgcaaccctggaaccggccatttttgagcccgaattgatacaaatcctccatcgtctgtggagaaagaacgcacatagtagatagcagattcaacaagagagagagaacgcacatagcagatctataaacagaaaaataaaaggaaatttgagaagagaaaaataaaatctaattgaaaaagaatcagaaaaagaagatgaagaagaagaagtggaggaagtgggtacttgaatattttcgaggtgaagatctcagcttcctgctccgttgaagccgtcgatcgtcgaagaccaagccgttgatgtacaatgttgacatctctatacaataaactgtaatcattttatgttttcaaaaaaaaaaatgtaatcattttaaattaaaata

SEQ ID NO: 164507 - DNA, 1409 bp, Cannabis sativa
tttttaaaaaaaataacaaattatccataattttcaagtattttatgaagaaataaaatacctacgttatgtagatgcaagcaaatattccccaaaatcaacaagaacacaaaaaattcaaattcaacaacgatatactctacttaagattcaaaagaaacccgagaaaaataaatcctcgcctaaacataattaccccgaaatttcacagcacaaaaacataattgaacaattaaaataccttcgagtttagaatacatcatatttaaactaactaatggagataaatagtaccattcgaaataaataaataaaataaaacagaatcgaagaagagaagccacaaaattatttagagggacaacgaaatctctgtataattaaaatatgaatactagtacgaaagatagacctgtagtttcctattcactccttagaatcctcataaccacacccgtaagaaaagccaatttatattgtatacacaggaacgaagaaaaaataagacgagtcagatacacaatttttctggaaccaaccctcacaagcagtgcccaaaattcatacctgtgagtaaagtaatgattgtttatcagcgcataaggtgatgaacccaagctcgacaacccaacgacctctgctaccaaccccgtatctatacgaattcctcttctccgataagtttgtggcagaagaaacccaatgaggtccacagagagatttgagtaactgaaagagatgttatagtagaagctaggctcctttgattgggctatgagaaaggaagatatgaaatttagaaggtaggttttctttggggggttttagtctgctagtgaagaaaccctaacaaaatgggtttgggcttatgtactgtgcttcgtaaaacaaatacaaaattggacttaggataaagcaaggctgcaagggctttttcaagaggaatttaccctcaatgtgagattttaacaaggctatttataaaaaaaaagagaaaattacactctatattctttttatattgtctttttttatttttaccttcttttttaaaatctattatttttacctttttttttcaatattgtaccaattttacccctgctacttcaagatactttccatatcactctcttctgtcagggtattttaggtacaatacatataaaaagatgtatgtttcaaataaatataaaatcaaaggtaaatttaattaattgattaataaaagtggtatttttcaacttaacccttataaaaatataggaaaagaaaataagttttaatatatatataacataaaaatttagggttgagatgtaaaatggccctaaatttggtaactaagttaataaatgtccacgttttaaaaaaattaagaaaatgaccaaatctaataaattagctaa

SEQ ID NO: 164508 - DNA, 1533 bp, Cannabis sativa
tttcaaaaaaaaaaaaatagtatgatttatacatatatatattaaaaaaaatctttttggaaagatgagacctactctactaatgttatgttgatggtttattcttatatatcttctaaaaaaatggttatttttatttagtatatatatgtaagaaaacccatgctaaaacaaagtaatttgaaaaatagaaataaaaaaaaatctatgctacaagaagaaaatgaaaattcatcaaaagatttggagaactaaaattattaatagaaattttatgatctaaaatccttcaaaatcactataaaaatccttcaaaatcactaaaaaaaaatccttcaaaatcactataaaaatccttcaaaatcactaaaaaaaaatccgtcaaaatttctaacattttttttttaaatggtagttttattaaagcaaatcagtagggacaagctccctactataactacgacctgagtataaatagacattcctagacaaaaagttgcccgccttattcgcagattgtttatcaaagaaaagagaaacactccttaaatcattgatcaaagaaacacaatcagcaactaataatccaaacggagaatacatagttactttgttttgaataacattgataagcacttgacaatcaaatccaccacaacttaaggaaagtcgatagttttaagccaacttagaacctctttgagccctatggcttcagccataacaggctcgacaacaacctggtgcgccacagctgaagcaaagatgacccgagcctcatgatctctggccaaccacccgtacccaaacctcttatcagtagcaaaaattgaagcatctacattgactttaattgtattcaaacgaggaggttcccagtgcggagaagtgatcacaccagtaggcaaatcactctcaaaagattgagatttcgcacttttccattgatcaaaatatgttaatgcagactgcacaacagcatttgcagccggttgtttattgttccaaactaactcattccttgctttccataatgcccagcagatgactgcaacactgcccaaaccagaagaagaaaaattgcttgccatactcaaaaaccagtcagcaaacaacgcaccaacataacccgagagagaagagttaaaatgttgccaacattgacgagaaaatgagcaatcaacaagcacatgctccacagtctcatcttttaaatggcagagatgacacaacaaaggaacatcaacttgcttcaccttcagactaatacgtgttgggaggttattgcggcaagcacgccaaaggaagacatagaattttattgctggaattttcatgttccatagcttcctccacagccctaaattatccccttcagaccatctaccattcaaaacttgaagcctcttataagcacttttgactaaataacgaccagaagcttcgaaaaaccagtattgagaatgaaattcgcgggacgaactgatcacaacccccctcacatgttctctgtcaacatcagaaaaaagatca

SEQ ID NO: 164509 - DNA, 593 bp, Cannabis sativa
gtatctgtcaaactacagaggtgatagccatgctttttctagtaagacaccaggttttctcccccacattaagccacagtatagagcatgtgcgccattgtacatgccttaatgatccaaaggccatttataagggcaattcaaaaggggaaggccctggagtgacacatattagatgttcgaacagtacgagctaacacctctatacactatttgagggaatggctacctaccaaatcgacagttggatttcttctagcaagattggctcaaaaagcacatgaaagaagaaattaaatataaatacctctacatttcatgagatagggacagcactagagtgtctaaaaaaacaattgtttactcacaaaaactcggctgaaattcctattgcgcttcttcttcatcatgaggtatgagaggaatgtaaagttcaagtccataatgtaactacatgaaatattcatcacctgctgatatggctaataaattagactcgtgaactaacgatagttaatgcttgaaccccttaaaaatccttatgtttattatttattattttacttcattcttaagctctaattattcgattt

SEQ ID NO: 164510 - DNA, 634 bp, Cannabis sativa
  modified_base (576)..(605): a, c, t, g, unknown or other
gtttaaggcgtctccgatttggtggcgcatgggttgtcgacgagccacaatcggatccaatggtggttcaaggctttaacatgggttgtgttcgcggcggcaaggaatcttcatacactattatttttctttttctttttgtaataatatttttcaccttagtagatatttgcagataaattttttcttaattatttgtatgtaatttatgttcatagactagtctttgaatatttattgtaataaataaattttttatattaaatattcagatttatataaattatatatgttatattattttgtttttataaattaaataatatgtataatatatttgtttttatgtttaatatatagtaatattttttatttaaaaattattatgtattgggctgacatttaaatatagtgcctatagactccttttaggcacgaatctttaggcacgacagaataggcacgacatgtggtgcctagaatttctttggcacgaaaaatgtaattttttggcacgaattttgtagtgtcaatagccttttttcttgtagtgtttgatgacttaggtttagttannnnnnnnnnnnnnnnnnnnnnnnnnnnnngattctggtcacaaaatactaaactcata

SEQ ID NO: 164511 - DNA, 1693 bp, Cannabis sativa
  modified_base (1645)..(1646): a, c, t, g, unknown or other
agatagaagccaaactttttgaaagattgccttctcaaccgattgaaaatccaagagcttatgcttgttctataatgttgaaaagtggcacaacttatgcaccaccaactccaccttcttcatccatccaatctcctcctacaccatcaccacaagaagatgagattaaacctcccaaggaagcaacaatgcataaattgcctctgcctagttatgttcctgttcctttattcccaagtagattgaggaacacatagaaagatgaaattggcaaagcaatccttgagacattttgcaaagttgtggtaagtctaccattacttgatgctattagacaagtacctcactatgaaatttttttaaaggaaatatgtatgagcaagcagaagttgaaaggggacaaaaaaataagtgtgggggagaatgtgtttgcaattctccaaaagaaacttcctcctaaatgtgaagatccaggaagctttatgatcccttgtactatgggagataagttggttgatcgatgtatgttagatttgggagcttcgataaatgtcatgccatattctatttatactttgctgaatcttgggccactaaaaaatatgggaatagtcattcaattggccgaccgatctaatgtttatcctcacggagtagtggaggatgttctcgttaaggtaaataacttgggtttcctggctaatttttgtgttctagacatggaagatgactctattccatgcactacaccggtgttattgggtagacatttatgagtacgtaagtataaaattggaagtcaagtccgagacattaacgatgaaatttgatggtgatcaaataaattctagtgtatttaaattttataatccaacatcaacaccaaaggtattgttaaagtcaagctaacaacattaaacaaagttaacttacatgagtttttcttatccttttctttttattttgcattgattttatttgattgagccttgaagacaatacttatattaagtgtgcgggggagatttattgtcgtgtctatcaagtttttttttacttagttgtttagttatttatttttttatctttttttttttttttagtttatattagttttttctttctttaattttagtgagcatgggttgagtgaaattttattgacaatgattgctcgggtttgatgtgtgtttactttgatgtcttatgcatggtcttttaaaaaatagttctattgatgataaaattcttgattatgtgatagttataattctaggaaaatgatagattctcatgatttgtgtgcttaagtcatgattaattactgctcaagcttgattttttttaaacttttgcacatcagttgaattatcatatttgttattgtttagaaagatgaatgcatgtttgacttttgattagaagtctcaacaactctagaacttgtttgataatcatttgaggcgaaattgataaattacagatgatcttgagatatgatataagaatttttttttttgattaattgagcctttcaagcctaccctattagtgaattacctagttttatccaatttgagcctaaatgtcgacatcttatttttcttttgaccctatgcaattattggattttatgccctaaatnnaactctatttcaatgtaatctatatcttttaaatatcaataaagaaa

SEQ ID NO: 164512 - DNA, 1134 bp, Cannabis sativa
ctctgaatccatcacatatcattaatgagtatgaggccattcctcacctgtaaagaacaacatgtatgaatcttagcaagaaaataaaaggtgttaaggaatcgagagatttccgtagtcaaggtcttgtggtagaaccacaaaaaaatagtaggctagttggtaattagagtcaaggatgtatatgaaatatcctcacaaagaaagattttaggacaaaatttctttgaatgggaagattgtgagaatcaatggaaaaacagcaaaagaaaaaaataaataatatatataatttatttggtgggacgcacaaatgactcttgttcctctcctttctttctcttgtcctcgacgtcctcttcttttcttttccttatcgacgatgcacaaccgaaccaccacaactaagcttagatctacaaccatttggactgccattttcgaaatgcaccggagctgcacgaccatcgaacagtggtaatctcacacctcatgtttggtggaaattagagctaagatgcactcatataggtggtgttaagttttgacgtcgaaactttgagtcgatagtgtgacaaactccagcgaccatttgatgaatggttggtaccgttggaatcaccgtcatgaggagaacatcacctactaagtcattttggtcaacttagaacttttctgtgataaaatttttggtgtcgacgctctttggaagcatttttcgaggggatcaatggttattttgatataacaagttgtatctatgatccactcatcagtgattgttaggaacttaacttgattattggacttgattgtatatgtgttgaatagcattagacacattcccatttttttatgatttataaatgctgaaagaaatttaaaacttaatctacatatttttatgaactgttctggggcactgagtgtcaaatatatttgtgtacaattatttatgcaggttatgatttttgagtttattcaaattataatcgttatgctattgtattttctaaaataaaaaaggaatatggcttttgttattcttatttacctgcttttagttatattgatcattactgatgagaatcatgtgatcatgatttgtgcaaattgttgtttcacgacctagtc

SEQ ID NO: 164513 - DNA, 1373 bp, Cannabis sativa
ttgcaacctaatccttccaaatcgactatcaactgtcatggtatgactcactcagagattcaaagaatacttgatgcttcaggtttccaaagaggtgaagtgcctttcacttatttagggattcctatcagccctaaaagattatcaccaaaggaatgttccagttttgttgaaaagatgactcatagaatcagagcttggagtactcgacacatttcatttgcgggcagagcagttcttgtgaactcagttttgttagcaattcatacctattggagccaggtcctgcttcttccaaagaaggtcattaaagagatagaaagtgtttgcaaagcctttttatggaaaggacaacatatgatgacaggagcagggcaaatagcttgggaaagtgtatgtcaatccaaaatagctggtggtattggttttaaaaaagttgctgaatggaacaaagtggcaatgttcaagtatgtttgggcaattgcaaccaaagaggacaacttgtgggttaaatggatacatagtgtatatatcaagggcaaggattggtggagctatgagatacctcaaactggaagctggtattggagaaagatagtagctctaaaaggtatgctactgaatttagttgatcctattaccttcactcaaacgaaatataaagtagttgatggctacaagtggctctgtcccacggtatctagggtcaattggagtaaggaagtttggaatcggttaaacactcccaaacacagttttgttttctggctcgctattcaaaataggttgaagaccagagatcgtttgctcagatttcaaattgcaactcatccctcttgtttgctctgttcggggaatacagaatcttgtgagcttctattttttcaatgccctttctctagtgaatgtctaaaacaggtcaaatgttggctgggattgaagactccagcaaccaatttaaatgagctggtgcgaatcatagagaagagaacaacctctgccttccgaagacaggtttttactgctgcctgtacagctttattataccatatttggagagcaaggaacacaaggctttggctatagacaaaggaagaaccgaagaccactgtacagatgactaaaaatgtttgtaaaactagaatacaaagtatatggcctaaggtttcaatgggggatacaacatggtttagtgaattgtaaccaatgtaatcaaatagaagaaaaaaaaccagaccttgttttataaaaggtgctaaataggatgtaaaaagtctattggagtaatgaaaaacactgctgatttcccaaaaaaaaattataaattttattttaaatatttaaataagttagatatttttgtagaaatttga

SEQ ID NO: 164514 - DNA, 2950 bp, Cannabis sativa
ttagtaatattagttttttaaattcaaaacaaaactagaccaattaaaagttgaaaccaaaataaactaatctacttcagaatggattagtttagttcaaaattgtggtttgtaattcgtaaaaaatttaatatttttattgaattatttttactttaaaggttataatatgtaaataacattaaaaataaatattcttaatgtaatattaaggtaattatcaatattatgcctaatattgttcttaaatattaatattcactaaaagaaatcataacaagtatgcatcaagagttaagcgaattagttttggtttaaatcacaagcgagaattttaaaattgtgatcgaactaacaaaaatataaataatctagattaaccaaactactggcaccagattcatttgatttagttctaaatagtttggtctaaattaattggagtttgataccacaaattaagagtatatgaaactaatgaataacatcacatttacatataaatctcacaacttgataaatcacaccttagacgaacttatatattataaaatatcattttttttcttaattttatgagatgagtaatttagaaaatataatagtcaacacattttttttttctttcatatttatagactcgtattacattcaatgaatgctataaaattcaaaataatattaccatttctttagtacactttgataaaaatgagactctaatagtaatagtttaataatactaagagttttattaaatttaatataaaatatatcataaatcaaattttataccataaatattttattttaatttacaacttttaactttttattttttcatcatttcttatatagtattaataaaaactaaatattttattaattttttaaagtaaatttagattaaaaattatattgactcttttttgcgtcaaattttacgccatttattagaaataatcttatcgttgttcttaagagttacattttattttatttttttttttaaaaaaaaaagaaaaataatgtatgcattaagaaaaataatgtatgcattcccatatttccatcaaattccctcatcctcatttgacttttatgaaaaaattatacaacttatctttaaagtctatggctatcttctttttttcttcttttttctgaaaggacctatggctatcttggaagatcataaatattatatgattattattttattaatagctcattttgtagtttttgtttattcatttttacttttttaagcaacaactcatttctttatttgaaagtgcaacaactcatttattaaatataaggcaaatcatattgatctccaatgtaaaaaaaattattccttcctaaaaggtttattctagttactcagaaatttggactagacttctaaatcacacctactctctagattggcgagaataaaaaaatgagtatagtaatcaataagagacatgcaataatttatagtaatttccccttatatcgcgataataatagaattacgtctattttgagttttaatttctcacaaaatggtaattacaacaagtgtttaagcatcaaaagcttcgaattctaaagagagaagttctgaccttatgggtagttttctgagtatgaaaaataagttaaatgagctctctttttataagtgagactcacaataataggagaaaaaatacaaataaagtattttccactgttagtaatgatctaacagtgaaaattaacttatggtagtgatggcttattcttagtgcctgacaggtcccgctgcaagttactcaaagcttattttcgtaactctctggtgaattttgatgatgatagcttcaaaattcgattggagtgtgagacatgacttgctatagagcttaaatagctttaaaactcaagtttaatcgtgtcaatcaaataataattgagtgagttatggtcgttttactgaaaacactttaggtcacaatacccaggttgacatttgatgtcaacttggacattgtataagtgtagaaatgtccaaggagagtcttttgagatgcctaagtgatggtttgacaccccttagtccttttatatgttttggtgaagttagtcaccagttcccggagatgttgttattctgcaaaaaaggaagactcaaaactttcaatttttgagtgagttaatttgccaaaaaatgaagttgtaaatttgattgatctgacttcatggatcattgcacttatgaaaaacttgatggacggtcgaaacaacatcaaatttggataagcataatccaacgaatcaggccatttattgacccgggcactggggcctttaaatcgagcttcgagattctatttttgatatttctaaggcttctaaacttgaagacgatgtttcttcccccattttttatcataccaaattcaatggttgcatcagatttgatgtttgagaaattgaaggcaatgtcccaaatagattgtcaacttaggcattgggcccagcactaggtcaacccgggcgttgtgccctatttccaaggactcgagtttatagttttctccctgagtttacttgaatcttcgttattttttatgacggtgaagatgtctagagcactttttgttgaactgaattggaaacatcctaggttgacaaaatgtcgacctcagcgcagggcccagtcccacgcgtcaacctgggcactaggtccctcttctaccccttttgaagttctattttgtcccaaaaaatagctaattgtcaatatttttcgaagacaaagatgatgcttaaaagaatttcgggaaaactccatttttgtggcctaggttagcaaattgtcaacccgggcgcaaggccagcccaagtgtcaacctgggcgctaagccttattttttatgccttagaactattatttttcctctagaaggacctattt

SEQ ID NO: 164515 - DNA, 853 bp, Cannabis sativa
aaaacttgtagaatagaattcagcagctctctttaaatatgtatgggcattggcaaacaaagaagacaacctctgggttaaatggatacacactgtgtatctcaaagaagaagagtggtgggagtactaagttcttagccatggaagttggtactggaagcaaattgtggcagcaaaggataaagtcaaaacacttactactgcacagcaattcactcaaaccaggtatcgaatttttgatggttataatttgctttgtccaatccaaaacagggtacattggtgcaatgaagtttgggggagattcaatatccccaagcacagctttatattgtggttagccatctaaaataggctcaagactaaggatcgactacagaggttccaaattgtcacagatactctctgcagcctgtgtttgcagcaagatgagtcaaatgagcatctgtttttcaggtgttcttactcacggttttgtgtggaaaaaattaaagagtggctctcatggaaggctcgggctattgatctacatcaactgctcaagaggattcacaaaagtaaaatcagtaagtttaaaaagagggtgttggctactgccattgcccacttggtgtacatgatatgtttgtaagacatgatcaattgtggaacaagcacatagaaaataaagatgtaattgtacaaagaattaaaaatagtgtcaagcatagagtagaactggtttggccaagaaagattggtcaagaagatagagattggttccaaaagttgtaaaagttgtacatgaggtctttttgataaaaagatgctctctcattgtaatagaatgtgataaagaagtaattagaagggt

SEQ ID NO: 164516 - DNA, 1672 bp, Cannabis sativa
caatatatttcaataaagaaatcatattaattttaattgagagttttacacatatgtatatgtatgtgttttgagtacttaacatactctttagttcttaacaatttaagagaataaaaaataagtatcgagataaaatatcaaattaaaatctactaaatttatatactttagttttttgtaggcatatttatttttaaggtgatgtagagtttattttattttaaatatttttatgctttgttttaattttcattttgattcataacacaatattttgatgcctaactaatttttatattaacttggagttgttatctgatttttttattgttgttattttattgtttagacaggagaaaaattagtatatgtttaatttcttatgggtacatataattttgagttagtgtataagtattttatgattagttttaaatttttttaaatgttgcgtcaacacctatttaatttgtatattaaaatagagttgttatacaattgtttgtttgttgttatttagttgtacaaatagttaaaaaataaaaatatgtttagtcttttaaaggtacatgtttgcttttcaaaaaaaaaaaaagtacatgtttgaagatcttttgtgcgttgtgtacgtttctttaagattattatcgataatatttattgatgtccacttgatttgcatatttaagtaatgtagttgtatagttatatttttgttattttttagttgtccaaaaaaatcaaaaagcaaattatttatacatatatataattttatcaaaataataataattgaaattatactaaagtaatttattttacataaatcaggttatatatagttacttttgttgcaatgagataatttgtgtgtttctttcaggttgttttttttttaaagtctaattgaactatatttaagtaatattattatgtggttgcttgttagttgttattgattgttaaaccaataaaaaaatgagtatatgtttatttttcttttatgtgtgtatttatatatttgagttgatatatagaagtgttttgtaattttttttattattattattacttatgtgttatttttcagtttcttctgagttaacgaaatatgttgatgtctaactaattttttaaattagagtggattattctctagttgtttatttgttattatttagttgttcaattaagaaaaaaataaatatatttaatatttcatgggcatatttattaagattatttttatgttgattttataacaataaagtctcatgtttgttacaaaactagtatgttcttagtcaggaatatgtattttaatctagttatatctagaatatgcatccataaaagtcatcagctcgtgtcctgttgttgcatccactaactggtcgatcctggtagtgggaaacaacctttaagacacgccttattcaagtctaaaaaatcgatacaagtccttcaagtaccgtttggttttggtacaagaactgggtttgagatccacaagggatagaaggcctcgtgtatgatgtcatcagtcaacaacttgtcaacctcttctttaagtgcctcttatctctcagagtctaatggtcgtcatttctgtctttttgttggatagctggggtcgatgtttaaatgatgacaaattacattaggattt

SEQ ID NO: 164517 - DNA, 2077 bp, Cannabis sativa
  modified_base (568)..(577): a, c, t, g, unknown or other
  modified_base (1141)..(1142): a, c, t, g, unknown or other
tctctctctctctcctcacacatctatgatttagccataagtagttacttgttactagttacataatgtaactaactagtttctcacaactatttaatatttatatattactctaatttttgttttagtctagatcatgttattatattactcatttcaaatattgacatgataactagtaacttactgtaaatagttactagttatataagttataattacctaactagtaactaattatttgtgttatgcgtaacacttgttttttttaatatttatgcatttctagtcaaatttatcctaattcaaccaaaattccagcaacatgatagttgtaattggacgttctcaaaaattttaaacatgtcaaaaataagaaataatacaaaacaaacaaaataacattaacaatacattaattatctactcatccaaccgcagtacatgtattctcaaaacttacttcactatagttgaatatttaagatattcaaattcaactaacatgcatatccttctacccatctgccagtagtacaatacatcacagaacctacttcactacggnnnnnnnnnnaagatattcaaactccactaagcattgataattaattaacaacaaaaattagtgaatatatatgcctgtagctagctaaaaattgatcaacaccaaattattcagaaccttgaaaaattagctcacaacctacaatataatgaaatacaacaaaattaaaattttaattatttaactacttactagttatatcatttatgagtaactagttagtaaattagtgactagttaataataaaaatatatgaatattaataaaaaatataattaataaaatatttaatttcacataatgaaaaaaatttaaattcaataggtaaataaaaaataaatataagatctattttttctcatatatatttaaaaaaatttacatatacatatataataattatatctcacactaaaacttaattctacaagctaattaaaactctcctatcttattctcattcacaatatttaaaaaatgattagtttaaaatattcaatatatacatatacaatacttagaatgtatatataaataattacaatatttttataaatacaatacaactacannacatatatacacacaatacatattcaataaaatacaaaatacatacatatatactattaaggtttaaatttttaccttattatcgcaatttgatgacaattatcgacaaaaatccagctaccatgcacaactacaataacataatcttaataatatagaaaaaccctcaaaaaaatttacaaaattgaaaataaagcaatgtacatttttttttatgagaggaggctcaaaagagccaccacacgaacacgaaagcttagaactagtaaacagacaaaccagaaaacataactggacctggccttaattctaaaacggacgccaatactgctaaggtaaaataacacaaaagctacagaaaaacagaatagccatccacttatcccctaggcaggaaactgtcaaaattggccacttcaatattctcgaattgagaagatcgaattgtccattgagccacatcgtgggccacacaattaagctttctcgggatccacctggtctcccaaaggtgtaatttctctgcaagagtatgaaagttggcaacaagctcttgaatgttatggtttaacatgtgtatatcccacttcttgcaagagattgctgagattgcacctgcagaatcgcattgcagaataatatttttatggccaaggataattgcgttcttagctccccaataaagggaagctatttcaccaactaacgggtctttgtaatggagtttggtggtgtgaacacttaagaattcctctgcagaattcctaaatacagcagcaccaatagtgcaatggtgaccaatcacaacatctgtgttacacatacaccatctctccggtggaggaacccatttatctgatataatagtcggcccagcgcttgtcacctgagtctccatggattcccacagtgggtgttaatctggtgcaacagaa

SEQ ID NO: 164518 - DNA, 558 bp, Cannabis sativa
agagagagagagattagatttagagatttaaatattgtttttgtggttttatatttcaaagctatacattaaaggcttttgtattagttagttgtttagatagataacagtcggtgttgaaagaaattaaaataaaaataagtagttgggtgagttggccttataagatgcatatacattaaatgggtccattccttttttatttatttattttttttttctcatttgtcattttcagcattaaaatcttctataacaaataacaattacctaccatatttttattaattgttttactcatatatttttaagaataaagccaagactggatgaagctgttagctgcatgttatgcatgtgtgttaatttggtggattttattaattgaggaggaaaaaatccatgctacatactaaaaaagattcttctctattttttattttatttattaagttcgtcgtcttcttttccatctttttatcttttgtttttttttttccaactaaataagccaaaattatatatattaaaatccaagcaaaaataaaagagtaacta

SEQ ID NO: 164519 - DNA, 1613 bp, Cannabis sativa
gcttttcaacctgcccatcgcctcgtgaggacgttaactcaatttgttctcctgcgtgatcagataatactttttcctttggattactcttgttgatttctttacactttttcatgtcaccagaagtagaatatgaatgggacagaattggaagctttaaagtattagaaacaagctcctcataatttaatgcatcgggatctggttctttccttggcatatctcgaattcgaggaactttatcatttacactttttgattctgctgaataatcattcatgtccactgattttactttcttttccccaaacaacttcccaccactcttcaagctgtctgatccagttattaagccagagccttccacaacaccctttggatgaggtacaaacctactgtgtttagaaagtttttccttttctatcaagccagtcagatcatcacgaagtggtgacaaaagtaaacctccgttaactggaaaggatgtcatgatctggtccacatcataaaagaaacacctaatgatcaccttaagccacattatgaacaagaagggtacatagataatatttaagatgattcacctgcaatatgctagttggagaatcaaaggaagcatctggccgctcatgagatattccctcactttcagaggggctgtcatccaatgaggaagatggcgaatcatcaagcccaagcccactgtagattgctgcattttttcgtgtggacagattatcagaacccacttttattctgaccttcagagttttctggtctgatgcacttgtcggtttcttgtttttagaatctaatctaggtgctatttcttctgcacgggttgctggcatgcctacatgttgctttcctgactcagttattgatgatgccttaaacacatggaaagaagtggaactggtagaagtcggcccaagtccaccagactgagaaactacagagttgcaatgcccaccctaataggagacatggttaacttaagtaaataaacatttcacaaaaattatggtgaaattgtaatccttgatagatagcagcacatcattacagaaagaaagcaaaacgtatagcaaaagagttagtacctccacatggaaattgtttggagatcttgaagtgctatagctatgaacttttggtggagttctgtgagataaagcaggagatcgctgatacattggtaaaaaagaaccgtacccaccatattttgaccctattgcaattagtgaattattaagtgattagttagagggttttaaacaaattctgataatacattggagaataaatattatagttcagctattttttgacttacccagatcttctgcagagcacattccatcttcaaagtcttttttaaaatgccccaaaacatcttggagtttttcatcctaatacaataaacaatagcttataatataaaaatgtatgcttgtgaaaagacagcaacaaaagcagctgtgaggagaatgtatatagtctaggacactttcttttacagcaggaaaaaccattcataaccaagagcagcaacacttcaagattaactagaattcatgttattaccctcaaccacaaaaaaaaaaaaaaaa

SEQ ID NO: 164520 - DNA, 865 bp, Cannabis sativa
ctcatctcaagtcgattgctaacttgggactactcaactctaatattttttttcttgtcacgtgttaaacattaatgtccacgttatcacgattagtttcatgtaaacacactatatctatatggtgttggcctgttgggcaccttaaggtacttaagcacatctccggcattatttaagggtatgaaaaacctcacttcacctaaaaatatacatatctaaaaattattacattaataaaattttataatagttattatattaaattataaaaactgatatttaattataccaataataatataatacatttagtggtgctagattgataccttttagtacttttccttcgataaaaattgtttgataactcattaccaaaatatatatttttttttaataaaaacgtttatagattaaaggaagttagatcttatgatcattacaaaaagataacattcgagattgtagaaacctcatagtcattaccaaaataaattagtttttatttttaatttttaaacaatcattaccttgaaaattacataagcattacctaacactattataagggtggcagttcatggtcaggttaaaatagcacaaaataagcagatttggtttactataaataggtactgagttaaaataattttaaatctgactaaatatggataaaatcaagtcaatttaaaatagatatgttagctttagggatgggccttcattgggttaagcatttgggtttttctattgctagggctgaatgtgatacttcaattcttggggtttattgaaaaatacttattttatttatcaattaatcaaatctacctctaattttatatttaattgaaacatatct

SEQ ID NO: 164521 - DNA, 672 bp, Cannabis sativa
attaaaccgtttgtttgatgtggcgcatttatctttttggctttttaagggaaattttaatgattactttggtttgaatgatagaaacagtagtaacaatcttcctacttatgatatgcataatttttaatcttttattaataagtttaatctttcccctagatttagttggaaacacggtagtatattagaaaggcttgattggggtattgtttataataattggctaaatcttttacctaatttttctttgaaatacttctctttctttggatcggatcataagactttacagattactcttaatgattcttataatataaatccttccaagaataaattttatatttgagaatcactggtgaaccaaccctaatttttatagtattatcaaaaataatttgctaggtgggtcaaacaatagcaatagcattccccttgctcattttcttactgctcaatcctttgtgtttgtgaaatttgggactgagattgtaataagaataattttaagcaaattattaatcatcttcaaaatgatttagatagtctttactcttctactaatatttataataatgacattcataaggatagacatattcaatcctctttagatgttgttttgtataaagaagaagtttattggaagcaatattctagagccacttg

SEQ ID NO: 164522 - DNA, 1122 bp, Cannabis sativa
tttttttttttttttgtgaaaatactaaatgttttttttggttgtgaattaatatatagattaaacttgggatattactgacttttcaaaaaaaaaaaaaaagactttgggatatttcacatcaaaacattacgaactggaatcatgagtgttctatcaattaatatgtttgcgctactcaaacattaattctattaatagtacgaaactacctacaccaattatccttcacttcttactttggttgtgcctattaattgatgagtaaaacctacctagctaagagttatttaattaagagacgtaggtcgacgtatatataaatattatccattttcagaacacatgcatcatcatccattacttgtacattttttatatagaaaaatatatatggacgtaatatctattttggcatatatgtttctcctacttttttccacaaaatattcatattcttgccaaacactcaattgaatgaggacccctataaatacatattaagataatgaagtccacgtacagttttactttgtgcggtccaatcaaattagttgtaatttttttaggggaaaattattagtcttgtataattattataactaggataaaaaataaaaacaaattttaagtattaagtttttgaccactaatttgtagtcgccatcttgagtatatggataagttacaaattcagttgtacgctatttagtgattaacagagtttcatgataattgaaaacgaagaaaacgatacaaatatataaaaaaacaattacttattatatcattatatttttaaaatgtaaatctatatttgaaaagaaataaataacaaagtgatgagtagatcgaccaatatacagatccacgtatatttattgcatctcacaataatgctaattatcatcataaatgcccttaacatttctcaaatataaaaggtaataaaagtaaaaagaaaaagtttgcttcgtggtatatatgcacatatttggtaaatatagccagctctttcaaatttaaaatgaccacatatgaccttaaagagtctaattttccaaataaataaagggaaaaaaacagaaaaatacgaaaaaggaaaaaaaattacaaaaatac

SEQ ID NO: 164523 - DNA, 838 bp, Cannabis sativa
ataaaattctctaatagattctaaatttctccacacacacacacagaatttacaagaaaaatattgaatagtagtacaatctaaggtacgttgtgctggaatgaaggaaaatataggaatagtaatgaaaataggaataggaatagggatggaattaaatttaatatgcacacaaaaatagaaaaaaaaaaaaactattattgcatcggaatggtctttccaccccttttgaaatggaataatcattccacaaaaatggtggaaaggtcattccattggaataacattccaacacttttaaaatccaaccaaacaaaggagtggaatgaaaattgattcttttccattccattaccccaaccaaatgcaccctaacaaaatggaaatgttagggttctttcttcgatctttaaagagaatcctgctttgctgtaattgaattgggttggggttggggtttgtgtagtctggtaggtttccctgcttttcctttaaattttgcctaactcgatctaaccctatcataatattttatttagtagtaatattcttcttgccagaacatgtgtgtgtgtgtgtgtgtgtgtgtggaaacaatccaacttagcagatcatacaatgtaacaaaagcaaagaaacttcagggtttcagatatttttactgtctagggtttgttctgtaagtgttatgagcgttttctatgctttaatttattttatctattatgtaaccacggttttcctctgccataagtgagggtccctattaaacttgtgagagggtagtctaagacatgtgacccttgtctcttttccaatacaaaaaaaaaaaaaaaaa

SEQ ID NO: 164524 - DNA, 544 bp, Cannabis sativa
tggaggacttagggcagcctgataggtgaccgttacaattagtacagccacaactagcagtaaatttcttctttcttctgttaagtaacaagctctaaagtaatcactaaagccattcaaaattcttggaaatactttccatcggttttgaagtaaattcttgacttgtctgttgtttacatgaatttggccatttgcaatatctaatgctgttaatccgtttctgttcttagcatttatctttattccgtagaaataggaaaatactattttaagtacctgcagaaaaatcacaaaattgatcaatgttatatttattattacacatttctataatttttaatgtatgtaaaattttttacacatttgtaaacaaaaaaatccttatttgttttgaatactttaaaatatcctaaacatgcgaataatattattatagaacatgagatatatttctaaaaaaaactttattagtctaaaattttctagcaatatagaaaattatatggataaattaattccttgtactaaaggatttagttta

SEQ ID NO: 164525 - DNA, 769 bp, Cannabis sativa
gagagagagagagagagataaaataatgtaataaaaggatgagaaaagaaattatatgtgataaaatagagaaacaatattaacaaaaaaatcaattatttaaaaaaaaaaatagaaaacaacatttgttattcttaaaatttttgtttcttgtaactttgtcttaataaaaattattttgtttactgagatttttagaaactaataaaatgttagcttaagaaataaccaagtgcagtaataaagaagacaagagtttttatgtggttcgagggttaataaactctagtccacgagtgagtattattggccttaagaggcttgtataatgtgtttacaatagtgtttgcaagaaaccctaactctgctctcttggtttcacttgaagaagcagaaagcttaaaggaattttagcagagcttcggctatcttgtttctgacgttctcttcgtatggaaatagaagggtatttataagctaagaggcaggtatggacatgcccatgacccgcctaggacttttgcaataagcttgctagtggggtaaaatacatgcaataatctgactgttgggccccctagaaggttttgtgctcgtgcgttgaagcaactagagaataaaggaccacaattcatacagggtatgtgttgccaaaaggtttaaccttaaaaagtaaatgctttgaataaccgcttggaaaaaaagtgtatggggtgtgcgcactattgggaatattttaccaggattcagatttactaacaagtatgtt

SEQ ID NO: 164526 - DNA, 783 bp, Cannabis sativa
cagaagtgtctgtcgtcttcccttctccctccctcctttgacatatgttacacaggtaaattttatataatatatctgattatttaaatttgtttttataaaaaatttcttctattttatttgttcgacaaggttattttcgtgatcaccatgaagatcgtcaaagtctgattataaaacattttgttacaaatttgtccgtattatttcatctttaacttcagagagacatcgccattagagtatccaaagagtagtgtgccggcaaagcctgtcggtggcctgtagtgattgcggtaacgttgaaagctgattggagtgatgtccgcttttcacacattgtccctttatttcgtttagtaatttattaaaattaatttttcagcaaaaattttattagtattaattttattttatttatgccaattattcttattttactatttatgttaatattagtcaactattattttatagttttaaaaatataattaatatttacattttattataactttttaaagtataatttaatatattaattttacagttattgtatttttttggaatgtttttatagttttcttttgaatagaatgtatgattttattagcattgaatgttggtatttatagtttttattattttatttaattatatatgagttactttatattaggggtgcacacgggtcgggttttcggacattcggggtttcgggttcgggtattcgggtttcgggtatgggaaatgtacaaacgaacccggtgttcgggtgtacgg

SEQ ID NO: 164527 - DNA, 927 bp, Cannabis sativa
aacaatcattgatgagatcactttctaaattaaatacatataataatttacttataattgattaattaattaaatgtaatagggtgacgttcatgccgccggctacttctatttcttccaaccaaaccctttctcatcaagaaaacggctcctcattctatggcaattatggatatgactacctctaccttataaatcccaacaaaatcatcacattgttataacaacacaaccaaacattcattcctttcttcactaattctcatttcacaaaccaacatcaaatatgtcttttgtcaattacatattattattaccaataattattgtggtggcattttcatcaagtggttttgtggtgttgggggaggaaatacctttaaatagcccagcagtgctattaagggtagaccaatcaggaaaaggtgacttcaccaagatacaagatgctatcaatgcagttccatccaataataatgagcttgtgtttattttggttaagccaggaatttacaaagagaaaattgttgtaccagctgacaagccttacataacaattagtggtaccaaaccttctctcactattatcacttggaatgatggtggtgacatatttgactctccaactttctctgttttggcttctgatttcgttgcacgttttcttaccattgaggtataaatattatatagtagtaattaatgtaaaattatatgaaaaaagaagtaattgattgtgtacttattattattacagaacacatttgggtcaagtggtaaagctgtggcgttgagagtatcaggtgataaagcagccttctatggttgtagaatcgtttcatttcaagatactttacttgatgatactggtagacattattacagcaactgttatattgaaggagccactgatttcatttgtggcaa

SEQ ID NO: 164528 - DNA, 1372 bp, Cannabis sativa
tttgagccacaaaagcttagccttgtgctacaaaaaagacaagtaagctgcttgtagagatgcatactgaccccgagcctcagcctcctatatttgcaaagactcatcaaaaggatcctggtacaatgcactttgacattcatctcgcttgatctttgctatatctgttgcagtaggcagatcagcaaaatgttatgaatttagctgttgtaaaatagcttttagccctttcagctttgttatgatttggaatattatgataaaaagttgaattggtatccccatctttgagccacaaaagcttagccttctgctacaaaaaagacaagttgcctgtagagatgcatactgaccccaagccttagcctcctgtatctgcaaagactcatcaaagggatcctggtacaatgcactttgacattcatctcccttgatctttgctctatctgttgcagtaggtagatcagcaaaatgctatgaattgagctgtttgaaaatagcttttacccctttcagctttgttatgacttggaacatctttgtgcctttctcttcttgttgtcatctctctaaaaccatgttcatatagttaggatgagaagaccgcatcctaaaataacaaaatggtttttttcctcctggtaatgcctcatgaatagttatcacagctggggaatgatcaaatagtccctcattttgaaaaaacacttcagcagctgggtgattattcagccaagcaagattagcaagaaccctatctaacttggaatatattctctcatctccctgctatttattgcaccaagtatagaaattgccaacaaacttaacatcttcaaagctgcagtcctccacacactctcgaaatgcagtagaacttgtaaatctgaccctgctcccaattcgttcatccttggcaagaatgtcattaaagtcactaagaaccatccatgcatttccattattaaggtcccttaaatccctccataaatcctttctcccatcctcatcattgaaaccataaacaaaagtcacaaagaactttgtttttttatctatggtctcaataaagaggtgaatcatttggctagtacactttacaatattgacaataaaggagttaagattccaactaacaataatcctaccacctttatgccaagcactattagtagtgaaataccatccattgaacatccttacatataaggctcccaagttccgagccttaactcttgtctcgaggagaccaacaagccctattttttgattgctaattaattgcttgactaggttttactttttttggttgtttttccctcggacattataacttaaaattttacccatgatttagagagggaaatccccc

SEQ ID NO: 164529 - DNA, 2734 bp, Cannabis sativa
taccagttgtttaaggttttcaaatcctttgtaaaactcaagaatctgcttcataatcatagtggtttggttttgcattgctttattaaaaaccttattaaatcttgagtccaaagctggatactcaaaggcattcattccatggaatctgttaaatggtatccctccttcaagtattgcacctttaagttgtgacctgaaattattgtttcagggttagaatagtttatggaactaaaataacataagaaaaacaagtcaaattaaaaaaattgcaaactatactataccaactatccgagaagaccttatcttctaacaacaacatcaaggggcctaaagaaacaccatcttcattagtgacaaagcatttggagacattattaagactgtaagccctttgatcatcggccactacagagcatacgagcacagagtagctggccagcatcctaaggatgcggtccaccatcatgggcgcatcggggttgttggttggcaactgcgccactatctcccgcgcagagagcttagctccttccccggctttcgctatgatatcgaagattcctagctcaattgtggtttgcaaggacttggttaacacatttgtgttcaacaactgagcagcataacagaagctttcttcttcttgttttcttttaagatcaactactacttctgtggtgccttccaattcagaacccatcacaattttgttgtatttggaagaaaagtaaattaaggtttggaaatttagagtaacgttgtttgtgacctctttcaatgaattttgggtggtttatatagccactgctgaatgattatcgatttaaaaccagaaattaaaagttgatttcacctaatatacgcgtgtattttgttgacaattcaaattcataactaaaaaaaaaacatttaacatgataaaatatttgcacaaattttcagctttacgtaaagtagggcattatttatattagcatgatagcatcattggtagtagataacagaaatactctgttttacctaaacataattattcaatatagaattttcccgtacaccatacaccaacaaccaaccactgtttacattaaaaataattataatatatactaacctgcaaacaaacactatataaatatattttgaaaaaaaaaaaaaaaaaaaattcataacaaggcttattttttagttgtttttaagtgatttttaattttttttcgttgaacaattattttatagttattttttattcatgtgtattttttattgtgtatatttttagtttattcttgataattttttgtttgttgaatcagttgctttgtagatgtagatacatatatttaatttattttcttgcttttttaaatacaatgataagttttttttgtttttttattggcacaatatgcagatgttgacatattaattatatattaggcattatattataggaaaattctataatgcaacccttaaaatgatgcattgatacatctcttctataatgcactcccttaaaagagatacattgatacatctccatatattttagtgtccgaaataattttttactcaatttttttctcgtagccatgtaaattatagttatttaagatatcctgcaaaaatttaagaaattcgaaaaagtttaatacgtcgaaaatcgtgttcaaacagtgtgttgcatgcgtgaatattttattttatttgcgtgtgaaatagattatttgaacattgttttccatattctaaattattccgaatttctcaaaattttataggatatcttaaatagttataacgcacacatgaatatgaaaaaaaatagattaaaaaattcttctggatgccgaaacaagtagagggtgcatcagtagatcccttttaaagaggtgcattgtagaatcaccctatattatataccctattttgaaatctgaagatttaatatttttattattaatgtaattatttatttagcttttaaaaataaattgtcattttaattgttattaatttttttttaaaagaaaaaaaaaggaagagagagagagagaaaaagaagttaaaagtatgacattgtaacaataaattttatgaaaaaaagataatgtaataataccaacaacaaaaaaaaaattactaaaactaagtaaaaaataataataatttcgtaatacaaaaatatgttgaggagctgatattgttttacatattgcatggtcaatgttttattatttttttgttgttctgtagttgtttttatattgttttatagttgtttttcattttgtttgttaagttcctctagagttattttttttaatttttttagttgttttaatttttaaactttagcaaaatattttttaaaatatagtacagtaaaaatataaatatatatatatgagtaaaaatgtaaaaataataataataaaaaaaaaaagatgactatttttgtaagatttccgatttaaattgctttgaataaaatggttttttttttgttcagagtttcttgtgcccaatgtaggcccaaaatgaacacggtttctatttgagaggtaaatgggcttatccgtttaaagtccagcgggtaagttgaaaaataccacttgtatgaattaattgatcaaattgacctctaattttatatttaattgaaacatacctctttttatatgtattgtactcaaaataccctgacataagagagtcacat

SEQ ID NO: 164530 - DNA, 5156 bp, Cannabis sativa
tcctggtaaaataacttccaaaaataactcggtcaccacctacttcacccagttgcaagctctctgggatgaactcaacgagtaccaaccaaacatcccctgcacttgtggctgtacttgcggtgcgatgcaaaaagttcaagattattacacaagagaccaaatacttcagttcttgattggcctcaatgagtcttactagggtatttgggctcagattatactctatgatccactcctcttgctgtccaaggtgttctccatggttgttcaacaagagcgccaacactgtcttggaaatactggcattgttgctgctgcttcggccaaacaaaatcccaaccaaccttcccggagcaagaaacctcgaccaacttgttctaactgccttaaactgggtcaccttgttgataaatgctagttcctccacggttttcctcccggatatggagacaagaaaaagaccaccaccactactcgggtaaatattgcctcggtgactcctactccagacccctccgcggctggctcttcccaacttcagctcagtcaatagttgatatccctcctcaatcaacaaatccaaggcgctccttccaccagtgaaaatctcccagtggtttctaacgtcttcggtaatgacaatttttcccttttttcatggattatagatagtggcgttactcatcacagatgtcactctctttattgctttacatctttaaataaaaacaatattgcttacttggttacgttgcctaatggccctcagattcacattaacaaatttggaactgctaaagtatctgaccaacttgtcttaacggatgtcttgtatgtcaccatcttcattgctttattttctgttaacgcttatcttgaacattgtgtcaataaactcactttcacgtttgatcaatgtttgattcaggatccctccctgacttctacgattgggacaactaagaaagttggacaactatttttctttgaacaggaccatcattttctcactaccgatatttctgtttttgcaaacaatacacgtgatttaaaggacccctggcattttcaccttggtcatccttctatgaacatttctactatcttaaataatcgattgcaattttgtgaaaaacctttcaattttatgtgttctatatgtcattttgccaaacaaaagcgacttccttttacatctaacaataattttgccacttctgcttttgatttaatacatcttgatatatggggtccttttcacgttactagtattaaaggttatcgatatttcttaactattgttgatgatttttctcgctatacttgggtatacatgctcacttctaaatctgatgtttctttcattattcctcaattttttttctcttattgccactcaattttcagtcaacattaaagctgttcgttgtgacaatgctaaagagctaaatttaacaaccttctacgctaccaagggaatttcaaccaataattcttgtgttggccgtcctcaacaaaattttgtcgttgagcgaaaacatcaacacatattaaatgttggtagagccttattatttcaatctcatttatccttaccttattggggtcatgttattaataatgttgtttaccttataaatcgtactgcatctaaactacttaacaaaaaaacttcatttgagatactttataacaaagctcccaactatgatcacttcaaagtctttggttgtcttagttttgtttcgacattggaaaccaaacgacacatgttctcccctagatcttgcccttatatcttcataggttatctccctagacaatcacatactcccactgaggacacctctcctgttcccaactctgatgacacttcatcttctcaaagtgtgcctgtcaccaacactactcttgatgaagttccatccacacccaggaacatcccaactacttctcctatcacttcaaaatggaaagaattttatccaaacctaaacgtatttctgattacatttgcaataccactgctgcttcttctactgctcaccctattaataaatatttgtcttataataggttaacgcagcactttcgagcagcggcttttgctgcccattccttttttgaacctaccagctacaaaatggcagcaaaagatcccatatggcaaaaagccatggatactgatactgatgctcttgaagccaatgacacttggattgttgtcactcttcctgatggccaccaggccattggctgcaaattggtatacaaaatcaaatacaatgttgatggctcagtttatcgctgtaaagcacgattggttgccaaaggtttcaaccaaaaataaggtattgattattttcacacctttgccactgttgcaaagttaaataccctaaaacttatgcttgccattgcggccattaataattggtctctgtaccaacttgatattgacaatgtctctcttcatggagatttaaatgaaactgtctatatgacactcccgaaagggtataaacccaagagataaattcccccaaatgttgtttgtaagttaaccaaaagtctttatggcttgaaacaagcctctagataatggtacacaaaactcagcaattatcttctatccactagtttcactcaatctctctcagaccacaccttgctcataaaaaatgataaaggaatttttctcgcccaatgaatatatgttgatgacattgtgattacctgtaataatgatgctgctgttacatcttttaaacagtaacttaactctgtgtttcagcttaaagacctgggtcctttacgctttttcttaggattggaaattgatcgttcttcctctgggatatcggtctcttaacgactattcaacttgaaacttttgactgacataggttatttaggagctttcgctgctcccaccccaatgaaacccaacattcggctctcatccgatgttggaaaactataagaaaatccaaaaatctaccgcaacctcatttgtaaactcctttacttaaccattatacaacgtgatatctcttttaccgtaaataaactaagtcaatttctatccaatccaagggctccccacctcactggctcactgctgctcatagaatactacaatatcttaagggcacctctgggcaagggctatctttttactcagtatcttccactaacttatctgcttatgctgaaaatgatatgtcaaacgtagactttcatctcaaaattttttcagatgttgattaggcttcttgcagtgacactaaaaggtccgtttcgagctactgtgtcttccttggcagatcattaatctcttggaaatccaaaaagcaatccaccgtttcttgttcttctgctgaagaagaataccgggctatggttcatgccacttgtgagatcacctggctgttggcatccatcactaagatcccgctatcttttactgtgacaacactaccgccatccacatctttgaaaaccccgtattccacgaatgcaccaagcacatcgagattgactgccatgttgtccgagagaagattcaagaggcacactaaagctaattcatgtcaccaccaaaaacaacattactgacattcttaccaaccctcttttcccagtatattttcacactattgtaaccaagatgaacttaaaaaatatatatttcatcttgagaggggggtattagaattagctggcccactttatttttggcccatttgtttcatgggcttccttctctttctccctacatatacttctctttgtaatagcctaatttacttttgacatttctgctgtgtgaacatagcagtaaaataaaagagcttttatctctatcatattgttattaggattgttatatacattcaatattaatgttttatatgcatcaaaaaattatttatatatatgggcatgctcttaatgggtattacatatgaatggttattatattattagtcattggatcaaatctaatggttgatatttatcactgttaattaaatttttaaattaaatagtttttattttaacatattacctgatgacatggaagtcattttttatatccattctttctatttttttcctcattccatatatatattaatacattgataccttacaatttaattatggtaatttaaaaacttcaataaccgttaattacacctttaaacctcactacaacaaatatttccattttaaaatatattgttgacctcgcttttaaccaacgacaacgagtctgatttagtgagcgataagtgatttatagcaatcgatatataataaagtaatataaagacacaagaattttatagaggttcagccccgagaagttcggtaatagcctaatcctcgttacttgtattaacttaagaacaaggagaaaggttccttttcttatagctcttacaacagaatctctgaatatgtattcttagataatttccttagggtatagtctcgactaaactgtttgcgacctttctcccagtgaacatgcatcactatttatagggctatatgcttggagaggaagtctttcccctcttgttacaatggatataaatagaaagatcgtgggattgatgcagaatacactgatcgtgggatcgtgtgtatgccatatccctgtaatctgatccccaaggtataggggatttcgttgatgactcataatgcaaaagttgaattcgctaagtgttggttgccctgcgcggatcgctgattgctttgctctgggcatgccagcgaggcatcctgctcggactgttccctccgagcagatgctccaagtggattccacgtgtcaccattgtgcgatgccacgtcagagtgcaaaaattgggataacatttgcccccatgtctgtacgggacttccgaagttgcgtgtagacttcatcctagctgcttctgcctttggatgggaacacgtgccaagcacgactgttcgagactcgatgtgaggctgactgggcctcccttcgattttcgactaataaatgtattgacaattaatattttgaaatccgattttctctcaccacggctgatggctgcacttgattatttttgatttcccatatttgattttaaggagggaaactgaggcat

SEQ ID NO: 164531 - DNA, 1026 bp, Cannabis sativa
ggggtggtacgacaaccttcgacggaaatggttgtgagaggggaacggattgaatgtcgactgagctgtgttccccaccaattgaaccacttccctctattgcccgtcgttgttgatctgcactaaccgttgcagttttcggtgtggccttctctggcggtagaagaaactgggaaatttgggacatcaggttcatcacgggttcgagttgttcggccaagatttgggcaattgacgtatgaatctcttcctacaacttttccaataccgtcgaacgtagatcagagacttcagctgcaactttttcttccacgagttcaaccattacatccttcttcgggcccatgaaagattggctctgataccaatttgataggaattatcttatcaaaactgatattaaacaattaaaggaaagaatagaggaatagttgatgaaaattggggttgtattcatataataactaggaattttgagagcctagaccctccttacaagagacaatacaatctgaataatcccactacagtaaatgaaactcatatttatacttactccctaggacttaaggtgcaccttagcactatccaaataatactcaaataatagaattagataattgtatcctctacagcaccctccttgagagacttcctgttccttctagcatacacgtatgttaagggaggtctatcaaaatgtcataatagtaaagtaaccagtttgtagcttttgtaattgtagtttttgaaagctactttttttttctatttcaagtgcttattacttattgttgctttgtgtccatcttctgtttcttctgattgattttcttgtaaatttgtggattgttgcatattcttcggttgtgtccaaactgtccacatcttgagcatttcattacaacttttggttcttctctacttctgattctttttttctaggtctccctgaggtcttttttgtttttggtggcatcacaatcttctccaagctctcaggtagtctccattcactttcattag

SEQ ID NO: 164532 - DNA, 1412 bp, Cannabis sativa
ttagtgaatttctaatttaattttattcttcttgaaaaaagtaaagaattaaaaaaaggtcgcaacaaattatcaagtacatggatcttacaagaagttagaattgatgaattttgttgttcgttagcgtactcacaattttcggatgatattgatcataccgacaacaatattctttgaggtttaaagttaaataataataaaaataaattcacatcctaaacatgttttttttttttttttaatttttgaacttgcaaacattacaaagtcaaaatgggtatataagctagcataactgaatacacggcaggagaaaactcctaattccaaatgccacgagcattttcagataaagctaattgggctaatacatgtacaacaaaattagtactcctaggagaaaagctaatacttaatgcaaaaggagaacatatttgtaatattataaataagcttatcaacatctattatcagagtcttttaatgtgtgaaaataaattattatacataagataaatggattattcctctcattgacaattagttttgcgatagaaccccattcaccatattttaaattctaacatcttgtcatcttgaccctcatggatggcccgcccataaatcaaaatgaaccggattatacggccgctgcagaaaaatatttcgacactctaaaacttgcctcatcatcacgagccaccacaccacaactacaatacccctcagccaaattcacctcaacatcagtgttgatttttacaacccttgcccttggaggtctccatttctcaattagtagtgtgaactttggcgcgccttgatactcttgcaaatatctaaaacacgaatcgatcacatccgcaagccatttgtgccacttaccatgtctctcgccattccgcatataccaaacttgccaagagggcaacacaaaacaactcaagatcatttttggacaagacatgagacaatctagaaaaatatgataatacatcccttctcacataatccattgtttttcatcaatagagaaatttgattatttatgcatattaataggggaaattaattccctaaacttatacattttaaaattttaaaaataagtcaaatttacatcaaacccaaaaatactcctctcatttttcaaacctcgtgtcttctctaacctatgttctctcccctctctctctcgctcgatatcccttgaacatcccaacccaacccacacgagccaccccacagacccacaaaaccggacccatcgaactccttcaacatccccaccgacccacgacactccccaccgacccacgacgctctccaccgacccacgacgctctccaccgacccatgacgcacccccaccgaccaccaaagcaccaccaccgacccacgatacccac

SEQ ID NO: 164533 - DNA, 1778 bp, Cannabis sativa
tgttcatggccaaagtgaacataatcatgacaactgaaaggatgccagaaagatatttgcgtgaaaaatatcatcattgacatcaatagcagaaagtttgaagacatcacctccactaatcaactagtaaagaaaatatattttcacaaggaaatgttcaaaggttaacacccacctattctatgcaggtatctacaatagaactctgttaccttgttgagtcgagttaagtcttgtgaattccttatgagtcttttcaatgtattttccttatcgttgatcaatttcattcatgtgggggattcttggaaaaattatatttaatatacaattaataaccaatttaggctaatgtgtcaatgagaattgacaccgtaaatgtggttcattgataactactaataaatgaagatttggtcaaaaatacaaatactgtaataatggtggatattcttattgatattattagaaattatggtaaagattttgattgatcaatatcactaattttgtgggattttttggcattgattttcttgtgttcacacttggtattccaccccatatgaagcctttaaaaggaggcttcaactttcattctaatcacaccaacaaaaagagtcactcattaaaagctctcttgtcttctttttctctctcttttttgtaagtcttaaggtgatagagagaagatattaattcgagtttgctagagtagtgaaagtagtgtagttatcttctcgttaatcgttgtatcctggaaagtggttgctcgctgatcttctagcaccgctcaagtataggggacaaatctactttaagaaaagtgtgtttcatgtgtctcaactttcctttgaattattaattttatatcttatcatttgtatttatatttttattcttcaataattaattaataatatattgttatatttatttgtcttttctcatctttaaattatttcttacattacgcacacattacataatgtaattgacagtctttaaaatgataagtattcttctctctatgttaattaatttaagttacttgtattcggctaaggacagtcttgaaatttacaaaatgtagaattttatataaaaatatatatgtaaattattttaagtgtaaaaagtaaaaattaattaatatgttgaaatttgagtacattactattacatgacatatttattaaatgtctaattgtcctgctggcttgcacgtatacttgaaattgtttccaaccagaaagcatgcttgaaaattatggaatctgcagaaaattgtcgagtttacatatgtactacaggcattaatgatgtacttatgcatgaccatatagtatatataaaataagtttaatattatgggacataaaatcaactcttaaaacatcaataatatataattggccggccgcttgaaaaaagagacaaaattatatgtgggatgttgatgtttagaaaaactaggcaggaaggcaatagtaccatgagttaataatattttgaattacaggtagattaaaaaatgctacaatataactttcttagttataaattcatgtacgatgatgcatgcatatctctgactatattcatgaatatatatattgagcttcgtaattggattattgtacttttaacactacgaaggtaaattatcatttagactttttgcgatccattagccttttatataaatattagttaaacaataaaattagtatcaaataatttttaatttatttttatgtatctttttttttaaaaaa

SEQ ID NO: 164534 - DNA, 3153 bp, Cannabis sativa
  modified_base (3108)..(3124): a, c, t, g, unknown or other
tgcttgcatgtgcttctaattttgaatttattgttggaaattcacacacaacaaccaaattcatccaacacctatccagatcaaacacaattaaagaaacacttacaacaacacaagttaatgaatcaaacttaaatataaatagaaaagcaataaagaagacaaggatttatcctagagatcgaattgattcttacctatactccaactgagtgccataatcactaattcaatatgaataatgtcgaacttgtaaaaactctgatagcatgatcaaaatagctctctatattcacaccaaaaacatccttcgagttcttagtcacaaagaactcaaacttaaattcttactctctccgcctctatctctttctctctctctctctctaacatttatagtacaagttacatgtgaaatgaaatgggataggagctatttattataactacagctcatacaagataacaaactattatgattgaaaactaaaggaattgaacagctcagttccaactaacttaacctatagttagttatgtgtgttaattggcggagcaagacaaaaatttagcgcgggggcaatatatataaaattattttattttatattttaattattttttacatataatttaaaaaaattaaaaatatttttttggggggtgcatggcacccttcgcctcccaatagctctatcactgtttgttattgtttggaggattaacttccataaattctaccttcatccttaaaagaatagcaaaaccaaatctcgattttttgatggtggtaaactctcaaaggtctcaacaagcaccaatgttcagtaagctaaagcattggtgagaaccttagctcccatgtcagggttctcacttgtgtgaactttctccaatttcagcaccttatcttctatcttctctcctatccaatacaatcttatgtaccttatcttctatcttctctcctatccaatacaatcttatgtgaatatttttactcttctcatggtgaactagattcttgcataagtgaacagatgacaagctatccggccacattgtccatatgcctttgagcagctctagctcttgtaaaatacattgcaaccaaatttcctctttaaatgcctcaatagttgccatgaatttagactctactattgatatggccaccacttattgctgctgagattttgaacttatgaaactcttatttatttaggcagtggtgggcagtctgctatctttgttagaagcataatcaacatctatataaccacttagggaaactttttcttgatctctctcatagattaggcaatattttgatgcccctttaaagtatctcaaaagccatttgaaggccttctaatggtcaggccctggattggacatgtacctattaagcacattcaaaatgtctacggtgtctagtcttgggctgaccattatgtacattaaatatcctaatacaacaggatagggaaccttctccattttctttcatttagctttaattttatgacaattttcattggagagcttaaaatgtccaaccatttgtactgcagtggctttagcaatatttaaactaaacatcttgacaattttagtaatgtaacttctctgagcgagtatcattctctgttcccttctatctcttagaacctcaatacttaggattttccttacatgtcctaggtctttcatttcaaactctgatgtgagcttatccttaataatcttgattttggccttgtctttgttgatgatcatcatgtcatcaacatatagtagcacaaacagagtgctacatgtatccaagtccttatagtacaagcatgaatcaaaactttgaccttacaaaaccaatctctttagcaaatatgttgaaccttttatttcatttccatggtgatcgcttcaaaccatacaaagaccttttgagtaaacatacccctttctgtcttactgttttccacttgaaaaccatgtggttgttcaatgtaaatatcattatataggaatcccttcaagaatgcaattttaacatctaactgctcaactttaagatcataatgtgctgcaacaacaagcatcatcctaatggtctcgtctttcaccataggtgaaaatatattagtgtaatatattccctcaacctgtgtgaagcctttagctaccaacctagctttttacctaggtggctcaccctttgtcatgctttcttttaacatgaacatgcagctgtaagagattatcttttcaccataaggtttgagaaccacaattcaagtcttactctttcttaatgagtccatctcatcattcaatagcagtttactaattataccttgacttgtttgctaccgtttcttcataagttgttggttttggtatctcttcatattgtaaaatagctagagcatatactatgaagttagcttttgactatcttttgggaagcctgatctctcttattgtcctatctcgagccaactaatagtcccctagtttagtctgatccttctaatcagtgccttgttgttcctcctcagttttaggtgctaaaactagttcttaaacttgttcttgtaactattcatctacaccaatttccttagagtcatcagggacttgattacttgatgtttgagttgtcatgatatcaaatttaaccaagtcgagtctatctatattgttcactacacatttagaaaacaaactcttcttagctttaagtgtacaaactcatgttcattgaaaacaaaatcactagacataacaatttttagttttccaatttttataatacaaagtctacaacatttcacacaaaaaggataaccaagaaaaatgcattttaaagctctacgatataatttctattccttttggtgagcataaatagtgcaaccgaaaattcttaagtgcctaagactaggtgctttaccaagtagcatttcataaggtattttcaattttagaaccctactatgacatttattgatttggcaactagaattaatcaaatatttccccaaaaaaatttcctccaatcaaaactaatcaacaagcacctaactgttggaattattttaccannnnnnnnnnnnnnnnncaagtatgttattaacatcctaaacatga

SEQ ID NO: 164535 - DNA, 1561 bp, Cannabis sativa
gaaaatgaagcaaaactcaactaacctaaacaacaactaatcctcaactaagcatgcttgaacctagctaaatcatacacaaatcaaaagaaaactagagttagggcttaccttaggattacactactagaaaacttgctagaaacctctgaattgatgaaagaaatctgagttcttccctggtttaggttgagtcgaagcaagagagagagcaagaattttcaagtttgtctttttcctttgatcaaatcttaattgtctaaacacaaagggaaatcggctaagttaatctcttagggccagttgtcctctagcaaaacaaccacctaaactctgaagtaaaatacccaaaatgcccttacataattacttaaatggtaaaatggcttaggggtggtccaaaatcataatcctgcctaatctcgatattctaaatatcaacttatgaatactccgctaaataaaaagattctaaagtaacccatgtgactaatttggccatccgtcacattttccatcatcgctaggcaaaaatcataaaaactgtaaattttgcatataacataaataatacacttaaatgtaataaaatttctagaattaagaaattttaactttaatgtccaattctaaaaatgggacccataataaatataaactcatgcataatcattaaatatcgataattaatgctaattacctttactaatccataatctaatcatgcgatcattacagaaggagacttcaccccttgtgaacaagaaggagtagctgctaacaattctccccttgaattgtgaactacaaaggcataaccaaattgcatatcttcttcaaaaatagctgcatctacattaatcttagttatattcatcacaggtttagtccagctctccacccatcacatgctaataacaggttaagtgaagggatattccctacaccttgagcaccactctattgatcaagaattaacaaagaaaatgacaccatatcctccacttgttttctttttttattccacactagctcattacgagatttccaaatggcccaaaaagtatcaccactcaccccaacttatcctcatcgaccttacttatcacaacatctattgaaacaaataaagagtgaaactcacgacctaccatatccactagacattaaacaatgaaacattgttttattgtaaacaccacaaaatggacaagtggtgtgaacatgaattttcctactgcaaagattcatcttagtaggaaatttatttgaaattgatcgccaaataagatctttcacccttgggggaaccttgagttgtcataatttcttctagaaacctaaattatcatcatcatgattaccaacttttatacacactcttaacagagtaaactccattattgataagatgaatgaattttttgttacagtgtgtacttaactaatgagatactataacttgagataagggataacaccaatctctagagagagatgcatgagatagatagatagatagatatagagatagagagagattaagagagagagagagaga

SEQ ID NO: 164536 - DNA, 786 bp, Cannabis sativa
atctttcaacgactaaatagtttggtaggagtaaatttataaacaataataaaaaatgcaaaaaatgttatctattcttatagaagtaccctcgcaaaatttcattaattatgtatttatttggccaaaattattctcttcaatctaagctatttaatattagtagagtaagttatatttttcctaaaactccattctaccctttctatttgaacaactctctctctcttactctctgtaaacacgtacatgaaggagcacacaatcagaccatttacacgactcatgacttacgaactacctcgaccttgcgaccacaccacccacatgacccacgaaccaccgcgaccacaccactcaacgctgacattgtcttcgtcaaagtaaaccctaattttttttatgaatttttaactgtaatcgttttatttttttcatgatttaggttaaatcaatttgatttaaagttaggtctgtgtttttagtcatttttagaggagaatatgtaatttttgaggtttttaggctcggatctgtattttagagagaatctataatttttgcctgacctgatacaagtctgatgtaggcccaatataaggcctgatggtaagttaatgttgaaggagttgaaggctgaagaaaatagcccaataagtttggtataaggcctgatagtgggcatgatggtccttataattttaaatttgaggaaattgcattgtatacccattttactttatttattttaatttttactttaatttttatatttttttaagatat

SEQ ID NO: 164537 - DNA, 1879 bp, Cannabis sativa
ggattctaatatcttaataatcttcctttacatatcttatttggaaattattttagttcactcatcttttatattgaatctttaattacttatctatttatttttctaaatcaaaactcatcacatatttagaactaggttagaatttgtttactttatttgaaataatttctctttgatgttagtcaactcatttgggtttgaacttgtgcttacatgaacattatattccaaacaattcgtacacttacgagtaataattaaaacatacccactttagagtccaacataacctcagcttaagaccatctccaatgagatgtaaaaattgtgttatatttgattaaaaaagctttgagatatatttgcataagtttttagcattgtgctccaatgtacatttataaaacttgatacaaaatttaaagtttaattaatatttttatttgaaatataaaataataataattttattattataaatattaaaaatttataatttattgcaataactaaatttaataataaaatattaaaaataatataaaagtatatataaaaataagaaaaaattgcggcgaaagtcctcaaaattttttattttgatgcagttaagtctccaatctcgaaaaatagtagcaatagtctcgaaactcgagattcttgtaagtctcttggtcctcattttaacagattcgttagttattctgaaaatgccacatgttgatattaaattgcgacataagtcctcaaaaatttcactttgatacagataagtctccaatcttgaaaaattatggtaatagtcccaagctaaagatcctcgttagtccgtaggtaccaaatttaactgttttgtttgttgctctcaataataccacgtgttgatattttattagtccaaattataattttaatttaaaataatttctactagcgagagaggccactcaaaaaaataaaaataaaaatttgtctaagtaaactttgaaccagcaaagtcgaggttaaagaattggctaccaaaatccaccacccaccactatccatatctctatttctctactgcataatcctctatccatatctctcagtttcctggaaacaaaaagtttcagctctctcaaatatcccaatcttgatcacatttcttcttttttcttatgcttaattggtttttcaggataatgagatggacgaggaagaaggtggtgatgaaaggatgctacttgtcgctggtaggcctctaccaccgagaatggtgggtggcaaatcgtagaaatttgtaaaaaactttatttatttatttttatatttataatattttttaatcttaataaaagaaaatgaaaaaaaaaagtgttattaaagtttttaataattttttttatgatgtggaccaataaaattttgacacgtgacaattttaagaactacaaacagagctattaaattgggtacctatagactaacgagaatattaagcttgagtactgtaattttttgagagtagggactaatctgtattaaagtaaattttttggtaacttatgccgtaatttaatatcaacacatgacattttcggaataactatcagatttgttaaaatgaggaccaacagacttacaagaatctcaaacttaaggactattactgctatttttcgagattagaaacttatctgcattaaagtgaattttttagtgacttttgccacaatttttcctaaaaataatgattatttatgcatactaatgggagaagttaattccctaaacttgtacatttcaaaattttaaaaataggtccactttacattaaacctaaaaaaatacccctctcatttttcaaaccctacttctctctctctctctctct

SEQ ID NO: 164538 - DNA, 2865 bp, Cannabis sativa
aaaaaaaaaaaaaaaaaaacaatcgcgacaaaagaataagatacgtgataattaaataagcttttgaaaaatataatcaagacaaattacagtactaccaggaaaaacaaaattgcaaaagcactatttttttatctgaaaaaaaaaaaaaaaaagcactattaattatgttcttttgttcaggctaactttttagactaaacatatatctatgaagtctcatcccactacaaatattttacacatttaattttatcatacttaattttcatcaagaattggccgtagactaataataatcacaaatatcatactttattataattaaaataaattttattattatataataggtaatgactaagattatggacaattttttaataaagttataagtaattatattttattgtactgattagcacaacacgtaatcttgaatgaattatgttaattaccaataaaatataactttttatagtgtctgaataataatataattataaattccatacttccaatgtttaaaacttgtaaacatcagtaccatagaccttatcaaatgaagaaattataattaattaattggttattccgaaccgaaatggctcccaattctttttttgtttaatgaatgggggtagctagctagcacgatgtcattaactaatactacttgttttaaaattaattaggcacctaaacgttccaaattttaataatagaccaactaataaaaattaattagtaaaacaatattttgactgcatgataaaacattaattacatcttttcatatatatatatatatatatcatcatatataaaacaagatttgttaaaattattatctaattttaacataatattttataatataggtgacgtttaaactagaggctctgtttaaaaggtcaattagttatgtgagcaaagatgactccaatttgggagatgaaattgggagttttggtaggaagcacgagtttgcagatataacatggtaccctgctcagcagaaggtattttacagagtcgatgacagagtttcttccaacacttctggcaatggtttatacgatttcattccatttcgttcctccccctctgtagtacttgcacttgctaggctcacaggtaatttatatatatagttattaattaataatttataaagtacatttagtcatttttccactactaattaaatcatatatataatgtaatagaggagaatcaagattcgtcaaatgatgaagatgggaaatgcattagtgcgaagcttgtcactgctttccttactaaaagtgcttatggtttaacaaacaatggtgagtcatgagattattgagtggtctaatattattattagaataatttgtggcataaatacctaattttaactccaagttataaataaatagctgagtttaatttttagttgtaataatacctaagttataattctggaacttctgtaagtacctaactgttaagtattaagtaaattatcacatggcgatccctgattggtccaactcattatttttattattttaaaaaaataatttaaatataccaataaaaaaatgacgtgtgaatataatgactttacatttaactgttaggtacttgcaaagttccaaaaatataacttacatattattaccgccaaaacttaaacttaagtatttatttacaatttgaagttaaacttaagcatttatgcagcaaactacttttattattaattacaactaataatttattcaaattaaataggtattttgttcactggatatccagtaattggatctcaacacaaagttcaagcatcaggaacatgtttagatagtcttgaagatgcaagtatcacagcgtgtgcatgggaccccaatattaagggtgagtttttccaccaaaccacatttagtgtagccttgtcctcggccaagagcttcattcaagatgttcaagaacttgtcaagttaaaaccaaaagccttatgtggcatagaacgctacaatggaattctcatgcgttatgtaacggcctcaactgcttatttgggtaaagatggagatgcaattgactttgatatcacttattatcgaagcaaagatccattggttccaagactttatgaagacatacttgaagagattgagcaattggctatgtttaaatatggagccttaccccattgggggaagaacaggaacatagcttttgaaggagttctaaacaagtataagaatggtaaagagtttttgaaggttaaaaaggcttatgaccctttggggttattctcaagtgagtggagtgaccaagttttaggacttaaggatgggttaagtatagtgaagaagggttgtgcattggaaggtttgtgtaggtgtacagaggatgttcattgtgcccctagtaaagattatttctgtcgaccaggaaaaatttatagtgatgcgaaggtttgtactcgtttggaaaccaacgatgatttatttgaacagatcatagactctgtcattgatgaaattcgcgatgagctttgatgttgtttggagttctcatcatgttcttcatcaaatcattgagtccttttgaatgattaaataaaataagattgtgtatcctcaaacagaaaattcattgttttggattgtatgcgtggatgatatttaattggtattagctagcatttatggttcaaaatgaccattttcattcccatcaaattcttttgtgattatcatggttttgatgtttcatcttgctatcattgcaatgttagacttttatttgggcttacattatattttattggttttattaaaacttgggttgattggatagttctttgct

SEQ ID NO: 164539 - DNA, 523 bp, Cannabis sativa
cacacttttatgtagttgtggagtatcgacccacatcaaataatataagaatttttatatcatatattcaaaatttcttatttttttttgttggtggaattttttttcaaaatagtgtgtactatgttaagttttcgttgttgtttcacagttttttagttgttccactgttatttttaattgttttattttattattttacaattgcatttattttataaaaagataatatttttgtaaaaattttagtataatagtaaaattataaattttgacttaaaattcaatatttttataaaagctccaataatatattggggccctataattgggctttcacttcataatattgtttagcccaatctaaatcctctactgagtttggaggtacttactagtatatcaagatttacctcatacaaaaatatgtatttaattttaaaattttattagtgttataaaataatataacataatatagaatagatgaaaagaaagaagaagaagatgaagagagaaagag

SEQ ID NO: 164540 - DNA, 3717 bp, Cannabis sativa
tagataatcaattgggactcccaatattcttccgcaaataggaaaggcagtaaggtcatttctccatgattcattagtattaatcattttccccaaaatcaaaactccattagataaataccatggtatctttgataaaattcttgactgatcttgttcagagacaaaagagaatgttaagaacatacctgattcgtatttgtcctgaatcttgatattccagtccgtctctttgagtctccaaattctccccaggaccttcttcaaaaaacccctgctatggtctatatttgaacacagtcttcctcttaatgtgttcttggcaatagttgaggaaagattctgatccacctcccaatcatcttcatccgagacatgaagctgattggtctttgagagtagttcgtccatagtggggggtattgatcaccaagccggaactccagcagcccttcgttaccgagggaaggaaaagaccagtcgagggagaaaaccagtcgagagagaaacctggaagaggcaatttacaccacagtaatttcattttattctttacatattctattaatattattcaccactctatgattattttcttttaaaaatctttcatacagaaacaaaccaaccgtcataaaaataatcacaataaaataactacaattaattataaagaaacattataatattatttgaaggtgatttatatataaaatgtcttattataaaaattattaattattaattaatagttcaaaaattctaaattagttgaaatgtaatgttgtagtaaatattaatgttcaaatgtattaaattgtaagtataattatatcacccaaattattaaaaaaaatgtatattacatttaaaatataggtcttagacaattaccaaagttactttatggttaagaccccggctaattatatatatatatatataaatatataaaaagaaaaatcaaaatcattatttttttatcttaaataggcaaaaaaaaaaaaaaaattattttattttgttcaatcataatataaggaggtagtataagaatgatctatttattaaattgcccatcctagaaaatgtaatattatttttatttcattatatgatcagatagattattaaaagtaaatgcagtcacatgttcgttgaagccattgctaagtaggaagttttaagttgaattaaatctaagagccagccaaatgttaatgatttgaataagtgtaaacacgtggcttcttcttatggtcgtgttattttagattgtaaggctttaatgtcgtgttctttatctttacattttgtagaagtctgctaatataaggttgcacattttttagcgcgagcttctcttattaaggatgattgtattaatagtggagattctttacctctagctattgcatccataactttggatgagttgatttaataaaattgttttattattttatgtgtaaaaaaaaggagtaattttttctttttttattttctaataattgaaaagtaagaaataaaaagtatcaaatgtcattccattttaagtaggttggacaaaattatctcattactaactaataaataatagtaaacaagtaaattaaaatcattagaatagatgtgattctcattctcttttagtacgtatgtatgagtatcaatttttttcacaatcaacttgaaggataaaacaaaacatgaaataatgataccattggagaagacgtgaaagaaaacattggagaaaatgtaccttttaaatggagtaagacctacaaattgatttgctacctttatttaaatgggagtactggtcgatactccaaccaattgttcaaaactgctgagcataccctttaaatcatatcatgagatttttctttttctttttttgataaatatttcaagagatgttgattgcaatgatagatactataatttgctaggtcagaattaggccaatttgcatgccccaccttcaataccatagtgtcaccacagcctttaaacttcaactgttaagcaaatttatggcttctttatttttagaccatgtaaattgtattatatttagcataaaaaaactttattatatattttaattaattttcagtattggacttaatgcacaaagaaatttggtacaaaatttaatatttaattaatatttttattaaaaatatatatataaacataattttattattaatttttattatgtaaaataataaaaaattatataaatagtccatcacttaatatcatagctaaatatattaataaaataataaaaataacataaaaatatataaaaagtagtacatttatagtgaatcagtgatgctaactttgcattttagcaaattttttttttttgaagaaaaatatattgcaactacagatacaaagagagtacaaattacaatatattccaatcgaccttggactctttccgttccaaagcacctctctctcatgccttaatgcagctttggccaaattatgagatacaatattgtaaattcttggaacataggaaaccactgcagaaggaaaagaagagagacaggccttgatttggttcaccaaatcaaacaaaggagacttgtccttccaacgatgcctcacctttctcacaagaagctggctgtcagtttcaactcgatccaaaagaaactcaatagctatacaccatctgagcgcccaaagtagtgccttcgcttcagctaataaaggggaaagatctccatcacatggcgaagacatagtggcaacaatatcacctttattatcaaaaactgaagccccaattccaactttctgcaactgagtactgattgcagcatcaacaagaagcttaaaagaaccctccttaggagcaactgggatgaaattgttacaagaaccttcttgagagtcttcaaatgagctttgattattgaaaatttgagcctcatcgtaatcttgaagcataccttcaacctgaaattcagtagaagagaaggaatccttcttttgttaaataaagtaatatttcgacgattccaaatttcccacaaaattccaatgaaaactctcaaattagctttagacaaatcatggaaacctcttaacagatactccctaatatcacaagtcctagcaactcggtagaaatctttaaaccttgaatctttccactctctcgaagctctgaaacactctactagtgcatgagtaacagattcaggacccttagagcagagagaacaaagaggggatggcaagattttcttatgggaaagattgagagctgtaggaagactatggtgaaaggccctccagataaaatgcttcattttaggaggtatttttaaattccaaatagtcttccaccacctgaccagagaattactgctagaagaggaaggtaaagaagtagctgatttggccaaatgataggctgaattaacagtaaacaaacccgaagaatgatgctcccaaacaagagtatcatctaataaatatcagcaagaggaacagaaaaaataccctggattacttccttatcaaaaaacattgccaatttctctctatcccaacacccattagcattaataaaaaaaagaaacagtagactcaggggggtgataccatctttgaaagatacaaacctttaaccagggatccaataagagtcaatagagatagatctgccattcccaa

SEQ ID NO: 164541 - DNA, 1160 bp, Cannabis sativa
  modified_base (542)..(552): a, c, t, g, unknown or other
aaaatatgtattctgaattatcagagatggcttttaaaaagaaaaaaattatcaaggatggtagataattaagattttatttagtgcataaaagaaattttaaaatataaaatgatacgttaattttcataatgatatcatgtacaaggaaatctatggaccctcttttaatagtgtaggatcttttgtttaactagggaatagaatggggatgacaattattttttatctctgaatattaaatgaggcgaagcaagaataacactccccgtcctgacggtaactcatttagtatttattctatatttttaataatattttttataatttataatttaggaaaattttataatgcacctcattaaaagagatacactgatatatttctatctgttttagtatttgaaataattttttagtcacttttttctcatggtcatgtaaattatagttatgtaagacatcatgcaaaattttaagaatttcaataaagtttaacacaaaaattacgttcaaatagtgtattgcacgcgtgactattnnnnnnnnnnngcgtgtaaaatagactgtttgaatcttattttttatattgtaaattattctgaatttctcaaaattttgtaggatatcttaaatagttataacttacatgaatatgaaaaaaaattaaactaaatttttcttctagatgtcgaaacaagtaggggtgtttcagtacatctcttttaaggggatgtattgtagaattacccaatattatttttataattgtaataagaaataaacaaaacaaccgcaacatgtttctaaaatcatattgttctttcttaaatagaggatttcattcatgttcgtaatgaaagtgtgactagcaagagtaaatctccattgtaaagtgttgttatgtggtgaattgaatgttaattattttataaacattttactaatctaaaaagctatttatgtcttatttggcttttgtctattttattccgatgttaaaattttatcttaattttcaagagtcttattttgaaaaaaaaaaaaaattcattaactttaattaaatatggcaaagaaattccttataatgcaaataaggtaaagagaaaaatgttttataaaatcatttggtgttcttccttttttttttttttttt

SEQ ID NO: 164542 - DNA, 690 bp, Cannabis sativa
acaaaaatgaagatttttaaagtatttttttctttatatagttttgggtttcacatatttgaatacttgcacacttttaaattctatacattttttaattatttttttttgcctaaaaaggtaaatttaatgttattttcccattttaaaaacaatctagaatgagctatttatatcaaacattcacaaaattattatagcaaaacttcagcacaattaatcaaatttaataacttttttatatataaaatattagagttagtctcacattattaatatgtagaaataaattactatatataagataaatagactatactcttctcattgtcaataagttttgaaattaaacctcattcgcgttattttaaattctaacataatatgagaagtcaaactaaaagtgagctaaaagagctattatcttaagggagatgttagagtcccacatcactaagtgtaaaaatataacactatatataagatatatggattactttttacattatcaattaatttgagataaaatcccgtacaactaaccgtgagctgtttgtgatacgttgtgaacttaaagtaaaaatactgttttatatttcaacattaaggccaactccaatgggtatgcaaaacatcaatcacggtgtgatattacaccaaaaccaattccaaccgaacgacaattgtata

SEQ ID NO: 164543 - DNA, 1347 bp, Cannabis sativa
ttggagtcaagatagctggcatgattggtgtgtctcctattattacggatgttaataataggaatccaagccataaaagcatagctatggatatggtggaaggacatttaagaaaagatttaggttctaatttgttggagggtttaatggactatgatagtggttttgactctggtctaaaatctaaagattataatgactaagatatttatgatatcgatggtcaattatcatatgttttgttcacatgtttttacatgattataggtttaatgtataagttttattaaattttgaacatatacttattcatcattaccgtgatgtcatcacaataaaaagtaattgtgattatatgcttcaaattatttagtcgcacaatttaccagtgcattagatttatactgacgtgataatcaacgatgagatttacttacacatggataagtggaatttcttttccaattaattagtaaagtaaactagcataggatgtattggacatacatcccgctagacacatatttaaagtagaaatgatatcgtaaacttaccgtaatatattttctaagtaaatgttaaaagttgatcttagatcaaagatcttaatcctaacatggttaggttctggcttaaatgtattgcatgtattttttgacttgtttgttacatttgaccagtaggattggcctaatacgtatatcttgagaacatggtactataattaagtgggagcgctaatcatatatatagaatttataggttttataaatacttagaagtgaaacaatgatttctttagagctgggctaaacaaatttaaatagttgaagcctcatttcggtaattatattagtttctcgaatatcatttacaagtagctagtattttaaggataaaatacattgaagagtaaaatgataattctatccctactcaatgtaaaccgtctgtagaggatctttaattatttagattgaaataatggatattacatagcgtatctattcttggtgaatagtatgcaatcaagagtgaaatattgaatttatagtagaatcaagatgaattaataagataaataatttatttggtaaattctagaactacttattaggagcttgattatataagtcatggtccccacactacctgagatcatactcccttgaagactcaattaattgattttaattaatcaattaaaatcctaaataagactatgtcttgtttatgagttccactaagcaaaggtaaatttgagaagaaaagaagatttaaggtttatttattaattaaaagactttataaagtataagttactaaatagttaaatggtaattttat

SEQ ID NO: 164544 - DNA, 3050 bp, Cannabis sativa
actgtaaaagcttgtatgtaggcatcttcaaggttgatgatatcttgagcctttccataaactcacttaaagttttgcctctctttctttgcatctctgcccacaccaaagagccaacaaccaatccaaatttgagggtcgtcgatttcatgtcatcactgaccttagtcttggtatcagactccatcatcctttgaataaaagctttcaagctttcattgtgttattttttgacttagtaaaagagtctacttccatgtccttatcacatccagcaataaaatgtttgcagaaggccgactgtaagtccttctagctatgaattgatcctagagctagttgcttcgacctgtcttcagcagacttgcataattttgttgtattttgctaggtgcgctcgcggatcgatccttccttcatacaactcgatgtgggcatttcaaagtttttaagatgtggggtcaccacaatcctccttatacatggttttgattcctcatcttccaaatttgagagggctctgctcttttttttttttgacaagctttgttagagtagctacttgctcctctaacctcattgtgtcacttccgaaaagatcacgtccccttattttatcgcttagatggttcctaatatttaggccacccttacgtgacctcgcttttttacttttgtacttcacgtcccctcattttatcgcttagatggttcctaattaaatatttattttttatattgtacagtgataaatatatattatagtaagtaaactagttttttttaaaaaatattgatatcataatttataattttttgagtgtaaaaatttttaaataaacaaatataatttcaaatttcaaatagcaaaaaaaatacctagatatttattttttattgtaagaaaaatataaaaaaaaatatatgttacatttttcttaaaaaaattaattgggcaagacttagttctttattcgccgcaaaaaaataatgcagtactaattttaagacaaaataaagaggaaaaaattaataattatccatatatagcctatgatacagcactcacaatgatttttaaatcatgtgagatttttttttaagaactcactaagaagaaaaataaccaaaattttagaaaacaaataaaaaatattaaaaaataagaaaaaaaaataatatgtagtaaaactttcctaagataccacctcactcttgtttatattgataattatatatatgtatatataattgtatatatttattgtagaaatactattgtaatttatttaattaatctcttattttattcctcgtcttatgttatattataaattatgatttttgtcaaagaaatgcaaaattcatttagaagaaattgttgttacaaaagaattcaaaaattgagaacaagcatgtgtccaaacttaatctcttaaactaataacaaaagttaccaatgtaaattataataatctttggattgtaataaaatttctaacatatatgaatctattcgcaccattccttttcatcatcatttacttttttaaagtcgtgatgatacaacattacaaccaaaagaagagaagaaacaaccatgggaattgggccgaaaaaccacaacaacaaactgagagcaacatacaaagccctaagaccaattgaccagaactcgccgcctctagtgaccgcggctcccaccttattcctcaagtgcatgccctgtccgggcgtgctgattaggtagttggcatgaacgaagtgtctagctgattgaacaaagaaggaaaatgccaaaagaaaacatgttacgaggcatatatactttatggaaagtattgttgattttgtgttgccgtagatgatttcgttggggatgagtttgttcgaagaagagttcaccacccatgttccaatcaatgagcatagtgccaaagaaagtgtagacatgtacgtggctgcagttatgttcgatgccactacggctatagcggattgtacttcggttttattttcagcctaggataagaaaaaatttggtaattaaggaaaattaagcatatatattaataaagaacattctatgagttaatttgtactgacctgcatgactttgtcggcccaaattctcttgtctcgattctcatagcccaagactgtggcgagaggttgattaatgtatctgtatagaagaatgagatggtacacgaacattataagaagcccaattggtaccaacaccacatccaggtaagccttttcgataggtactttaaccataactgttaattgtgtttgaaaaagtgtgaggacagagagggagaaaggattcttagatgatcaacaaattaaatcccagtttaattaaatgatttacttatgtatatatgaatccatgttgggaagtattttatgtctagtgcgtggaagctagcccctttgactttctatcatgggttgtaatgacagcgtgtacgtatgtgtatatataaatacgcatataaaaatcgatagtgcttaattaggtctcatgtgcgttccttcagctagattgcatcgctggccggggtcccttattgttaaggctcaactactacgtacgtataataattaagttttggcatatgtagagttacgaataagtttaattaattagcgtattttgaaagtttatatttagtgatatttgtaattttctttactttctatttaagcattttaacaacactcagctagaagcctaataatggtctaagtaaacgggagcgtaatgcaagcttattttgatattgcacactacctacaatagggaacaaatatatgatgacaaaagaatatcctgaaaagcttccaagcttttaaatggaaaatttggttcattgacattattacataattttctatgtgggaatgtatgaggatattcagtaggtgttgctatggtgttgtttttaatcagttttttgtttttaaaattgaaaaagtgaaaaatatttttcaaaaacatgttttataacactgtttatacttttcaattttttaattga

SEQ ID NO: 164545 - DNA, 2858 bp, Cannabis sativa
cagaaatttccctaccaaacaccatctatcatctataggttgcccaacatcttcaatgaagtcacacaatagttctcactcttcttcttcttcccattgcacagaatcatacttctcgtttagtgagttaaattgttgacttgtagaggccattagagaaagacaaaaatcagaaatctccaaacttttcagaacttttcagaactttttactcatgtcaaaagacatgacttcttataaaatatagattaataagggtatactggataggattatatatagcaaatatgaattatttggtatgtattggaaaataagataatttataatttgttgatgagcaaaattataaatgtctgaaactcatattagggttcgtgtattctctcttttcccatcaaagaaaatacgttagagaaataatatattgttctagagccacgtacatagaaatattgttctagtttttaagtttcctcatagtttcattgtagttgcactaatattttactaacgctcttaaactagagatatcaatgattacaaattgataacaatacaatggttttaatgatatttgcaggtgttatatattgacaatccaacacaaagctctttaaaaaaattataacatggttagttttattaatatattcatttggttgttacaaagttagtttacagaattctaatagttgtttctccacataatatttttaaagtacaatagattattgatcagtgacaaaaaaaatacgtacaaatcttttcatgacgatgcacattcaaatattctatttctagttgcatttaagttgtatattagttaaataattgttgtgctactaccatattattatttttttttaaaaaaaaaaaaacagggctcagaattaacaatacacgactcgcgcagagaaaactcaattatggtaagttttatttgtattacataggagtattattaattgttttaaggtttaatattagttacattacagtttcataacagttatcccatagttgacatacaatgcttaaatttttaaactgttagaaaaaagaaatttcgtttctcatattttgcaatggacagtttgatcaaggaacaaattatgtaaattacgaagctactggccaatacattttaatagattacaaatatgaagaactattacacaagttaaaaaaggtgatggaatgctactatgaaaatactcaactataactgaaataccatgtgaaagaaggatacaaactattgaggataattgacaatccaagcctattcttctacatataactaaaattgaaagaaacttacctcacaaggtatccattgtgtgtgaacatggtcagcaacataacaacaatcaacaacacctcattctttgcaatgagcaactcattagttgcacaatagttgttttaatgttgtatgccctatccaaaatattaacagaaacataatgtattatcaacatcatatttgacatattaatgtaaagttttaaaacatttcttattacattgactattttgctgaatcttcaaaaaaaatttattactaaaataacctaattttaaggcccaagataagtgttaccatggagactcaaactctaagaacaaacaaataagaaacctcatgcaaactattccaaccaactacactacacactcggtggtacaattaatcagtcatttaaaaaataaaaaataatcagtacttttgtattaaaaaacaaagaaaaacttataatccttagagatatttaaaaatagaataaatatgatttttgcctcctaaagaaactagtaataagaaaagttgtggcaaaatgataaagaaactagaaataagacaccttcagattctcatcagcttggttcttccctttctaaacttcagaaaagaaaatgttttcagcaacattaaccttcgatttcttcttaacagggtgacgatcaatttttttggtaagcaaagcaaagtttaaatcatcatcttcaaacaataggctatttgcctttagatttgttgacaagagatttaacacctatttttaaaggttttttttcagcaatggtgatgactgatgagaaaaatgaagaccaagtaatagccatttatagaacaaaaaaatgcagaacttggtgagatgatgaaggaacgaagttgaggaagatggacgaaatctgtttttttttttttttttttttttggatcaagaagttttgaaacagaaaactacaattaaaaatgaaatgaaacggaaaataatactactagtaataaaaaaaatatagaaaaagagtgaaaatagataatgtgtgaatatggtataatgacatcattcatgtgtaagatttattagtataaataaaataataattttttggtaaaaatataagagggtatgtgaatatggataatatttttaaatttttgtatttttttatataaattttccattatataatttgtatgctgaaaaaaaatagattatatatctgaaaaaatataaaattaaacatttgaaaaaatataataaaaaaatcataataattgaaaaattcagttgcaaatgtcgatctcttatccctgacctattgcccatggcatgcgtcactttggactgggctgcctaaccaaggcatttttctttttgtggctacaatttcttttgtcagttttattttcatttttaacatattagaatcttctaaggatgacaaatcataaatgtataatacctacagataaagcatatatttattttatataaagtgtgcctatataactaaatttcttggtttatgagaaatttatgagtgactttttatttatatttaat

SEQ ID NO: 164546 - DNA, 2308 bp, Cannabis sativa
  modified_base (1218)..(1226): a, c, t, g, unknown or other
attatttaaattttcatagcaacacttatttgggactttaaaagtggcatttttttttgggagtgacaagtgtttgtgtgctttattgggtaagctatagtctctatgttggccaaatattttggaagctttgtacaaaaatttaaaattgagctatttaaaaagaaaaaaaaaaattgtgtacattaagatcataattttattaccaattattttcttactaagatttgttcttaaactttccattaaaatattttattttcttcaagaaaaaaaaaacaagaaattagatcttataaaaattaaggccttgtgtaatgggtcaagtttctcaatatttgagatacttctacgttgactgtcaactatttttagggcttgttattcttcgatagtctccaaaattactattaagccgaaagaacttagaatagaatgtgtaccacttaatcttcttttgttgataaaaacaaaaatattgaaaaaaaataaaataaaaatacgtattgaaacaataaataaataatagtattttaatatttatttatatatatatatttgatgaggacttaatagaggttaaattaaaaataatgaagttaaatatttaaacttgttttgttgggtttgaggagttaaattagctgataaccaccaaggcggtgcaaaataataaaaccctagctatatattagtcgacttcacaatttaattggtacgaatataactaacactactaaaatagctatatatatttatttatatatctatatatatggacttacacatatatatagatgatttatttagaagaaaattcaaacacgttaattatttattgctaatattaatacaactaatttatttaatgatgtttaaagaaagtctcatttttaaggaccaatcaataaacttatattatatattcatggacaagactatacatatgagatgtctaaattatttaaagtttcatattggtgtaattaaattactacaataaactactactttcagtgataattttgtagttacaatatatttttttttaattaaatgttacttgtaactaaaacataacttttaaatataaattgttactgatttagttttagtcacaacaagtattgtgactaaaaatatatttagccacaacaaattgtaatttttgtgactaatacattttagcacagaaattttagtcacaacataagaatnnnnnnnnntaattaatcacaattttttcactttagtcacaagttttgttgtaactaaaagtaaaaattttttgtaataagtattaagtcacatataatttaatttagtttaactattattttaaagagactcacactactacaaatatcagaattcgcgacggtcctaaaaacgatttttttcgggaccatcactaaaaaaaattaactaactatttaaaaccgtcggaaaaaatttagtattcccgacgtcttaaaatcgtaataaataaaataggtgacgttttttaataaaatacgattttttaatggacctttatacccgaccaaaaataaacataaaagttaaggggtgttgaatacataatcttttacaaaataagaattttaatataaaattattgtataattttttttcttcaaaattttgggaggggaagtagctctataggaatcaagttgtggcatgattaagatcctattaatctattatcttttgtgagtaaggtacggatattactcaaatgggtatagagtacttataaataatcttattttaattattaaaagtaattgatatagctatattaaaatattagttacgtctatatttataattagttaaaaaaaatattagtagtctgaaataaaaaaaaaattaaagtattagagaaagtaaattattatgattttttattttggaaaataattattcttaaaatttataatttgtatatttttatgtgaattttagaaataattgtttaaaaagattttaatataagaaagataatcattgaattaaatggatagttggtattgaaaaaaaaaaaaaaatcaggttaaaaaaattaaacttatcttttctgaggtggaattctaaagttataaattttcaattgttgatttggctatgctatttcaacaaattgtttgatatgtgggaatggattggaagaccatcctcatttgttttttggcagctattacagcaacaaagtgttgcaagaagtttgtaataaaaaagataaatatcattttggactttctgttttacaaaagttatcaattggactttgtattttgttaaa

SEQ ID NO: 164547 - DNA, 1516 bp, Cannabis sativa
gtttcactataaggcgtaatttcaaatatttagagtattgctcatgcaagtcttaacattgtttttgttgttgctatatctagttccactattagttttttttttttaatattattagttaagtttttatctttcacactatattggattgtaatacaattagtgatatatacaataaaacatagtattcgatttggatcttacaaataaatatatatataaatgtatagttactagagtattggcacatcaaactaaagtaggtatgtatgtgaaccaattatagcgaaacatatatatattgaaacccctaaacatttctattattgtgtaaatcgggttttctttcgtgacacttttgagttttggctttttttaatatttgttcgatactaaataaatgatacattcgaatatttcattcctatttttttttttttttgataaattaaagggaattggtcttggatatctttgtatatagatcaatacagtaatagaattataggttgaattagatgatgtattttggccctagctataaaaaagggggttgatgtagtcacaaaaagcaatagaagagcttatcttctcttggattctgcaaagcaagtgcgtctgagactatgagcataaactctgtacaaaaatcgtttgaggatttaggtgtagattgttgccacaatttcacatttgtataggaccaccactacaaatgcttttttatatataaaataaatgaataatatttatcaatttttgtatagaatgaattcacatcattatgtgttgcttcttcttattttttctttataaataaaatatacaaattaggtcatgaaactcatcagcgttaataaagtagtttccttcactatgtaataaagtaggttttatacatgcgtactcttttgaataatttcagttaaaacatatcaatgcttttcaaagtaacaatcgttactatatataatttttcattcactagaaattaaactcaaatcaattaaatgttggtttatacgtacatactgagctcgagcaaaatttttctcaattttttactataacctatcagaaatctgtgtgtagcaccaacataattacaaaaaaaaaaaatgtaatattagtaaattttatttaaacaaaaaatcagtccaagatattatatgtaccatttcaagaaatacaatattttaattgtcatttagttaaatcaataatttttacaaaacgtagagtcccaattaacatttaatcataaatttgacgagtaatatagatgtacaaataaggtcctttctataaaaatgtgcaaaagacacgcataagattatcaagttaaattcactcaataatttattttgttcttaactcttcaccaaataatcatccaaggcctatggacaagttgtcctcaaattcgttgatgtgcaaaaaagtttgatgaacaattttttttttttttgaaggaacaaatcgagttcattaaattaggaaaagaatataggaatca

SEQ ID NO: 164548 - DNA, 564 bp, Cannabis sativa
ttttatgatcggtgcatatttcacatttcctaccatataagtaatgccgtcaaatctttagtgcaaatactactgttgcaagttcctggtcgggagtaggatacctaagttcatactctttcaactgtcgagaagcatagactatcactttttcagcttgcattaatacacttccactcagtcttgaggcatcataatatacaacaaatttttttcttatcagaaggaagagtcaacactggaacagtgatcaactgttgctttaactcctgaaaatttttctcacaccgattagtccaagtaaactttaaatttttagttgtcaattatgttaaaggtgtcactatttttgaaaaaccttcaacaaatcaacggtagttgccagctaagcctaaaaaacttctaaccgcagtagccgacttaagtgttggccaaccccaaatagaattaatcttggctagatctaccatgattctatctttatccacaacacgaccgagaaaaaaacgcgagatagccacaattcacatttcttaaattgcatactgttggatattattttac

SEQ ID NO: 164549 - DNA, 1733 bp, Cannabis sativa
agttgggctccagccacaattcaacgagccatatctcacgacctcattacaagacttttggggtaaaaggtggaacctcatggtaacacgtatactgcgtcctagtgtatttgaacccacactcaaattctcatcaacttttatagggcgcaagtgggcccaactccctgctatcgtggcaacttttgtagtgtccggtctggttcacgagctcatatacttttacatgattcgcacgcctcccacgtgggaggtgacgttattcttcgtcttgcacggattgtgtttgacggttgagattgttttgaagaagtgtttgggtgacacgtggcggttgcccagcttggtgtccggagtgttgactattgggtttgtgatgttgaccagtttttggttgttttttcctcaactccttcggtgcaaagctgatgttagaacacttgaagagtatgcaaatttggggaagtttttgagaaagatggttactcaaagttaccatttgtttttttgaccaagtatgagtctcaattataggtataatgcctaatttaatgattcttctatgtaatacttatttaatttttgtaaacaatgattgatgattagtcaaaaaaaattggctcataaataattttattatgaatatatttgtataatttggaaaatgcttacatatgttttctgactttttccatccctatttagaaatttcattataaatatagcaattaattaattacatttttacacaaattaaccttattttttaaaactaacaaaattgttgaattttaaccatttttttttgtttcttgcttctagaagtaactgatacttttacttttggcgagttttaattgtattttttaggtaaaatatggtgttattccgtaaaaataataattgaattttaatatagtttgttgagttttaattgtatttttatacaaaataatatgttagtttgaaaatgtaacctggttgttgaatattaaaccttctttttgcttctaaaagcaaagaaaaagaaagtgaataaaaggagagaatgaaagcattttttattaaatctcagctggagaaaattcaggtctattccattaagcaaactagtggaataatattctcaagttctaaagagaactcttggtatgccaatatcatttgtaaaaggtatctcgaaacacatcattcctagcagcccaaattttccaaccaaccatggccgcttcacacaccaacgtctgactttgagtctcggcaaccttgaaaaatcaactgctgaaattggctcccaaactagcaaccatattgacacccgaaactctccaacatgattgagcaaagccacactataatagaacatgatgaatggattcactagctaaattgcagaatggacacatcaaatccacgtacacatgtttagtattaagttgttcttagttgggaggtatcccaatatcgctcgccaaagaaaatggtggacttttgggggaacatccacctgccacaacagcttccactccgcctggttttcaacattcgcaccagcagcagagttttattgcaagagtttataagtgcttttcacagtgtaaaaaccagaaggctcacggctccaataccattcatctctaacagttgtagcactaagttgaatagaagcaataagatttctatttctaacttcaaacatatcttccaccaattccaagtcccaagccgaagaa

SEQ ID NO: 164550 - DNA, 2547 bp, Cannabis sativa
  modified_base (377)..(380): a, c, t, g, unknown or other
  modified_base (2315)..(2320): a, c, t, g, unknown or other
aaaaaaaaaaaaaaattgcagaattccagcagctcgagtttcaggaacaagacaaccaaaataaaagaatgataggtgtagatctattcatttcaacctaaatacaacttaattcaacaataattattaattaaattaaattctcatttttttttcaaggatgatgttggcagggagtttgggttgctcctacacacttggttgtcaagctaagacttcggcaattaaagagtgctccggtaagggtgtgtgtgtcagtgactttgtaccgtttagccctactaacactagtacgggacaagtacttcgtgcatgtggtaaagtggtcgtacttctattaagaatgttcttgatcatttgttaagccttgtaaatannnntatgggtgcctaaatacaagtcgataaaatattatatgttatatgcttttcttactgagtctgtcaactcacaaatattattttcatatgtaggtaaaggaaatgctaaggatgaacaccactgagcccagagctcgaggatgattgtacatgtcaagatggttagacatagagagttcggcctcggaacgatttgggcctatattttgtagtcgcagtgcgacatgtctataagtgtattttgaatatgaatttaaattttaaagatgggatcccgactttttgtatggatatacatatttatgaaagtttaatttaaaagttttaatttgacaggattcttaagaaattcttttgtaaggtccatgtttttgacagattatattaaaagtgattccagtcttatctgttatatttgcatgtcgtaactagatgtggatattttgttagtctccacgtcagtctgttgagttttaacagttgtcatgaaaatgtcattaggtcttgttagaattgtatgtctatatatagatggtcctgttctgagatttaacgaacttgctaatcgtattcttggatagttctgtgtgattgagtagtatcgagtgtggtatcttgtactgttctttgttttacaggtttgattgaatgtcttggaggcattcatccatagcagaaagatcagagcctattcgagctgagttcaaactgaaaggatttcagtttcatcttcatcatcagatctgaagagattttagattagagaaaagtattgaagaggaactctacttgtgcagaagggggtcttgtgtatattcaaccaaggatcttggttggtgttggtaatatttcactagatgttgtaacagattgtattcaatacctaattgtgaactgttgtttgtaatatgaatctttgaatatagtggatgttattaccctagttcggggaacccaagcactagtcgcctgatttgttctcagtgcagatgaagcttgtaaatcactgttttcattattgattgctcatttacttgttttttgaatagtaaagttacaattgatagttgatttcttagaaaactcagtaatctgaatctagtaattaggctaagttgttctttcacctttaattagcaaaaaactcgcagtaaattataaatcactgcagcgtgcctaggcaatactacaatgtgagaatcaaagatttcaaaaaacttgaaaaagcttaaagtcatcaatggcatgttcaagaaatcaataagaaagtgagatttgaagactaacccattgaggaagaccgttgtagatgctcagagaatgattggattgttaggaaaaattgaaaatctcgaggaatggagctgcttgaaggcgtcgggcttgaggaggacataaatccttgtgttacttttattatttattattattatttacacatgatgattatcaataattaataaagctctgttgtcagttggccaaattctaagtcaacaaagtatataattaatttaagtctaaataaaaattttacctattagtgatttgttacatttttaccttaaacattgaatactcgcatatatataaatatatatggaatacttttaaatgtgtactacccatgaatagttactacattaatttaattataaatattaattttaaaaatattaaactatcaaattttgatataataacgaataatggaatcataaatttaaatttttatgattaatttaactacttaattaaaaaaatataaaaaaatatatctttttacactatatcaaaaatatgttcatataaaaatatttaagtgaaaatcaactttttctttcctttttttttttttttgctaaaaaacttttttttttaattttttttttttgccgatagaacaatctcaactcatatgatataaaaatgagnnnnnnttttaattagatagaaaaattaatcataaaaactcaaaaatttctaattttacctattcatgagtaataccaattaagagtgcacctatatatatatatctattaaaatgactagtagtaaatgatgagctgagagctccttgtatatattttataattaatattaaataattatatttagtttattattgttggattttatgcccgaaataaaactcatttcaata

SEQ ID NO: 164551 - DNA, 1083 bp, Cannabis sativa
tttatttatttatggaattcaattggtttaacgccactgaaacaaagccgaccaagattcatccacgtgtccttttgtgaaagagggggttttagggttcacacaaatctttatttggtttccctcgtatttcactttcatattttctaatcaaaattccagcccttcctttcgtttttctacgacaactctctgtaatttctagggttttgcttcgcctacttgcatttgatttttgtggtacgcaccttcctactctctatgctatgagtttctttctttaatttgtttgtactgcttaatttatatagaattagggctgctttaccacattttggtggggaaatttcagttcttgaagtctgttagttgttatttatgtgaatgcatgatgctttggcgtggtttggtttgaaaagtagccattgaaatcgatatggggttgaagaattgatcaaaacgatagcataattttcatgtggtttttgttactgataatgattgtaatgaagaataaggtacgaattcagtggtgaggtagttcttatttttgggtttaagggatatatatagtgttgcaatggtgaagcattgttttgggcggtgggtcaatcacaatttcagttacatatttttgcatagaagcttacacgattttacagagagaaaagaataataggtgagttaagagcgaatttcatttgttctcaagtagattgccacactaagtagtggtttaactcaattgttagagattatcaacaatttcaccttcaattttagttatgtaactttagtcttaaaagagactagaaaatttgtctagttaatatgggtaaaattctaaatgctgcatttctttcactaagtaacattcactaagtaacattcgttagagaatagtggattttctacgggctgtcttcaaatgaacaaaccaaatattctcattttacataatttgcctaacataaaatgttattttaatttatatttaaataatttataatcaaattgaaaagaatgatcctctgagaagttgtggaaaaatcatttttttttaattatttaaggaaaaaaaaa

SEQ ID NO: 164552 - DNA, 1743 bp, Cannabis sativa
  modified_base (1702)..(1707): a, c, t, g, unknown or other
tagtaaattaagatcctggtaaaagatttcctacagtttccttcttgtcatgtgtaaaagtgttatccatgtgatttggtcaaattttcaggtacctactcgcctaaatatgcaacctcaacttaatcttttttacaatgagaattgctataaggcacgactagtgcctagcaccctcctaggtgtcataccattattagtgtaattaagtatcgagtctcatataatgtaagaaaattacttttaaggaatatcaatgaccaatcatgggacgccacctatagaagatgttgggcacaactgatgcccaatagcaatgctcttttacaattgcaccacaatcctctttcctccacatacttaagagggaaggtcccttctgagagctggaaggtttgagatatttcaactttgtccaaatcataaaccccatcaaagaaaatttgagatttatcaatattagcatttaggcctgaagttgcactaaaatcatcttaaagctgctttaaccgctctcacagacttacaatttcccttgcagaaaagaatgagatcatcatcaaagcacaaaccaataatctttaaacttttgcacataggatgtaatctgaaatcggcttcgacaaaaaccatgtgaagtgttcaagttaagtattccattaccagaacaaaaagcaggggcaaaatagaatcaccttgacaaaatcctcttacccttaaagcttctttgaattatgccattcatcataagatagtattgagtattcttcaagcatactataatccacccaataaatttagctagaaagcacaaagcacacaacaaatcttcaagagctaagactgtctggaagcactcttctcttaaacagttctatattactaatcaacattgtgacatcaaggagtttttaccttcaaggcttaaatgatcctagcaaagacagacttacactacttgttagcattctctggcagatatggaatacaaggaacaatactctcttcaatagtgatcaatttacaaatactgatgtgaaagaatttgttattagatttttgcaggattaccagaaagctccacagtttaatacttgtactagagagcaaggacccaacaaaagctataccatctcccctgaaagctttattttatttgtagttgcagccttcaattctcaatcttgaacaacaggtctcggagcttcgattaaacatggcagtgaccatgaaattgcgggtttctcaattccaaaaccaggtgcatcgtcaccgatttatgttaaagcttaaaccctcctggaaggtttaaattggtgcctgacaattcatttgcaaccaagtcttgttgcatctgattgttcttagttacttctcaaagtcaaaagcagttggaaagataattatgctctttcaagccttgaggaattgattagacagtccttatcctatctctctaatgcctccctgcaacacatccccgggtctgaaaataggaaagctcaccattatgttagggaagcatttcagcgtgataaagactatatctggagagtttattttttttctctttgtgtgtagctgcagcttgtgcttagttctctttctcttctcgccgcagttccctaaaaaaaaaatcttcaaaacacggctaaggtcatccaaaattatatgcacacatctgttggaaattattttaccnnnnnnttagatctactcacaagtatgtagatcggaagagcg

SEQ ID NO: 164553 - DNA, 1679 bp, Cannabis sativa
gttagttagggtgttacaatcaccgtgttgagtcgagtcgaatcttgtcaattctttgtgagtcttttcattgtgtattccttatcgttgatcaatttcatttatgtaggggattgttggaaaaattatatttaatatataataaataactattttagattaatgtgtgaatgagaaattgatgccttaaatatggttcattgatagctattaataaatacaaatttggtcaagaatgtaattatcataataatggtgaatattctgattgatattaaaaattatggtgaagattgtgattgatcatatcactaattttgttttttttttttggcattaattccttagtgttcgcacttggtatttcaccctatatgaagcctataaaaggaggcttcgcctttcattctaaatacaccaacaaaaagagactcactaaaaagctctcttatcttcttcttctttgtctttttcgtaagttttaaggtgataaagtgaaggtattaattcgagtttgttggagtagtggaagtggtgtattttatctgctcgttagtcgttgtattctaggaagtagttgctcgctgattctctagcaccgttcaagtagaggaggcaaatctgctttaagaaaaacgtgtttcacgtacctcgacttttctttcaattactaattttgcatcttatcatttatatttatatttctgttcgtcaattaataataataatatattatattataatatttgtttgttcttctccatattcttttattttttctaacaatatatacataaattttaaataagtaattgcttattatagagtttgatgtaattaactaccccacctagaaaagaagggtagaaaaggtgtgctcttttttttttccttttaaagggaaacgtttcatttagtgagtgttctcttgctttaggaataatataagggtgcgagcatcttgtaattgtatagtgtgatagaattaagtgagaagaaaacaaactatgtaacactttttacaaagcatgcatatttaaggcatttatagatactccactatgtgaaaactaattttcaaatgtcaaatacattatatgtagtatatagtagtgtgtttacaattattcatcgtctctttcttaggtaaacttctataatgacattatgttgtaatatattattttacaatacatttgaccttgaggccataaggaataaaagctaatactgaaaagctagtctagcctcacaatacactactacaaaaacaactatttctgataattttaaaaatatttttttggagaccgtcgctaaaaaaataaagtgaatgtttaaaagcatcgagaaaaattgagtattcctgacgattttaaacactcgtgaggtattcccaacagtttttaagcgtgccttaaaagttacaaatttttattaaagaaaaattgccgatggttaaaaacgtggcctatactaaccgtcacgtgtagtataggccacaattaaaattgttgcctataatgttataagccatgatttttttagtcgtcaattagttcaaatttaaaaatttttaaataatgtgttttccctcgctccaatataacgcgttttcagatctaaaaattttcaagtatataaattttcaaactgtcggtctctctctctctctctct

SEQ ID NO: 164554 - DNA, 1439 bp, Cannabis sativa
attaaatttaataaaacatacatataaacttttaacatcgaataagtatatgtatattatatcactttaacttttttttttaggaatagtaaatattattatatttaaggtccaatgtatttaaagtataaacttttattattataaagtttatataagagtaacaaaaaaaaggtttacaggcaggtccgagtccaacccgaaacccgatcacttgaaaaatcaaactcgaaacccagtcacttgaaaaatcaaacctgaacctggtcacttgaaaaatcaaactggaaatccacccaaaaggtgtaccagattgaacttgactcgcccgaattgaacgagtttctttaaattttcagtttggtcaggtgtcgggtcgatgtgagttggtcgggtttgggtcaaacttgataaaagagttcaactctaatatgcggactaggtctgtgcctaggacccacaacccacattttatggaagcccaaaataaaaagtaaaaagtctcattaggtatttatttgagcaaaattaagtgtattttaaacaacacatattcacagtttggttgattgaggtgtatgatttattacacaatggtatgggtttgagtctcatgacactcttttttaatatatttttgaaagtgaaggcttcaaaattttaatagcccttaggtttatatattctcaaggtcggctctgcatcaagtttttgtggaaatgatatgacatgtttggtgtgtttaaaaatttggtgcacatttttagtgtacatcaagattgattttgggctaagacaggctaggcttatgcttagtgctcacccaaactcatggcccaaatttcttatactcatatatggatatgtatgagaaaaaaaatggtagttttgtaaatattgtgaaataggcccaataatacttaaaacacaccccattatcgaaagttatttcttaggcccacaaaatatcaaggtcgagcctagtgtacatactcgagatcctattatgaatgttattttataaagaattatcaaatgttaatattgattttcactagttactcttagtctaatgtttattttgttttggatgttggagttttactcttaatcctaatcctattctcattgagtaattaggttataaatcctaataaactaatttgaaaatgacattatttttacattgttagaaatttttatggggctaagtttgtaatgaatttatattacaatgaactgcctcaaagacttaaaaaaaaagtttggaattgtggtgttttggagaaaaatcacataattttcaaagataaaaagaattcgagaattgccaaaaaatattagcagtatattgatacgtgaggtgttataatgtcatgattcgttttaatattatgttttttttttttttttatgaatcagcgagattatcattactc

SEQ ID NO: 164555 - DNA, 1359 bp, Cannabis sativa
atagctttcgccaagcaccatagcagcagcaggtaagtgaaatttgtgttctatatgggattttaggattttaattagactgtaaaatttggtctttttttttagcatttagatgtttgttttgtctctacaataaccagtaataaaaataatacccttcaatccttttgagtatgaagagaatttcctgaaaatatgatgaaaaaatttctgaaaggcaaaatatatgatgaaaaaaatttcttaccgttgcttatttcgggattttatgatgaagcaagttattggtaaagagcataaatctggagacctttacattcttgataaactaatacctaaattagttatttgttttggtgtaaaatccccaatcgaggcacattgaaggttgggccacccatctcttcttctacttaaaaagttttctccacagtatcatcatcttagttcaagtcctagagtcaataactcagtgtttcttttgaattagtccattctgatgtttggagtcctcctatctagtctaaatctggtttttgttattttgttacttttgtagataattattctcgtgtcacttggttgaatttgatgaagaatcgttctgaattgttctctatttttcgtgcctttagtgttgaaattcaaaatcaatttaatgtatctattcgtactttgagaagtgatgattccaaaaagtacaaatttagtttatttcaatcttatatggtccaaaatgacatgcttcatgaaacttcttgtgttgatactccttaaaacagctaacgccctcttatttcaaatgcatgttcctaactgttttgggccgacgttgtttctactgcatcttctgttcttcaaggtgaaattccttatagaactctttttaccaataagccactatttcctattgagccaagaatttttggtaacatttgctttgttcgtaatgttcgtccacatgtaactaaattagatactaagtcattgaagtgtgcattatttggttataggtgttataccctttctcgtattcagaaagggtataggtgttattgtcccaatgttaacaaatatcgtgtttctatcgatgttacttttgtggaaaaaaacacctaatattttatcttcaacaactcctactcgtcaagggaggatgatgatttgttggtatattctgtcacatcttgtgcgcctgatacatgttttgatgaatctcttgtaccttcacatgcctcggtcatagctcccacaatgcctacacctccaccacctcctaagcctcctatagtgtacttcatgcgtccacctcctccacctcctgtttcaaatcctgcacctgcatcttcgtcatcagat

SEQ ID NO: 164556 - DNA, 793 bp, Cannabis sativa
aaaataatgttgattataaaatgataaagaaataattaaaccaaaattttgtattaaaaaaaaattaaattaaaattcagcatttcttttgacagagcattatccgcttttgttgggcatcttaaagtcccccttagcactaatctattttgtaactttattaattattgtatttataatattgctaaaagagttctctcaattagaaaaataataataatcaaaaaaagaagaatgagatgaagaagaagaatatcgctaagagagtggtgtacaacacctttcgattttaaatatttttattttagataaaatatttagaacaatgacttgtatttataatttgttaacaataatattttacaatattatgtctttatcatcacacatatatttttatacacataatgatctggaaaaagaataaactatggagagaaaaataatcaccgagaatatattagaaaaagatccttcaaatttccccacatagtacctgaaaaaatgtcgaaagtcagaagattataaatttatgacgaattatggtctacaaatgttcaaaaataaagtggagtcagtcactttaaacttagctgatcataattaaaagttagaagtcaaaaggaaaattcaatgttaataagtgtacctaataaataatatataaatatatatttgtaagtgtacctaagaatatgattgtacataatttcatatatatatatactaactactagcgaggcacgtatactaaattttatgttagttcttttttatgttatttgaaagtgat

SEQ ID NO: 164557 - DNA, 1599 bp, Cannabis sativa
attattccctcaaaatgtatctcacgcaaaattaactggattttctgaacctgactgatcacagttttagaatctaccattttaaaatcaagaaatcgaccaaccacaaatttatttgagccagattttatagttttgattcaaagacttccacagttccataactatattctttttaagatacacttcatataaattactttttaaactattcataatataatttacgaaaaaaaaaattaattttcttctaagctttaacaacattgataattttagtgtctttctcatcttctttgagctcttattcttcattattgactaactttgcaagattctttgtgataagattagatgaacttcttctgctgccacttctagaaatttgatcctatgaatttgtttgagctactagatcttgagtttctgccatcacatcatcatctccaccatcttggttcattttagtaatcattttatctaaaatcaagtaaccaatagtgctaagttttctcataacaaatttttaaatttatactctaaagataatttaaagaaaaaacctagaagggtttgaaactaactatttcgtagcttgacctcttgtcgaatatttctttaaatttgttcaatttcctacccaattacgaaggttttcaaggcattactcatcctacacttattttgaactctctgagattcttagacaagtaatagagaatattctatcacaaattttaaagttaatttttctagacggaaatcacaatccttaaaatttaccataatatcttataaattaattgatatattcatatcatcaaaaattagatatattcagcattatgatgatacataaatcacggaaatatatctaactttaaatattatatcaaagtaaaacacgttttaaaattgttgtaaatataatgagactaatataatatttaaaacaaacgtaatgataaattaaaattaatatacatctattaatatattaatcatactctacacattataataacaaacatataaagagaaaattaattgtgagtgtaattttaattgacaaatatatgaagtgtgacagtttgtggtcctgtaatttataaggagaaatactagtaaattgtacaatctcacatcgcttaaagaatgttaagtgtcatggttctgagactatgtaggtatgggactacacagttaaagatgacttaaatagatttatgagtactacttatatcaacaaggtgtattttattttttggtgactcgttacttaagaatttcaaaattaagtgtgtttgacctgaagtaatcttaggatgggtgacctcttggaaagttttttcgaaaagcgtgtgagtggtgacaaagcacgctggaaatactcatgttagttttagggtcagtcgtcattttagaaagcaactagattgacgtactcgtgtgtaagagcatatatttgtaagagaaggtctaatagaagcttgaaatgaatgttagactatatatatagtgtatataatatagcatatacaatgatatgaaaatgcggaaaatataatgaaatcatatcaataatatatgcaatgaaag

SEQ ID NO: 164558 - DNA, 1327 bp, Cannabis sativa
tttttttttttttttgcagttttcaaaaaatccacgccttttacttctagtgtctgaccataacaccgagtgtgtcactaagcggggaaaaatttggtattacccgaagataaaatcaaaattttaggaatttgaattgttggaaagtgtgaaggaatcccctttcaagccattctttgagagagggccattacagtttttgggtacacttatccatcagttgttcatgcacaagatcaagtcggataaggcagacgaagtacacttttatattgcaaagaagagatgtcaattcagctaagccgagttcgctctagtgattgggctgaacttgttaactagacctactaagttcaaaattgaagagaatgtgaattcaaactgattgatagttgagtactttaatgggtatccatccatctccttgggtcaattgtgcaaagtctttgagagttgtacagaaaaggataatgtgtacaagttggggatggtcttctttgtgatgggtgttctcattgagaaagatgagacgaccatcattctgccatttattattagaatggctaacaacctcgagttcttttacgagtacccgtgggggaagatttctttcaacatgttaaaagaaacttagagtagagactctacagaaaaaaaaaaaaacaaatggataagaatattcaaaagggaaaaactcagaaggattcaaaatactcgtcttatggatatactttggtgttacagtattaggcttacgagtccatcttagagcttggtgacaaattttcgattagaaaaatcgcatcgctttcccaaaatgatcattttggagagtaaggacgtggcacttaggaaggaggaagttatttagttgtttgccaataacgtaagttttttaattctttgtacttggtcacatttatttgtttatttttttttaatttcagcttaataatatttttgtttttatttacagttgacagtgtactcagtttatgttccctacccaacgaataagagttttttaggaacgtcactagaggtgaagcccctctacttgtggacttggaggaactggaatcgggtagtgatggacaacttactcaggacagcttgcgtagccaggcctagaagcttgcacagatgttggaggagaaggtggacccagttcgaatcattagagacccttcaccaccacaatctccaccaccatgtctagaattagatgtctgttttgttgggttttgtgctctaaataaacctcatttcaatataatcagatttacttactaataaagatcataaataacatttttatgttgcatgg

SEQ ID NO: 164559 - DNA, 1334 bp, Cannabis sativa
  modified_base (1287)..(1301): a, c, t, g, unknown or other
aaaataataattatttttatattaatactatattatattatgtttcttgcaacgtgaaaatcggtaaaaatgtaactgaaaaatctataaaagaaaaaataatctgaaaaaatgtaaaacaataatacgaatttaggtaaaaatcttcaataatattcattaatatatgtactatttaccttaaacaagactgacccactttctatctcccaaaagggtattcaaatttcaaaaaagttggtacattaggattatacatgagctgtttgttgaattggaaaatggtcaaaattaagggttttaattattttttgaaatttttatgtagggttttcaacagctagtagagcttgctgtggaaatgggggccaatttgctggaataattccatgtggacctacttcaagtatgtgttcagatcgatctaagcatgtattttgggatccttatcatcctagtgaggctgctaatgttataatagccaagaaattacttgatggagagaaaagatacatttctccaatgaacctcagacaacttaaagatctttgattaattatgttttgttatttttttttaagggattttcttcttgtaataaagcaaatatatgtttgttctgtcaaatgaggttttctattgtctctgatctatttgttgaactgtcacaaacacacccaaaaagaaaagcttcttttttcttacctataagacattttgtttttattcttttgtgttttactatacatatgtttttttttagaactagctagtttcttaacttactttgattaattaatggaaggtctttgtctacagtattctagatatgttataactaaggtaggtactaaactcatacaagtagctaagttgggttgaaaaggttgttcaacgaattggttcataaggtaataataataaatatgaccatataattagaagtttttaattaatatgatatggttatatcacgtgcaagccttctcatcttttcggttgttggaatatttagaagtttttaattaataccataagatattgttttcactttttaccttattccttaaatttaatagtttgtttgacattcttagtgtgttttttacttcaccggaattcagtaaaaattttcttactaattcatgaatggaataattataggtcttcttatcatatcattaattacttcacattttttccaagtaaaatgtttcttattgaatttgatgcgttgtcacattatttttttttatatattttttaaagggtgactattcaatggtnnnnnnnnnnnnnnnaccatatggttacatttttttttaacctgtaat

SEQ ID NO: 164560 - DNA, 1102 bp, Cannabis sativa
aagtaaggaggtagattacttaaactatttttcttctatatttttataattttgcttttgaatttttacaataaaaccatatttttgtaaattttaccaaaaaaaaaaaaccataaaaataaaagttctccaatatattatgagacattggtatacatattagaattgtttttataaatgaatacggttgtctctcctttcaatagctaaatcatttagttataccaaaaagttcccatattttcaaaaaattacttgtcttgtaatttttggtaaaattagtggtatggattactttacataaaagcccttatgacacatttttagtcacttattggtgagtcaaatttgaaacttagcaatcaaaaatgggatgatgctggctggtattatattatttattataaaatttgaattttaattaaggtaaaaacttaataaattaaaaaaaataaatagaagaaaagaaaacatacaattggatcaggagcatcatcttgtttacacatgacccatgggacaccagtttgaagcccaacagccattgatgcagcccatttaacataagacactcccttttcatgaaaagctctttctactgtattgtactcattctcaatctaaaatcaaattcaataaattctaaataattacattatatactactgcacaaaaaacatagcaaaattatgtaatatatccctaaactggtattttggtagagtccctttatctttcagcatttaatgacccttcatcatttatttttggcattcaagaatttttttaatatttttctatgatcttatatgtcataattatttataataaattgtaatttttaaaaaatttaaaataatttacaataataaaaataaaattcatgtagttgtttaccaatgtataaaaaaataatcactcatacaataatatatttaaactttatttttatactataaactatttaaatttttaaaattttttttaagtagttctgaataattttattgtacaataaactaaaaaattcgcctaaatactgaattagatgtactataaatttacccaaatatatatacagtagaacctctattaaagaata

SEQ ID NO: 164561 - DNA, 541 bp, Cannabis sativa
ttctttattagagcacaatgaagatattgttaagtttgagaagaaaacacgtcaccttggatgtgacataaaaatttatgctgataacataatatcaagttgtgattttgaacctactcatatgcgaacctttttaacattattaggtccaacatataatacaatcagtatttctaagaaagtagtccagaagttgaaatctttgagagttctatcttttcgtggtttttatatgattgagttctctgattcaattggtgaattgaaacatcttcgctatttagatttttccaacactggaattgtgattttgcccgaatttgtaactaaattgtacaatttggagacactgaagttagaatattgtaatcatcttcaaactatgcctaaagatatgcatcatcttattaatttgagacatcttgttatcagtggaaatagtctagtcgagatgccaagtcaaataagtaaattgacaaatctccaaattttgacaacttttgtggtggggatggatagtggtgctaaaatagaagaattg

SEQ ID NO: 164562 - DNA, 834 bp, Cannabis sativa
tctaaagccatgcatgattatataattataattagtgtaaaagcaacgaataataacaacacacataagattcttatagctagattattttcttctttaatttcttttattattaaattttttaattaattatgattattattattatagtcgggatgttgtaagccaccaacccaatgtggatacacatttgtgaacccaacatattggataagcccaataaacaacgcagcagatatggattgccttgcttggaacaatgaccaaacacagctttgttacaattgtgattcttgcaaagctggtttacttgccaacattaggaaagagtggagaagagctgatattattcttctcattactttgattgctttgatttctgtttatcttattggctgttgtgcttttaggaatgccaagactgaagatctctttagaaaatacaagcaaggttatacctagctaattacttatttgtatttgctgtaaattaaatttgggaactactattcttaattaattagttatcctagctagtttttaactatgtttatttggtgacaatggggattatttatgttttgatgttattactccactactcttgaatcttgattgttattgggtatatggaaaaggaaaaatttgtttgtttctaattttccttgttattaacatctataatctttgaccaaggaaaagtaaaagtttgctatttgaatattgttgtgttttttatcttaaatacactacaaaaaaacagctacttttagtgacaaatttttagtcacaatataaattttttgtgattaaatgtgacttttggtcacaaca

SEQ ID NO: 164563 - DNA, 1049 bp, Cannabis sativa
gaaggggatcaaacatgtaaggaacgcattaatggattggtacgtctgcctccaaatcgtcagcagggatgtcgattctgatcacagttggtaatggagggacggttgactgtcaatcgtcattaatgttgaaccaccacgacaggagaagggtggaaaagagttttcgggtaaaaataaatcagaggattcatcattactctgaaagtttgatgaagatgatgaagaaatctgggtagaaagcatgcttgttgattaggaggatatgcaaaggtgcagagagaatagcccttacacatcataagtatatatacagatcaatgcttgtcactaaattttcacaaaatttcttaacccttcatatagcacgcacacatatatttataggaagagagtttaatttaattgactgaacagatccttacgataggagaatttgcgtatctatatacttgaagcacatatattcattataaaattttttggccattacggctaccttgtgtatctcaaatattcttttgccaggatcatttatacaagctacatataaagtaaatatatataatatatatgagtacatatatcgagacccgcatcaaacccctattttcataactttggtgccatcgttgaattcataccaatatatatttacaaagattaaaatttggcatgtatatatattgtatacgatttgagtttttaaaggaataatttatcccattgggatcactttcttttgcaaccttttaaaccactactgactcatgttttctttcgttggtgatttcaaagtaccttattttctttacgtccaatgattcggtgtacatcaatttatttttgtatatatacatatatatacgagtcgtcttgagcataaatgaggtgtaaatgagattaatttattcttttttaatcaaaatttatatttgactgcaaataattttgacagtaaattaatttgtggaatggggggatcagcatccaatttttttttttttgtggaatgagggcattctatggatgagagcatccaatttttt

SEQ ID NO: 164564 - DNA, 1102 bp, Cannabis sativa
caagttatttagataatgtttatcactacatattattttattagatgtgagaggttcaattcaaatttcaaacccctaccaactttgggaataaaaccgaagacctcaataactatctaagatttgttggcattgtattatttttggttaatattattgtgttttagtatagggaattatgtaagagcatctcaatggaggttgctattggagttgttttgccactatagttcaattttgaagattaatttcatgtgaagtgttgcttaatatagataatgactatatgatattttttttataatttttttattagaaaaaagttcatctaaaaagtcgtttattcaatgtgatgtgtgaccatggtggataacttttaatgttgtcaactattaaagtattttcttaaagaaaatgtgacaaattttatgtgaatgagagaaaaaataaaaaaaaaatattttaagatggtatgtctattttgataactataaatgttgttttctatttgagatgctctaaatacgaattgggttattttttatacgacacataacaatgcgaatctaagaggtttgagcacgattaggcaaaaatataagtacaagcacaataccacacgacaaaatattttaaattggcaatacacaacaagtttaaaaagcaagacatgtattaaaaaccttaaaatataataagaatattattctaatgatttttttttttttttttgtaaaatatggctaaaaagttatataaataataattggttataaaaaaaaaatagctatatgtttagtaattatttcattaattgtaaaaataaaatgtgaaaaatcagagcacaaatttaactctaaataaaaaaataagctgatctgagtaaaacacggtacgaatttaagcacaacacgatagcacagtacaatacgacccatatttttttatttatggcctaacacgtatttacaacactattataggatggggtgcacaccaaaaagaggtgcatcactgcaccctctcgtattttctacatcttaataattttaattttatttgtattaatgtaaatattattgggaaattctataatgcaccc

SEQ ID NO: 164565 - DNA, 1051 bp, Cannabis sativa
cggctgccatacaattcgtacaacaactattttattgtgaggtcgtcgtagttaacaaactgtcgtgcacacttcaaacagagccataaaacgtcttaaagggagcaatatagtccgcgacttgccaaaatctttcatttgataattcgttctagttttatttgttatttggagtaatgatactcccacagtaatataatcaaagtaattatttattgattggaagtgcaagcacatacagtaattattatgatatctacccgacactgcagtaataatctgaatcaaagagacatcttataataactagtcatgttggttttcttaatcataaaagaaaaaaggattagattactacctaattaaggaccggggtagactccaactgctatagccaacctaaagaaggatgttcaacgggctttgatattttctgacaagattataaaaggtgatataacattgctgctaatttctcaaaatataatttaaactctatttttcttaaaatattatctttattatatgtatttgagcttgaacccttgaattcaaagggaaaacaggaaaaaccccatataaatttacagaatggtattgatttcttcttatagtccaaagcaatgccataaaatgtgagcattctaagtatagggagcatatgtcattttctttctacaaaactaaccacataaaatcattgccaaacagtagcaaaatgcccaattcaactatagtctgacaactgctgttttaatacttactcaatgaaatcttttcaatattatggtttattcaatgagtgactatagaaggaacggagtcaaaaaacatggacacataacacagtaatatagtattcattcttacttgataaaaatacctaggggagaaaaagaagaaaagcttatttaatttggtagaccagatattcaggtgaaaagattgaggatggatgatataaaccaattcccttgagtacagacttcagcaacgcagccaaaacaatagaacaaataacagtagcactaagaaccaatgaactgatatt

SEQ ID NO: 164566 - DNA, 542 bp, Cannabis sativa
cataaaatattaaaacgcttgtgataaaataactgccatatttattaaagtttttcaaaaattcacacatttgctgtaatttccacaattatgaaaggaaggattgggcttatttttgttgggctttaaaaattaagagcccagtttaatttagaccatttcatttggttttactccatgcatatactataataaaacaactttttcaagaaactaataaacttataagatcatctccaatataaattttataacaaatattttagcgtaaaatgattttattatgttatatttagctctaattttataattgtacttcaatgtttaaggtacaaaatataaaaaaaatatatattttttttgttatttttatacttttactgttataacttttttttatattttttattgtaccaagttttacttttgataaaatttgaaaatgatgtgtttcagtaaaataataaaacaattaagaaaactaaaaaataataccatgacttgaacaaggtattacacctttgtccaaaagcttatttccc

SEQ ID NO: 164567 - DNA, 659 bp, Cannabis sativa
agctgccgccgttaaataatgatctgagggagaccatccgaaactaacggcgtcgcggagtgagttgtagacgatcatatcctccgaatcgttaacttgtaacggcaagtctccccactggtccgtaagacagggggacataagatcagtggttattgtagaagtagaggtagaagttgatgatgatgaggaggaggagaaattgggatataataattggggattgttaaactcgcctaccatagcttctatcattgtgtttttttaggatgaaggattatctgtgttgggtatgttatgtatatatacactcttatatagtggttaggtgagaagataacatgaaaaatgcttaatatatatactaaattatttttgatattataattttctactttactgtaaagtttttttttttcctttttaaatatctattttatggtggggtagtagacttgatgaattttcttctaggtagtggaaaatgttggaagttggaagtcgttgaagtcacgtgacttaaacaacatgatgtcatgatgtgcttatgtaattgcgcaatgatgcaccacatttttaatgggaaatttgattttctatacttagaaaatcaaaaaatttgatttctaaaccaataatttaaaccctaaaaaaactat

SEQ ID NO: 164568 - DNA, 1903 bp, Cannabis sativa
aacaagcggtgatatcgattaatgttcaatgaattatttcaagtgaaaatcttacaaatgtattcacaaaatgattaccatcattaacatttgagaagacgacacataagatcaaagttcgtcgattagaagatctccatgaatgccaaaatgagagatgtttaatacacactgcactatttttcccttgaccaagtttttatcctactaggttttctgggcatgttattaatgagatagttattataatatctaagggtgagtattataaataatatatatatggatgttcaaatattctaatcaattttttattgtaattataattattttttttagtttcttattatatgtttcacatttttgtataaataaataatcactccattgaaataaagtatttcactttcaatatctctcttcatcttcattttcttctgttactctttattttaaattactttataacaaaaataatatttttataaaaatttgataaatatactcttaatgagaacaaatcatataaattaaatacattatattaaaatatccacatgtatataatgcctatatgtattaaatatcaaatccaaataatttctaaaaagagattataccacaaattttcattaactaatatacgacagtaaatgagattatactacaaattttaattaattaatattcggcagccgcattgagtatcttatgctagaatgtacggggtctgaggaaccctagtgcagtaaatgcattgtggactattgtgcccaagtattcaccaagcttggtcaacctgtcgcagactaagctttgtggtaattgggaagaaggtattccaagacatatcaatttttcttatagctttcatgtttattgtgtgggagtagtggtggactcttatggatatgaaatagcaattgggatgttactgttaaaagctactctactgaacatattgatgctcttgtacaatgtccaaggagtaagttgtggaaattcatgggattttatggcaacccaaaaaactcacctccaaaaagagtctttgttactttttcgtcatataaaggaatgttttaatctaccatggatttgtgggggtatttcaatgagattttatctatgcatgtacaaaagagtgggacagacagcgatgttatgggaatgactgagtttcattaagttcttgatgcctgtatgctagatgacttggggtaccaatggccaagtttcacttggatgaataaaaggcaaggtatttcacatcaagaatagttagatcgttttgtgtgcaatcaagcttggtctgagctgtgtccttcagttcaagtgtgccatggtgactttcttattctcaccatcaccctacagtcattaaacttgagaatgtttttctactaagtcatgagcaagttaaacgacaattccattttgaacctcattggcttaagaagatgaatgctgatccattgtgttcgaggcttggaaaagatgaacgctagatgtagccgactctttgggactttgcgaatctcttgaacattgtgaaaattgcctatgaactttgaataagcaaagatttggattgtcatcgaagcaagtaatggaaactcaaaaggagatagataaacttttgaatgctaatgctctcaatgtgcgaatggataaggtgaaaactagacatggcaaaaagatccattcattcgaattgggtcagtgatccgatccgacggatcattactgatccgaaacattcagatagttattggatcttggataagacccacccgccccgcttaatttttttacggatcggatctgacccaatccgttttaaatatatatttttttttaaaaaaaaacatttttactttttaagatatttttataaaaaaaa

SEQ ID NO: 164569 - DNA, 683 bp, Cannabis sativa
gagagagagagagagaggactatacaatgaagtggggaagagaggagatggagatattgcaatccgacttctttttccaattgatgtgaacctcacttaaagccaaccgaaatagaaatagccccacaaaaggccaccccatgtggccattagtttgttgtttccatcactttttaagtattttgatcaattcctttttttccccatgtttaagctctattgcagtagcccctttctatctccatcttccgcacaagaaagcctagacccacaatgtgcccattgatgacaaccttcgtgaggagcaaatatttgtagaggaaaatttgaaaagaaacatttagacatttaaaaacacacacacacaggggacttgatggttggtattagataaaggaaagttttggtttttatattatatattgagttgtaacactaagtggcaattttaacacaatattaccttccttaatgagtttttacttttttcctttctataaatacttgagataaattattgttatccattatttcatgcatagatcatcactatccaagtgggccatttggtatggggttgaacttgattagacatgctaattcttttcaagaaaaacttacaaaaatactagaatttgagttaattaatacaaaaatactgtcacacggaaatcttttcaaaa

SEQ ID NO: 164570 - DNA, 518 bp, Cannabis sativa
ttctcaatttataattatttacaccctatcctatttaatgcaatgacttgctgtgattaatttgttttaaactctctattagcacacccaagtcattgcattaaaagggaaaaccaatctaatacagagtttaaaacacaaagaaaataacagactctacaagacataacaatagactgaaaataacaaccaatgaaagaaactaaaacaatagactgaaaataagataacaaaaaagccaagatagctaaacatcctagcgatggtaccccagtattcagtccaacttaacctgaatgtttgttccactcgacatagtcattaagcacctcctgatccaggtcattgctctgaataagtccaatgactcgaacctctctcgcccatttcgcaatgttatgagctatgaagttgcattgtcgtaagacatgcccaatctcccaatttttaaatctcctgcaaagctggtgaaaacgccttctgagatgcactaaattgaacttgattccccttgctgt

SEQ ID NO: 164571 - DNA, 797 bp, Cannabis sativa
tctctattacttatcaatccggcccaagaaaaggaatcagcccactaaaatgcaaccctaatatctaatataaaaggtatattatctcaaacccttcttcacttattcggcagccacaaagaattcaaatctttcaaaaactcttctctctctcttatggcagaacacaaagcaagattttagggttagggttttatatttcttttctcttcttcttctttacagccgcacctaatattagggtttcttcaagctctcatcttcttcatctcactctcatggcagctagggttatggggttctaatgggttctcttgtcttctccttctacagaacacgaattgggtttctagtgttcttatattttcttttcttcctttaaacttgctacagccgaaatattctagggttagggttcttacaagctcttttatttttctcttttaatggcagcaaagaaattagggttttctaggtttctcttttcttctctttctttaaacagccacgggttagggttcaaaggggttattttatttttcttttcttcttctaaatggcagcaaagaaaaatagggttttctaggtttttcttatttcttcttgctatattttctacccgaaaatacaaacccaaaaaaccacacaaccattcttcaactttcggccaaaacaatacacacccgaaaactcaagaacataaacacatacacaaatacaaataccagaaaagtaataagagtgagatgagagaatgcaaacagtgattaagaagatgacaccaaaactttgatctc

SEQ ID NO: 164572 - DNA, 1199 bp, Cannabis sativa
gactgctcttgttcttccatcaaatgaaaaataaacataaaaaatttatctttgtcatatctaatgtgtcaaataattaataacaaagatcagcaaagatacaaaaaaaaaaaaatatgacacttgctaatctactgtgttgttagagatcagcactgattatgagcttctcaaggtaattcattcagtaccatatatttactacatgaatttataactaaaaaagtaacaaagatatgtgatgcatactcgaattgcctcaaagtgagattaaaattcataatgtaacctgtaatgtaaacgaccactaatcaaaagatgttacacaaaagaaattatattaccaacccagggagagtttcatactaatgatgcacatatacgtagaccaaattggttaatgaaatctaaaaattcatctagtaaagagaaagcaattaagcagtgtaaactcttgccttgactttgagtgattacagtaagatcaaactaaacaaaaagcaaactaaaattcccaaacatacaaatattacaagaaaatataaattaaaggaaggtccatgcagctcatccaagcaagtaagttaggagaaaatgatttcaaaatgaataaattcttgcccctttcaggatactaatgatttggaaattgtatttttctcattaagtgtatatatattgaaactacaataatatttgggaatctaaaacctataacaattgctatgaaaatcttaggtatggtttcaactactatatgcttttacttctattagatagtaggcagtagaattgcaaattagcagtacatagtatttagtagcagtagatagtagtagtgatcaatttatcagtttcaagtggagcaataatagtagatagtagctaatttgaaagagaccataaacattataaacaaataatagtagcagtagtatagaattactcacagaagttgtcttattgctgccacatgtccttaaattgtgccccttgccgccacaaaccgaacacttaattatcacaaatttcttcttcaatttcttgcccaaaacaagttcctgaagttcaagttttctgcttttctttggccttcctggctgcttcttgtgaattggatttatcattccaatcttcccacttcgaggccactcatcttgatttcgaattgggaatatctggtgagagtaagctttcat

SEQ ID NO: 164573 - DNA, 1213 bp, Cannabis sativa
aagtttgacacaaatattaacaagatatgtttattatgtggggataaagatgaaacagttagtcctctttgaatgtttctacaatacacaaagtcttaaaaaaaactaaagcactgacttgattggcatgtctaatctgtatattttgagcaaatgctgaaaagtatataattttatatgtacttcttgacaaaattttggatatagattggattgatttgatttgtaatcgggatataaaataaaaaacaagtttgtagttataaatttaaaagagaatcatgaaataaatattaaataaaagcgtgaactaaaaatttaaaaatcaattttatttatttgatcatgttttttactttcttagtttggtaatatttttttaatttttttatatttaaaagtagttttttttatatatttttacggaagtgcacataacaacttatataaaaattatcatccttttgtactttttgttaaacattttcctgacaaagcgtcttcttgataagagactcttattttcttacaaatcttttattgaattttctatttttttttagcctaatactctattattaaatagtttgttttaaagtcttattttccaacacaaaatgaattaaacaattctcacccattttaacatactggactttaaattcaaggaccaaactttctgaagttacaagaagtcacaccatgaaaaacttattgagagagtcctttccacaaaaacagcaaatttattctctaaaaagtttctccaaccataccaaatgcaacaagataaagtaggattgataaacacatccttggatataagacccttcaattaaaaatatatatatttatatatacaaagtatattttgtggataaaattgatcatgatggatggaaatttatcctatatataattttcagaaagagctacattaagctaattggttcaaaaggaattatttaacaggataaataaaattatacagcattataacaaaagttttctgtttggttcccgggaaagttagggaaaaaacagaaaagaggaaaatagcaataaattttaggcatttaaagaatacccaaattttagttcaattaaacataacccagaaattctttgtcggaaaaaacaagagctgaagaacaagaaagtgaaacaaagaaaggagaaaaccgtacgagcaacaggttgaagagcaggagag

SEQ ID NO: 164574 - DNA, 1024 bp, Cannabis sativa
  modified_base (877)..(896): a, c, t, g, unknown or other
cctcatgctaatgccacagtgaaaaaatggtgctacaactacattgcagattataggaagcagctagtgtcttcatctccaaaacctaagaacagtagtgttcgatgacaagttgtaagtttgtagagctttgtcggctaacttaattattatctccattgttaggtgtagtttcaatgaaattgtcctctttcaagaaaaaaaaaaaagaaaaataaaacaattaaaaaattaaataaaaataaaagttgatgaatgcatacacattgaaatatataatacaaattttaaaaaaattaaagaaaaataggtaaatatggaaacttttattgttactaccctttatatttttatatttataaatatacttcttcaagaaataaactatttttttttttgatagtttatttatagttgtatgatatttaagataaaattatttttctaattatttttagttgttttatcatttattaataatttatttataattattgtgaggttgatttatcattattttttaattttttttttactatttgataatcaaagtgtattttttaattttaattctttcaaagcgtatttttataattttaaatctttcaaagtgtatttttaaaaataaaacatattaggtcgtaaaattataaattaaacataaaaaaaagtagggactttaacaaaaatactagattttgaacaaaaatttacaatttaatatcgcacgaattttttatataaaaatactgtcttttaaaataaccataaaacaacaaaacaaaacaatcaaaacaacagtacaacaactaaaaaaaattgtggaacaataataaaaacttaacacgcactacagaaaactgctacttttagtgannnnnnnnnnnnnnnnnnnnaaattttttgtgactaaatatgaattttcgtcacaaaaaaacatacttgcgtctaaaacatagtatttagctacaagttgtcattaatttagttttagtaacaataagtattgtgactaaaaacacat

SEQ ID NO: 164575 - DNA, 628 bp, Cannabis sativa
ggggtttggttatgtatctagatctgcgtctgcttccgggttgtagtttgggtctagggttcgagtcacggggtctaggtcgcagttcgggtctagggttcaagtcgtggttcgggttcggagtccaaattttagtctaggtatggagtttgaaatccgggtttagatttaggtttgaggtgtaggtttgggtttggggtccgggttcgaatctgagtccaagcccgagcccgaggtctagggccggggttgaccccaaaccctttataaacattataatataagctaatacatatcgtttattaggtattaaataattcgattcacattgtattaaaatttatggtcgtaataagtaatataatataatgtttattcaaatataatatcatttattatttaatactatacaacatttatacggcctatcaaatgagtcgtatgtaatttgttactttatctatttatttttatgtattttattaaaagttatgctagctttgttcatttttttttcttcattttgcatattaaagatacttatatatatatactaggtgattgttacgtgccaagtcacgtagtgttagttttatttaatattttagttttttatttgaattaataa

SEQ ID NO: 164576 - DNA, 2090 bp, Cannabis sativa
ttagtaccttttcaactgagccaatggtaatatatcgactattctcatcttcgtaatgaatgtattccattactttttgaagtgcattctctctcatttttgtaaaaggccaaataccagtaaaagtctcagcaaagtaatagacactatcccacaagagacgttgtatcttaccatgggggtagtagttatcagtctatgcatggttttatcaaatttcattagaacagtataatgtataaataagcaggataacaatttaatttggagcaattacaattagggcacactacaaaaaaaaaaaaatttagtcataataaaacttgttgctaaaagtaagaaaattataactaattataatttatcatgcttatatattgtggtgaaaattgcaccctgtactctttttttgttaacccatttcatttatacttttcttttctatatatatatttaatttatacctttttttatttgatatatcccgattatatatacttttatgtaatgaaaaaaaactttcctcacctccctgaacagtaccctaattatgtgagggtataatcggtaatggacttataaaagggtacatttcaattgaatttaaaataaagctattttttggttaactgatgaaaaagacactatattttaacttacctttatattgtgactaaaaagtctgtggttatttagttataaaaatcacaattgtgactaaactaaattagtgataacttgtatttaaatactatattttaatcataagtaattttttattgtaattaaaaatcacagtaactcacaaaaatttatgttgtgataagagaaatttatattttttttttggtagtcgaagatattattaaacgatttagaacgcttgtagtgttttagttttattttaattttcttttataaaaaaaggatcattctcttgatttttaaaacttattgtatttcaagtaattttaattttttttcaaatagaatttgtgtaaaataagagaaaatatcataatgttacataccataattaatattataatctcagctattaaaataagatttgagttgattttttttttaggataatttcatgacaagtacacaaaaataataaaaaatttacaaaaaatccggtttcactgaattttaaacatttttacgaatttttttattttatttacagaaaatatagtctttttatgttgtattcatgttaatttgttgttatttgtatgttaattttttattgttgttttgatattatttaaatgttatttttacgtaattttcttattgttttcgtgttgtttttatgaaaaactgtaaaaatgtaaaaaaaaaaattcattaaatgtaaaaatatatatttttttcaaaaaatagtgacttatgtaattatttttttaagtaaatatatatatatatatataaatattaaagtattaaacttcaccttggcacaaacatgacgcatattggtccatttgatttgtttgtaaggctcattgtagatttcttctctaagttcttcaatcaaaggtgtaattgggccaacaaattttttcccatataaatatgacattggcaagtaagtcagtcttgagtagcacatcaaatttgctgcaatattaatattgtcaccataattaaaatatgcatatagctctctttgcagatcatttaacaaaagttaaagaaacattacataaagaaaaataaatatttaatttgttaaacacatatttattttttcaaagaattcttataaaatagggccggccctgaaatataatgagtcataaaaaaaaattatactcttatttagaaaaaatatggtatttttcaaaattaataaaaataattgtataattttaaaacgagaatttttttgttaaaaccctaagctagatggccctaaacacaggcctaacctaattaagccgaaagaattcttataaaacagggtcggccctaaaggattcttataaaacagggttggccctaaagtattctcgttttaaaggattcttataatacagggctggccttaaaatataatgagtcatagaaaaaaaaaaaaa

SEQ ID NO: 164577 - DNA, 876 bp, Cannabis sativa
aagattaataatctaatttgagattaagagagcaaaaggttaatcataatatcatataggactataggagcctctatgaaatttccgcgtgtagaaaatatgcaacaaatccaatatctatttatgtctatgcctttatttttggattgataagacatcacaccatatattatattataatataattgatttgccaatacattaaacataaccatttgtcgtatttctttgaagtgttttggtgaaattaagacaatcttgtgtatttcattgtcaacgtagaattatttattaattcatcttattctatgtcttttctatattataattattattaattatgaggggttataataaataataataatatagacaaaattgaaccacattgcagtgaaattttgacttttgaactaaaattatcaatagctttattattaattgaatgtgttaatttctagaacaaaactgtgaaatttggttctaaagcaccattggagggcagacacgtacgtagattgtggattattatgatatataatcactgtttgattgaatacctatccctaaatcctcactaagattctcatacaaaaaagaaaaaaaaaatacacatttcaatctttgttatcaatctagctaaataaaagaacatcttctctcaaaactattacacaactatgatacttatttaatttcttatgatacttatttaatttcttaattattagcaggagcttgaataaatatgtataaaaatcccatcatttggttagatattaagaagattctgtcacgagcagtgacgaagccaaaaatttagatgagtgagggcttgaataaatattaagtcaaaactaataaaaataatgataa

SEQ ID NO: 164578 - DNA, 1456 bp, Cannabis sativa
aatgatttgacctcaagcagtgtgctacactccgcatgtccttccatatccttcttcaggtcgagttcactcgcggagaggaaaatacaagaaatacccatcgtccagatagaccctcccggagaaaacaagtaggttattattcatttgaaacaataagctcttggagtaattaagatggcttatctcgtagtgcggagtccattgtcacctgacttgttcctgaactatcacgtattttgggagaaattataagcaacattatgtatttattttttgtatggactctataatcgagctaaattaatgttattagtgttttatcaataaattattttaaaaaatgagtagaatgcatttgtaagggatattttgcagtgatttttataattcaggaggagttttcgaaacacagaaaagtttgggggcaaaactctacaggagtcatagttcaggaggataaatcatatttattcaaaaaaatgttaagtttatgtcggttacaaacttaaaattttaggtactagtcttggaatggttgtgttaatccggcccttgctgaggcttttggtgtgaaagaggtactaagttggataaaggagtcaaagctttatcatgtcaatgtggaatgggatagcctcataatagttcaagctttccggagcccggtgaatactaattctcctttcggttgttgcattgcagaatgcaagagaataatttcagatttgaatcatgtttgtttacgttttgtcaaacgttctgctaaccgtgtggctcatggtcttgcccgagtctcatggttatatgctgagcgtagttattcggtggacactgttccgaataacattagtgatgtaattgcacaagaattgttttaaataaagttatcagcttttattcaaaaaaaaaaaaaaaattaggtacttatgccataattatctcatttattaattaacatctctaatggttaaattttggaggatgtttgttgaggtgaataacttaggtgccgtttggtaacacttttatttttttaattttttaatcataaaataaaagtaaaatttttgttttaaaaaattttatttttgaaaaataaaaatacgttctgtaaccatttttgtttttcaattttaaaaacaaaaaataaaaatgtgttatgtaaagtttatttattatttttagtttttgattttatttaagtctgttctaagtccggggtcagatttgggttcgggtcagagatcgagttctgcgccagggtcgtggggcgctagggtcgtggggagggatttaggtctgaatctggtcagaatctaaaatattaattaagaaaaaaaaaaaaagctgtttacaaaaatattaaaagtgattttgttttgtttttaaaattttgattcttaattaaaaaattaaaaaatgaaaatatttttatagaatatgtttttaaaaa

SEQ ID NO: 164579 - DNA, 674 bp, Cannabis sativa
tctatttaaactttgacactagtgattggttttgtggaaatgtgagatcaaagaatatatactatattatatacacggattgtttctcaatagtgattacccataatgagtattgttactaaaatttaaatttttatgtttaattttgttatctaaaaaataattaaaatctttcatttttgtattacatagttgagattgttccatcaaatcaaaagagagataaaaatattgcgtgagttagaaaaaataataaaagtaaatgcaagttataaatatattttgtatataatgtgaaaagagaaatattttttaattaaatagtaaaattaagtacatgaacggtttaatttttcttttatattattggtcattgtattaaaattttatttttaaaaattaatatttttaaaagtaacatttataattagttattagtttttaaaagttctcaaatattgagaaataatctatatattatatgaatatataaggttaattaagacttttgtctcccgaattttaacatgtactaaattatacctcttaaacttttaagatcattaaaaaatttcccagaactattgagattgtcggatttaaggactcttgtctaattttagtaagaaaagtccaacatagatgaaagtttagggaacatgatttggtacatg

SEQ ID NO: 164580 - DNA, 1619 bp, Cannabis sativa
atatatgttaagtatacaatactacttataactaatgctacaaaattagagtatttttcctaattattaattgtgttagagaagattggttagaaattctttattgaagtcattttcttaccaacaaatctagaatgaaagaaaatatatttaaataaataaagtaacttattattacacttattaatggattagatatcaaatcaaaaccgactgtcattttaattaattatattatgtttagatatagctaaaatagctagggtttgttctaacatattaatttgggtttttattattaattaattaattaatcaataagactccaacacgtatgactcttctagctacttcttcatgtgaagattcaacaacaatattcttgaattcatttgctcaaactagttaattatagaatttataatcaagaattatgttctatcattttcaccataaaattagtattaattcaaacttaaaagtattcttccaaataaattaattaactaattaatgttaactttgtatttagttgattttacaatattaattatatgattataataaaagagattaatttaatgctaattaacctaataatgttagttattatataattatgactaattagtatttttgtgttcactgaattttgacatatactaaatcatgctccctgaatttttttggtcgttaataattcttcccgaacttttgagattgttggatttatggacttttgttcaatttcattcaattttactaatttggtgatcatccatgtactaaattatgctcctcaaactttgatatctactaaatcataaactttgacatgtattaaattatgtcctctgaactttgattcatgttaaactttttttttactaaaattagataaaaaaaatttaaatctaacaatctcaataattcagagagaatctttaacggtcttaataattcagagagcatgattttgtacatgtcaaagttcaggggacaaaaatcttaattaatctatatttattgctttgatttataattatattgatattatcaatttaaacaaattaagtagtttcatcaaattcttcaaaatatatgtagattaaatatttatatatgtatatatgaaaatttatacattatagttataaaaatttaaaataatttataatgtcaaaaaaaatatttaaatatttaactgcacttgtacaaaacaaaataaacatgcgtgaaattgaatttttgaattcattttttaacattgtaaattattcaaatttttttaaatatattaactgtccactataactataatatagacaattaaatgtaaatgttactataaataaatataaataattttggaaaccctattatgatcacttgtggtgtttaaattaagcaatcacttgtggtgtttaaattaagcattaaacccttccaatacgctatatttatagttcatccaattacgactaagtactacttaagatttatatagagcattgttattaggcactagtagtgtctaacaccttctcgatatgtcgcgttgtgattggctagcgatactctctaaaagttattggtttcccctgaactttgacatgtac

SEQ ID NO: 164581 - DNA, 1363 bp, Cannabis sativa
  modified_base (1312)..(1314): a, c, t, g, unknown or other
tgaaaagcttttgagtaattttgtggagagcttaatgatatgtttagtatgtgtgtaatggtaaaatttttagaactctttatactcttagctcaaaattagatttttcatcactacattaaataatatttgttatatttttttattatttaatattttatctatattgataatttttattttacaattttgaggctttaagagtttgggaacctgaagcgcacacctaatttacttacctttatgatcggcccttatgggataagaaatggaaataaataatgagtttacctacactaatttaagattaacaatctcttaagattgaggaaattatgatcacttttatttattcttaaattataaattatgatatttgctctcatttactttattatttttttttttttaatttagggtgtgtttgaaagtttttgtataattattaagtcaactaataattatactataatttaaaatagtgttcgaatatgttagtaaaataattagtaattatatagaaaaataataattttttgccgttaatatttaaaataaaaaaatttggttattatatagagtaattatatttaattctcataaaataaactatttaattacctttaataatataattacattataattatataataaaacaaatataacaaattgtataattacctttaatcacttaaatccagttactccatggttttttttaaacacccctataataagattaaaaaaatttaaatatataccaataagttttataaatttatgtaatacaatcccttaaaatatcattatcgttatacatatcttatatctattttggcattaacaaaaattaatttatattttttttcatgatcgcgtatgttgtagctatttattaagacaatttgttttaaaaaaaaatttaacagttttcaataccgaaaattagatttaaacaattatttttttatgtgtataagaaaaaatagttatccgtccaatataatatataaattttatttttcggcattataaactaatcaaaattttctaaaaatctaataatggctctaaaaaactataacgtacacgattatgaaaataaatttgataaaaattttcttctatacatcgaaacaaataggggtctacttagagcctacttatcttagatgcccaaataaaaaataatatctttaaaaatagagattatttcacaaaaacataaaaacaacaaaaaaaaattataaaaatacggttttgcggagttttaaatatttttacaattttttttttattttatttacannnaatacggtctttttatgttgtaaccttgttatttgtatgttattttttg

SEQ ID NO: 164582 - DNA, 2037 bp, Cannabis sativa
gtggaaacgctttttgctttggcactgcttttcgaggtttcttttagaccccttggagtttattcttcatgtgttttcaggtaggccaatgtctaattttctttaatttatgattattttctggttgctatggcaaagaagaaataaaaaaacgactcaatatttacacaacttcagttgagaactgtcggattgggctagctttgagcttaatgagttgtttccttcactaattgaggatcttcacagtaataaatagttaggtattgagcgttttgcttggcagtctcctccgtcatggatgctttgtatcaattgtgatgttagtgttcctattcatagggattgttatggcttgggagctgttattagagatcattttgaaaggtgcgtgtggctgaaatgcagaagcgggaaggcatttttcagtgaagttggcaaaaagtcttgttgtctaaatgggtcttcaccttgcattcaagctgcactctccccctgtattctacaatccaattatctgttagtggtctattttttgcaacactcgattcctagcagcactgattggagtgtttttttgttggacctactttaatccgagagttttaagctgtgtcaggttgttattcatgctaaaaagaagtgtaattctgttgctcattgattggccaaattggctattatgtctgattaacaaagtttggtttgagaatttgcctaattgtgtgtttgttcttgttaaagcaaacttgccctccttggtgtagttgtgttttttaataataaagttttttttttaaaaaaaaacttgtgtacataatagactgtttattcattttaaaaaaacattatttagtgaaaaataatgtttaaataaaacatttaaatacctcatctatgtagacaataattgctaataactaaaaagtatttgatccttttaattatttggtaagaataataatatttatttatttaaaaaattgatcagatacatttatcaattgtttattatgttttaaaagaactcattaaaagtaaatgaaaattattaacttcgattagaaatattcaaagtagtagattatacatagttcttataaaggggtaagtttaaggtattaatttgtgacataaatgtttaagtttaatttttgtaaaaatttattatttaacggtcaagtatttatgaaagtttcacaaatataatttaagtattattattataaaaatttaaacatatatttatctgtaactaaaatttattttaagtatttacattataaattagtttataaaaaataaaatatttagctatgagacaaaaaaaaaaaacaataatagtcatgttgtgataaaaaaaaaggtgttgtaagttaaaaaaaggtcatatgagaatgattggtaacacgtgataattaaagggttcttaaatatacaaataacaaaaaaaaagtcacattattttgttccaatatttttttctcaaaaataatatataattttgttattaattctaataaaattttatataattttttattatttaattttttgtatactatatttattttataaaaaattaaagaaaaaaaactagaatagattaaaaaaaagaatatattgtatataaaataatttttttaaaattgatgtctttatccttcaaaatatatttggtgggatatttttcttgctttagcttatagtggtgggaaaatggcattaaagatttgtgtgggcctcacttttggaatggtgtcattgtgttcccatttccaattactacaaaaataaaataattctaatttttctgagtaagaattgttgcatgtcgtgttcaaccttgctttatctccatacaacacacacttgtcgtgtataaatggatgcctcaaagagttttctttcattccttttttgggcttttgctaattttagaatatattcttgaaatcttggcttatttaaatacgacaaaatagcattgtacaaagtttacctgatttagaataaagtagaataattaaaataatt

SEQ ID NO: 164583 - DNA, 782 bp, Cannabis sativa
acttgatcttacataaaatagaacaacataaacatgagagagagtgaacaaagcttacatgaaggccatggagacctgtttgagatcggtttcaaagtttttcatgttggcaagcgattgggcacagaatatgatagctagccacgagcaaagcttatactgcatgaacaaatgaacacacaaattaaataaattgaatacccaaaatcacaaaactcgaaaaagaagaatctgaagaagggttttagtaaaaggggaagtgtgatcggatctgagttcgaaccctgaacatgacgccgaaaacgccaaagatgacggcgataaatcccgagtaatcgacgggaagatcttgaggggccactgcttgcggcatgaatggccttgccgccgatggctgccgcggatcgttcaccactgatgcgttcccatgagacgacatctctctctttctctctcacacagactatcaggtatcaacgatgtaatgaataattgaatagttttacacttccataaaatctcctcattttattaattgatgtcgtttcatagcagttgtcgtttagttgtaataatgtcgtacactgaaaaccccttatatgtgttattttttttttttgaacaaccccttatattattattattatttgggaatttctcataaatatagaaaaataatttaaagtttacttttatatagcataaataaataacgcaaaaaaaaatataagattagaaaataattaaaatttaaaatatgaaaaactaaataaacgaccata

SEQ ID NO: 164584 - DNA, 655 bp, Cannabis sativa
tccaccagtagtatccttagcagcattggtgtgaccattggtaaaactaatgttagtaaatgtattaggctgagtattaaaggatgagaaagtagacacagagttaggatcagtggacaatgcctgttgctttgttgctgaagtggatacaggggcagtcttgtgagggtaaaagtcctcattgaataccacatttctggcaacatatatccttccttcattatttttcacataggtatcctttgtgatgagaggaatagcccaggaaaatgcattggtgagttctgaaatccaacttgtgcttattatatggtcttaaatgaggaaagcaagcacatccaaatggctttagaatgttgtaatcaggctttgtgtgaaacaaagtttcatagggagtagcaaaatcaagaactcttgtaggaagtctatttattgtaaaaacagctgaactaaaagcatgccaccaataggagagatcaatgccaacattagccaaaagagtaagacctgtttcattaatatgtcaaggttttcgttcagcacgaccattttgctcatgagtgtgtggacatgggttttgaaaatgaattccttggtcaagtaagaatcttttaaatggcctgtattccccaccccattcggcttgaacagcctt

SEQ ID NO: 164585 - DNA, 1464 bp, Cannabis sativa
cgtatttattaaattattatatgttgatggatcaaagaatattccaatgttcttttcacaaattgtttacaatttcatacaagacattgatgaggttcaacagtactaaagccaaagttattttacaagacatgtttgctgaggtttttcttcctaattcagttttttttattacaaatgaaattattaattattgtaagaagatatgggatgataatgagtataatttaagtataaaagtagatgttgatgtttttgttgacgaactacctcaacccaaatggtctgatgacgataacaattatgatgaagatgacgaatacgattacgatgacgatgatgataatgatgataatgacgatgacgatgacagtgatgataatttatatgagacagatgatcttgttgatttgattgatgacattagtattgatttcatggatgatattcctattaatcttgtggcggcggatgaaaagtcaatcgaaaaactagaaaaagtgtggatcaaagaagatcttatcttttgttcgatttgtttggaaaaagtttcggttggtttggaagtcactagattaccgtgcactcacacatatcatgaaaaatgtattgttgagtggctacaaattagtaaattttgtcccaattgtagagttgaaatagtttaataattgtgtagttacaaattgttttatataagttatgtaaacatctttgtgtatttttatttaaactaattacaatatatcttataatttttaaactattaagaatttttatgaaggaaagaaaatcattttaaatagttacacaatattcttgtataaaaatacaaaatttgagtttttttttattgagaaaagtacacttatattaattcacttaatcaaatataatacaagagacataattaaaggtaggcaatcatccaataagatcaaaaaagcaaattaagccaaaacataaaccacaaaaagggtaattctatgtattatatttgttgatataaacctccacttacactgatacataaacaacatacaaagaacagaactgtaaatacaagtaaaatccttaagttgaccttcagtctctaaaaaccctaacagaaattagttagaatggatttggttaaatccacacctaactaatttctgtaactacctaactaacacatgcagaagctaaaatagaaaccctagatctatatatacctgcaatctaagcccagatctacaaggttgagagtgttcttcaagatccagggctttgaatacttgaagaaccagagattgaagctcgtacatgcacaaaagaaacaacagagagttagatagtgagagaaagagggattaaacacaaatatacttgtaataaaagagattaccagtcagaaaaattacctgtgacttggaatctccattgatgtactgttgaactgcaagatatagtggaaatcgagct

SEQ ID NO: 164586 - DNA, 961 bp, Cannabis sativa
  modified_base (220)..(221): a, c, t, g, unknown or other
aagggagttacaaaaataagctctttgttacccacagcgtgacccgccgggttctgaaaaatggccatcaccaccaagagctaattttcaccattagatcatcatcaatggtcaaaaaagtattatttttatttttccccatttttttgggcctctttcacctattaaatgaaagctcccttagctcatttttcacatttagaaaactacccacaaggtnngagcttctctctctagattttctttctttggaatttggagcttctgacacttagcctattgctgtaattaccatctcgtgagaaataaaaacttgaagtagatgtagctccattactatcatgatgtagagagtgaactgctataaatttgttttgtctcttttataattacttaactacttatttattctcgccaatccagcgagtaggtgtggctttgaagtatagtccagatttctgagtcaacatttttttgctttcattgagagccatagacaaaatccgacaactggccaagcaactgggcgtacgccaattggtggggttggaacaaggactacttctttgcctcaggcgccaggagtaggcctcagaactgacttctcaactcttcctcatcaccaaatgcttttgagactatcaccaacaactagatcccacttggggatcctcacgtggagatagcgaccctgataaggtcgatcctcaagttgctcaactcagccaaacggtggctgacttgaaccaacgattgtgagactctctcgttaagcaacatgaatggtttcaacactagttcgtggaaaactagaagaacattgaaagccaacgcattgagcatgaacaatgaaaagctaacctgtctcaacggattagagaagcttatcactctaatcgcgaagctacttcccatagaggtatttctaagttggtgagagagactctccgtcgaccaactg

SEQ ID NO: 164587 - DNA, 2082 bp, Cannabis sativa
taaaataaattccaacaattttttcccaaaaaatagctatgcatgggaaaagaagaccaaaggttcaaaaatagaaaagtgtctagccgttgcacaaattctcataatgattagcaataaagtcattttttcataaagataagtcatctgaagagttcaatatttgactaggcaaagttgcccggtaaaggcttttacaatcaagactagagtttaaaagttcctatctgtacaggcatgcacacaaggacttgggggacaaatactatcccaattttttgcccacctaacatggcatgtcgacgtagacgaaattgaaaccacgtagaatacaacctgtcaataaccggacaaagccaccttgcacgacatattaattatcaagggttgtaaggcaatcaagcaaggtcaagcaagaagaaaatgaccaactaagtatccctggtcagccaagaagtcccatgtgccagccaagccctaaaaattggattggtcggctggcaaatgcaaatagccttgaagagaggttgaatgaatggtggggtccacaacaaaccttttggaagatgctcaagctaaatttcaattacaggccagatccaacaacccacaaagatagggatattctctcgagatattatctaatattctaaggatttaagtatccttttttgtaatttaaatataagatagaaaatatttttccctattatagaagggatatttacatatttgaattataatctttcgtaagctcacactatataaaaggcattagacaatataaaaaagagacctaaactctaagtctcacacgccccatagctcctctctctcagtccttcacgcccttcactcactagacacgtagtctatttccttcacagaatctcacaagttctgaatctgtaacactcaattctcactactataatattgaagaaagccatagctagaaattataaggtccaagcctataatttgtgtggtactatctcaagaataaatataaccaaaaggagagtaggtcattacccattcatcaagggggtcgaacctctataaattcatgtgttacttttatcatttattaatattatttacacgtagcgattatcagcaattaataaggctctactgtaattaatcaaattttgagtcaacaatatataatttctattatatacaacaccttcacttagatgtcatactacatcagcaatctgaatcaggattgcttgcactgaataatgggcatcagtgaccgtactagcaatcattaggagtgtaaatagatcgggtaagattcgattcgaatatgactcgacccaatccaaactatgtaatgatctaccctgccttgccccgctagaccagatattcgaatcaaatcagatatgacctggcttatttagatcgggtccaatccagcgcgacttatctaattttttcttagaattttatatgtaaacttaatttttttcctaaatctaattttttaagaactaataataccttataaatgaaaaagacaaatcgttaatttttttgttcttaacaaactcaaataatcatttcttccttgatttttgtcatttttaatgaaattatcattttattcacaaaataaaagagtaatatgactataagagaatggattattcctaaaattgatcattatagcatagaaattttcatgacattgctctcaatctgacattattaatttattttcttttcatttgccaaaatcaatgaaaggtaagagaatatcaaattcttaaaaaaaaaaaaaaaatacccactatatatcatggtgtatatgtaacaaaattttattactttgtaaacgattttttcaaaaaagtaaaattagattttggatttcatgtgatgaaaaatatacaaaagaataaattggaaaattaatttttttgaatttggatattaattaacttagcacgttggttttcttaaagttattaattatatgctctttcatatatatgatttgctcacagggaatatatatatggaacactttttaatgagtattaccgttactaaacaaatttaactata

SEQ ID NO: 164588 - DNA, 946 bp, Cannabis sativa
gtggagacgttaagatattgcttagctttttttcattgaaataagatattatgtccatttcatttcaaaaaaaaaaaaaaaaaaagacatctatgtccattatcattatctaagccatacttatgcatggtaacaagctcaaatcttatgttcatgattttcgcacaaagtatgaaagaaaatatctcatgattgattgattttctttattaaattaagaaaattaataaataaataaacaatgcacatgtctcaagtttccttcatgtacatatacataagaactctaagtttactacctaatctaataaaattaatgtattattatgattaatatatttttatatactaacaattattagtaaggaaaatgttattgggcatcttaacatgtcaaacataataagaggtagtatattattataatacagtttaatttgttgctgaagtttctctaaaagagaaaacacatactaatcaacaagcaaccataaaaaaaaaaaaaatatcaaatctcatacaatttgatttaaaaaaaaatagaataaaaaactattttgctcccaaatttatcacttatatgattttacccctaataatatttgtgttgtcaaaaatacccccttaactttatcagataataaaaataagatttttgttaaagaataaaattattttgtcctttcaactttgtcacttatatgattattgggctccttgcaatactagtgttgtttatcaattaataaaaattaagacttgaaactttttataaattgagttgacaaggtaacatgcggtggacaataaactaacttgttcatccatgtaattgcttatgtggctaaaaaagaaaaaagtaattaaattttaaaaggaaacttaataaaaaaatgacttttttcaattttaaccaaaaaaaaaaataacaatattacaaaaatac

SEQ ID NO: 164589 - DNA, 1963 bp, Cannabis sativa
  modified_base (402)..(402): a, c, t, g, unknown or other
aaaaatatgttgaaatagtcttattttatgtatatttttggaattgaacagccgaaattggttttggacggagatttgactttcttttctattggtagatttttcttttttttgtcatacttaagtacttaaccaaccaaatttaatcgaaataaaaaaagaggataagtaaaacgtagagaaatgttaaaagataattttttgaaaaactaattatttatattagagctaaaataaaatgtaattaagactatctttaatgaaagatttaaaaattgtgttatatttgatacaaaaagtaattttttaaaaaatttacattaaattattttgatgtaaaatttaatatctaattaatattttattaaaaaaaataaaatttaataactttataatcaattntattattattttaatatgtaagataataaaaaaataatataaatattttataatttaatatgatagttaaatatactaataaaataatataaatgacataaatataaatgaaaaaatagtacatttattgcggtgtaaattttacatcataacaaatattgtgccaaatttggcacaaaatttgttatgtgctaaatttacatcaccttttgacacaccattggagcacactttttgttaaatgagctatattttagcttttcaccaattattcatacttccattggagatgctataaaagaataaaatttaaagaagacacttagagtttttacgttaactttttacgtgattgagttattaatgagttttagtccataagtcagtattattatgaaattagttaaaaaaaaaaaacttaagaaattacaatgagtatgagtaatctattctgtttttaagcaagtaagtcaaaaatttccaacatttgcatgaaaaattcaatttgtatttattgagcactagatgtcatacttaataactatttccatctaatgaggaatttacataatatataaatttagacttatctgatgaattccaactcatgaggtaatacgtgtatgctaatgtgaagatctgatcacggtaatagttgttcataccatgtcctatgatcgtagttaattaatttgatattaattacttaatcttcaatttattcagttttcctttttaggcaggataatattctctatccaatattttaggaaagtattctttattttgtgtggagcagtaaatgggaaactgggattggcttttggatacacgttgagaaccccttccaggtacatggagttgacactcttccgtatgctgactaggcttgacagaaccttcatctggcgagatgtgtgtttgttctcccgaatatccaatgattgagaaattatcttattgcttgctaatcacctcatggaagctacgaccatactttcaggcacatgccatcaaggtactaacaaattactttctccgttaggtgttaaagaaactagaatctttcgaaagattgttaaaatgagcaatagaactcaacaaattcgatattcagtatcataccaaaatttccatcaaggggcaagccctaatagactttattgtggaatgtaccagaataaatgataatccagaagaaccagtcccgaaactggaaatctagaaaatcttcgttgacggagcatcaaatgagaagaatgtcggaacggggataatcttagtttctctgcaagggcatcagctgtagagcacccttcacttcaatttcacagcctccaataatgaagcggagcatgaagtaatgattggcaacctgcatctgggaaaagaagtaggtgcttagaatatcaaagtgcatagtgactcccaacttgtggtgaatcaaatatctggggaatactaggccaaaggcgaaaaaatggctgcttacgtgtcccgaccaagagagtgttatattattttataataagtgtagattaaaatgtagtaatatatatta

SEQ ID NO: 164590 - DNA, 1647 bp, Cannabis sativa
ctatagcttcaggttaattattttaaaaaaaatacaaaatttgagttaatggtctattttatactattttaaaaaatacaaaatgtctagaaaagcgaaataggacatcgaacaaaaactaatgtactaatgtcaagttgaaaaatttataaaccttattaacaatcatattattaaaataaaaccaaattttatgacttttttttattgaaatgcacaagtttcatgattaagagttgatttggtatgtcatattatattgtactatattatataatataaaacataatttaatataatattatacaatacaatataactgaatataatgttaccaaaataaccttaaattactaagcttatatcaagggccaacttactcaagagggcgttaatacgattttaaaagcccaacaaaacaaaaattagtatgagtgaaaattgtaaaagtttgtgttgtcactttctatagagattttttacaagataattttcctatggcataattattaaaaatatatatttatattttaccaagtactcttaacaattaaaagggttcattcatgtacctctgatctgtttaatatttgagagaattttttaatctaatttttttataaatgtcttaaatatctataatgtagacgatcataaaaaaaaatatactaaaaaaattatatcaaatactgaaacagatataaatgtattgtaaaaaatatccttataacttattaatgtgtttgcggatgttaaaggtgttagacctagaaagacaagtccaaaagcacaaggaacttcaattcacatacaagaaaagaatggaaagaacacaagattatttgaaacattgtcttcaaatagcacaagaaaatggatttttagaccttattatacaaaacaatgatcctcccccttctcctcctggaagaaaccctacattgcaacaccactccgaactagttgccctagttgacacagcaaatcgaaacggatggtacattgctccacatgaggtacatacattataatatgttatagtaatatgtaagtttttgatatttttcttgtttttagggtataaaatatttcatattatatatatgagataagtatgtataatattaatgttatcaggctcgattttggacataggcagactaggcatgtgcttagaacccacctaattcatgggccaaaagaaaaatctttccctttcaaaattatataaattttttactgatttgaaaaaatataatatattttttttaaagaaagactgaaaaattattttttttctaattcgaccctaaatgttatgtagttttatttgtgttgataatcatgcatgaatttactcattcatcttgagctaaatttattttggagggctaggatatccatatattaatacatcttttaatgtgattataataatatatgtattttttaaaaaagaatatatttaggatgtttctacaacacatctttctgaaaagagttcattaatgtattttttatttgtttcgacatttaggagaattttttattcaatttttttcataatcatgtacattatagttatttaagacatgatcctgtaaattttgagaaattcagaataatttacaatatagaaagcaatgt

SEQ ID NO: 164591 - DNA, 952 bp, Cannabis sativa
aaaaaaaaaaaaaaattgctaatcttactgaattctctctagggttaaaggagatactaagctttagaataaaaatgaggccttcccatgtacttgtaactttttattaggaccaattcccctaaaaaaaatcaaataaaaattgccacaagtacaaaatattagaatgtattcattgcctatgtatagtatataaatttataccttcatgttggaagaaatatatttaccaaattttcctgcaatatatatatttatcgaaatgagttatatgaaaaaataaagataattaatgaaaattttacacaaattacttaaaatcgcggttttttatatttttattaaaaattatttttaatacatatttttactgattttttttttatatatttatagatattttagtaacatttttacaaaaaaataaatgttttttatattgcagtaacataatataatataacaagtaacaacaacgtaaaaacaactattcgtatttatgaaaaaaaaattataaaaatattaaaaaaaacctataatttcgtatttttgtaaactttttattatttgtgtgtatttataaaaatatccaaatattaattaagcatgggtgtgaaatgaatggcccatacaacccattatcatgagtcatgaaattaatggtattatatggcacatactttctttctacttttattagtggacaacaaacaatgaatatttttaagagataatttcaaaatatatatatatatatatatataaaaatacagtttctacagaatttttaatatttttataattttttatataaaatatagtattttatgtatttttatattgtatttttattaatttttttgtcatttatatattatttttatgttattttaatattactttcttgttacgactttcttttttttttttttttttttgtttttttataaaa

SEQ ID NO: 164592 - DNA, 2698 bp, Cannabis sativa
aaaaaaaaaaaaaacaaactatcatcaacgaacaacatatgggaggtcattgggccacctctaccacaaggaaaactaaatagaaaactattatctcgattcaccaaacccgaaaggccctccatgcaaagtaaaaataaataaagagacatgggatctccttgcctagggtcacgttgaggagtaatggagccaatgaccttctcatccaggagaatagaatattccaccaaaaagatacaattaagaactttttctgacaaatccatatgaaacccaagtttcaacatgatgctctctggaaatctccactccatcctatcataggttttaaacatgttaagtttaagtgtagaaaaccatcaccttttttttttttctttttcaaagaattaatgcactcaaaaccaataagtgcattatcagttttaagacgtccaaggaagaatgcactttgtgttagaaaatctttaattaggatcttaatttactattcaagtatgttgattatcactaatctaatatcctaaatacgtaattcctaaaataataatgcaaatacataaatggatgtagaaaaccttacaataatggcagcggaatacaatgtctccttccttttagttctctaatcctagatcttttctgttgcaaagtatgatcaagaactgaacctggatcttctcctccttcgattgtgttcatcacagtcttccacaaaatcttgagtatcaatttgaatagtgtgggatgatactcaaaatacctttagaattaatttagagattgagaaagcatagtgaatttcaaaaattaaagagaagagaaagatgtgagattaagtttttcaatcttcttctctttctttatatagggattcacttaggattaagtttagatgatatgggcttaaaataaagacttgggttgaaattaacttttagggctgaattcccatgtgggctttagagttagatttttgccattttttaaagcaatgaatatattattaaaatgataaaccaatgtcatacaacttataaaaaactataagaactgaacattccaaagataatatgaagaagttcctaaccaaacaagttgttcatccatccaaagagcatgccaagccaatctatgtgtaaccatatgcctatccaatgaacataaattagggatactcttgaaaatctagatgacaaacttgttacaaaatatttgacaataattcaagatcattgaaaaagaaaataatgtctcttagaaaagcaaacataactgctacacattatgtttcacccacatagagaaaatcaatccagcgttatcattgtgctacacaatttgcttgaataaccgtagaataacctacaaagaaaaaatatcaatgaaacatactaacattagtaaatgactaaataaaataattataagaaatataaataaatattattgaataattagaaattatagaataataatagtcattatatggaaggagtgaaaatttatcttgtctactgcaattgattttagaagtagatcccaccttcaaataattagcaacttttaacaactgaataactttacaactcaataaccaataaataagcactttaatagctaatgttatagctcggtaacttttcctaaatgaaacgtataatattgatttagaattagatattaaatttactgttgtgtttatatgcaagcttaatatcatcaattaaaaaataaaatatcaaatatatagttatttatttattttataataaaaaaatattttctaggacaatttaattaaattaaatcattctgattattttccctgataatgtaaacaaaataaaataattttaattcttttcatgttaatttagtaaacaacataataaaataatgattctaattgtttaatactttattcccctatatttctcccattcatttattttgattatgtttatggtttagtaaacgtgctattagtgtattaattttacttgctatgttttttttttttaataatagtgttgttacacatcaccttgttattgctatggtagtagagctttattcatttatgttagggaaatctcaattggttcaaagtatatttgtgttagtagcatgattatcttggcctgttcaaattaggggattttaaaatttttattggcctcatagtttatggtgcgattatttgttataattgttatcgctatggttggttgttttgttatttccttttattctagattgaataatagggttcttattatctaaattttattgaagatctttgggtgatacattgataggtgtgatttgtcgcatgtttatttagattggagatctaacattcttcatactttttcaatgctttaatgtttgacttattggtattttaattaaaggtgctattaaggttttcatttttatttttataaaagatatggtttgcctatcttgttgtactacaaaaaaaaaatatttacaataacacttaaaaagtgtaattaaatacattttataacactttagcaattgttaagacggctcatgtaattaaaagtattgacatttagttatatttttttacatgttattaaatagcatattataacattattttggtgttatatattataaatagttaacattaatttagtgttatggttcattatgttacatt

SEQ ID NO: 164593 - DNA, 674 bp, Cannabis sativa
aaacaatagatggcttagtatgacgacacgtgtccaaacaccttctcgtgtgtcgtgggatttaaatgtggtgggtgtcactcgtgtcaggactcaggagtgggctctcaccacacgtggggcccaataagaatttagaattattatgattgggcgagaacactgtggcccaatacctcggcctactttgaaaagggccataactgaaccagctcagtttctaacagttacaaaacaaaataattaaaaagatagaagaaaattattcctcaataaaaacaaaaagtaatactactaaaaccaaggaaaaggaaaaaaaaatcctaaattaaatgtcactgagttagttatatatatcaagagtgaagatcaaaattaggtataagaaatctaaaattaaattccttaatggttatcgatgagtgaataagttgtgttataataaaataaaatagtagctaccaaaaaagagtaaataaggtttgtataataaagtaaagaatagttgccaaaaaagagtgaataagttgtgtaataaaataaaataaaataatagctaccgcaaaagtggtatgtaaatatatatagttttacttttatcagtgtaagaaaaatatataaaagagtaatttgcggtataaatacctaagttttatgccgagtagcagataaat

SEQ ID NO: 164594 - DNA, 3890 bp, Cannabis sativa
  modified_base (3817)..(3865): a, c, t, g, unknown or other
ctctatccaaaaaagtttcctaaatcctaaaaatcatagaagcacaacaagttcaggctagccattggcatggagctgttgagtttaagagagagaacgaaagagaagaaagagaatcttgatttcattgaatgaatttcactgatgtaaaataccagtgtttatatacagcagaggaaagcaaagcaaaacagttacagagttgttaatgatcagtaaagcaaaacagaaaaacaaactaacaaaataacagactaataactaacttgcaactgtaactaacgacttatcactaacagcccccctcaaactaagtgtggatagagaaaccacactgagtttgtccctcaaaaatggaaacctactgctagaaattgccttggtgagagaatcagcttactgatcttgtgctggaacatgacaaacacgaagctggttttgcagaaccttatcccgaacgaagtaaagatcgatttcaatatgcttcgtacgagcatgaagaacaggattagcaactagcatcagagtgctcaagttatcacaccatacagttggtgttgtgatggaaacaatttgcaactcagagagaagagactgcagccacgaaatctcggttacaacagcagcaaggctgcgaaactcagcttctgtggaggatctcaagattgtctgttgtttcttggatttccaggcaacaacattcgaaccaaacaacacacagtacccacttgtagacctcctatcatcggggtccgaagcccaatcagcatcacaaaatgctgaaacatcaaaatgtgaggttttgtgcaaggtgagaccatagtcaagagtccctgaaagatatctcaaaatgcgcttaactgcaacccagtgagactctaatggagattgcataaactgagataccttgttgacacaatatgcaatttcgggtctagttatagtagcatattgtaatgctccaacaacagaccaatacagtgtagggtcaagaacagagtcacttccaaactgggagagtttgagtccatttgtcattggtgtgctgctggatttggcaccttgcatctgtgttctggacaatagatcttgcaggtactttgtttgagacagatgcaaccctgtagaagtatgtgtaatctgaattcccagaaaatagcttaagtcaccaaggtctttcaaagcaaaacgagtgtgtagttgggaaatcaaagtggagacttcagtgtcattactcccaatgacaattatgtcatctacatatacaagaatatatgtagtgtgatgaggagtgattctgagaaagagagaggtatcagatttggtatgctgaaacccgagattgatgagagctgtagacaacttggcaaaccaggccctaggggcttgtttcaacccatataatgctttttgaagtttgcacaccaaattaggttgttgaggatccacaaaacctggaggttgacacgtgtaaacctcttcctctaagtctccatttagaaaagcattgttaaagtcccattgtctcaatttccaacctttagaaatagcaatggtgagtaaaactcttatggtttctggttttacaacagggctgaaggtctcattgaagtcaaaaccactttgttgatggaagccttttgcaacaagccgagccttgtactgagttgtacttccatcagcattttctttaactcgtaaaacccacttgcagcctatacattgtctcccaggtggcaatttgactaaaacccatgtatgatttttctttaaagcatagtactcagtgtccattgcattgtgccatttaggatcagccaaggctgatttaacagtagcaggaacaaaggtagcagtaagcacttttggctttcgaattcctgctttggctcgggtttgcatagggtgttgatttgtaacagtagctgggacaactgggttgatactggtttgaaatggagttgtgtttgcaggggaattgggagaggtgttaggagagatagtaggaatgacaggtgatgtgatgatggctggggtgtgagtagagaaagatgatgtagtggtggtaagtggaatgttgtgctgaggtgtagaaataggaggaacagcagtggaagctggtaaagaatgatcaacataaggattaacagaattgagattgtgaaatgggaagacatttttgttgaataaaacatcacgagacatgtaaatgcgaccatctttggctaaacacttatatcctttctgagttaggctatagccaaggaatgtacacggggtggatctatagtccattttgtgcctattataaggtcttagattgggaaaacatagacacccgaatgtcttgagagcagaataatcggattttgaatgaaacaaagtttcatgaggtgtgaaatcattgagtacttttgttggcattctgtttattagataaacagaggttcgatatgcctcatcccaatatttaagaggcacggatgcatgagctaagagagtgaggcctgactcaacgatatgtctatgttttcgctcaactagaccattttgttcatgggaatgtggacaggacactctatgaactatgccacaagactcaactaaggaagtgaatgctctaaactcccctccccaatcagactgtaaggattttataggtagatttagttgaagttctatctgagttttgaactcaataaatgtgggtaaagcctcatctttagtccgaagtaaatacagctaagtgtatctagaataggcatctacaaagcttaaatagtacctatatccattggaagagaccataggggcaggaccccatagacttgtgtgtatcatttgcaaaggtgctgtgtaaacagtatgagaattcgggtaaggcaacttgttatgtttaccaagacagcaagcattacacaattcaaaggcatttttattaatagaagagatattacatttggtcattatagattgaacaacatttttggagggatgtcctaatctattatgccaaatattaaaattggaaagaggtacattagaagtagactgttgacattgaaaagcagatttggatgaggaaacaccagtagaagccgtggtgttgagactgggggaggaattggattgaagaggctggtcgaatttgtaaagccctttgacaaccttcccaaccaataaagtcttcatagtagcttgatctttcataaaacaaaaataagggtgaaactcaaaatacacagcattatcttttgcaaattgagagacactcatgagattttttgtgatatcaggaacacgaagaagattttttagaatcaagggttgggaagtaaaaggagaattaaaggtgttataaccagtatgatagatatgcaaacctgagccatttcccatatgaatttgatctattcctggaaactcttgaggagccatcagattagtgcaagtctggggtcaagttgttcgtggcacccgagtctggataccaggactgatcattcactgtgtcaggagtggcaattgaagcatgcatctcagcagtagcagcagttccattgaaggtttggaaagattctggccctgtgaatgatttgtcgaacctgtagaagcattgtttgactgtatgaccttgcttgtgacacagttgacactgtatcttagaattagaattacccctgccagaacctgtgtaaccaccacgatagcctcctctgggagcacgaggagtattagaaaaagatggaaaataagatggatagaaattaccatacatctgtggaacatgtgaagatcctgttggaaattattttannnnnnnnnnnnnnnnnnnnnnnnnnnnnnnnnnnnnnnnnnnnnnnnngaactttctaaaacgatgaaatgaa

SEQ ID NO: 164595 - DNA, 1572 bp, Cannabis sativa
aaattagtctttcgatcagataagataaggctaagaacagttttttgttttgagtgttttcttctttacgtattcatagttctacagaaagctaaaatacagcacaagtacccaattcaagacatagatggcaatggaattactgcgcttctatagttctaacttcgattcaataaagggtatgtttaagtgcataattataagatgagcagtagtgagtaattcttaccaccaaatatatataccaaaattttccagagatgatggacgctacttgtacaaagcttgtgatgtagataatatcatgtaaataactgaagggaaaaacaattgaaggtcaacaatatactagacaaaacgagtatggccaggcaataatgataataataccaataggaaactcataaaccaaaactcaagtcaaggcaatatgaactctattccagatagccaactaaagcaaaggatatttagggaagtcgggcaaaatgtattctgtagtcgaagtgttgcaactttgaaagaaaataaaagaggcatgcagatgtagtcgaacagttctatttcaagtgaacatattaaaatgtacataatttgtttccatgcagatgcaccatcaaacaaatagcctcggacatcatagaaaaagtaatcaatgaatcataaaagagacagtatggtggagagggagaagatgagcagaaacatacttccctacagcatgtgatgaagagcaggccacatacaactacatacatcattttatttgtttcaatggcaacatattagctatattgtaagatagggtggttcgtgttcgtagaaaggagagacggttggcatctcccctgacagggacggggacagccttcgggcttccctgttatagacacacccggtttcaccggtcaagtaagatagggtggttcgattattattgtaagggtaccttttaaaaggaagcagtgttgtagctggacttaagttcagatttaactaataatacaaatttgagaaatgattggtctaaatcattctgaatagttctttttctctttctcaatcccctaatttcttaagcagcatcaatataatcttcagtgcaagtaaattaaccggtaattccaaattcatgaacatgtcatcaaagcacttgctatttataatattcctgttcttaaatcagtcatgttcttcaacaaacaaaccaaaaacaaaaatagggtaacaaatatattaacatcaagaagacatacccacaaactccaccagtactcatatcaaacccaccatccaaaagctccccatcatcagtataagaaggattcgccatctgagcgagttgtttataaggtaaaaaatatgctgcagatgtaacacccaatccaatccaatgcttccaggtgaaacttgaatggaaaatcaacattctaaatacgaaataaatagcctgaatgaaaccaaaccgtaagcacaatgggagaaaagaaataacttagaaaccaaaatacatgatgcaacacagcatcgaacaaggccatatttgagctgaaaattaaaaaaaaaaaaaaa

SEQ ID NO: 164596 - DNA, 810 bp, Cannabis sativa
tatatatatatatggctcaatacttttccatttattccatgtgggacaatgtccacaatatgcagggtcacgtgggaaaagatggtctcccacaatgaaagattattctcaaaattgtacttgttttcagcttctaagaccgagttgtgtgtccttcttcatgatattcaaacttccattactccagctcaaaataataatttactttgtctagtgtctgaagagaaagtttgtaagatgctctttcaaatgcatatcctaataaggctcttgagcccaatagtatgagtccagatttttataaaaaaatatagcacattatggaggcagatgttgtggagttggttaaacaagtggttgcttcaggagtgttttccatgggtacactactaaaaaatagatttcttgacagtttcaaacaattagcttatgtattgtcgttggtctttataaccgtcaaatattcgactgttataaaattgggtagaataggctacagtttaaaacagtcggtgaaatttttactgacagtttaaaactgttggcaatagtggcactatagccaacggttttaagccgccacattttttacacacacattagatctgagatatatatctcaaactccgatgagtaaaaaaatacaaatatattaaaactttgttaaagatatttcaagttggttgagatattccatcgaagttagttgagagatttccttatcggaaatatcggtaacaaaattctgttatagatattgttgcccctgatttttctcaatatacgtggaccaaccagacagggacacgt

SEQ ID NO: 164597 - DNA, 3145 bp, Cannabis sativa
ataatcgtttattcataaccgtttaaatatatcaaataaatatatttacactagtttatttatgctcaacatgataataaatactcatctattaattgtacttaaaattattagaaacagaatgcaaaccaagtttgtatacaaatttcatgaagaattataattttcaatagaatttattattattaggattaaatatttatactctattatttttttaatattgtgtgaaagttagagtcagaccataatctgtaaaaagatataaaccaaataagttgtgcaattctacattgcttggaaaaagttaagagtgatgtttctaagactgtgtaggtatttgactacagaggtgaagtgggggcattacaaatagtatcagaaccttaagccaacaggaagtgtggtcgatattgaggtcgtcgaaccccgtaaggagatgattgtgacagtcagaatctcgtgatccacaagaatatagaccagaccaggtaagctcctaagttgtgcaattctatattgcttgataaaagtcaattgcgatgattctaaaattgtagatatgtgactaaattcttttatttgtttgttatttccttcttttcaaatcaaaacaaaaagcctataaataaaatgttgacaacaaagccataataaattaaagactggaaagactcatctctcactatctggtcgaaagttattcacattactcttagcttctttagctagcctatagtataatactaatttataactacacccttattgctctttcaatattttaataataaaaaaaaaaatcacatagctttttcttttctttttggttgaaaaacaaaactatatagaattagatagcaatatatatggaattgttgacaagtagctattaaaaaacaaagttagattttcacagaaaaataacatatagtacaaaaagacaaattgacatgacaagagtagaaatgtaagtcattaagggaacatgataagaattcataaataatagggtttattgttaatataatttttatctatattatattatcttgtttttactctcaataaatatactttaaaccactattttcatatcttattttttgaatcaagatcatcaattagttgatcaaaacaaacataatatatatgtttatttatagaataatatgctgtaaaatcactaattatttctaaatttcaaattttaagagtaaaattttgattgatttgctaacattacagttgtttgacaaattttgctactaaaaatttagattcataagttagttgttgtgttgaatgaatgatcatcctcaaaacctgattgttagttcagtaacaatgttcaagaaaatacaattcaaactaaaaccaatcacaaaataaaaattagaatttagatgaaattagacaaaaataaaattagcttgagaatgaataaatcatggatctttattgattagaaataattaatagtacaccatgagatatgcctaagaatacaactccaacacaatgaacaattataaagaaatgtctcacaatgagagaaatcacttcaagagtgatacttctattgcatccctccacacacgcactcactatgatcttggaccctctctctttctaaacttgactctgaaactgaagtatgagcattggagattacttgagggagtaaagacacatctatttatagatgttggtgaaattctctttaagttggtgacaaagccaactgttataactaacaatatctttttttcagattcatttgatgagtgaaaagatagatctactgattttgacagattgtgtaagtttaatcccaacaattccacctgattagactcacttattatcttatccaaaagaaataagtgaggacattgaatgtcatgaatgctcgaaaagtttagatagtgcccaaacttgtctctagttacacttttagcgaaaatatacagggttattatgtgcacctcattgtccatttcagtgcttcccatgttcagggctagggtctgaaatgtacctgctggccacactcatagcatgagctaagtcaggtcttgaacacaccatggagtacatgagactcctaacacaacttgcatagggaaacttgctcaacttggctctttctgaatctgtttttggtgactgagatgcagacaacttgaagtgttgagcaagtggtgttgtaactggtttgcacttgaccatgccaaacttattcaatactttttgtaggtagacaacttgagaaagtattatcatgtcaggcttaggtctctttatgtctatcccaaaaattctctttgcttttcccatatgtttcatctcaaactcatcactgagtttcctttttcagcttgtacatctctgactttgcttttctaaagatcagtatatcatcaacatagaatagaaagtatgattattgaaatgcacacatgagtcatactttcttttagtatatccaacattctgtatttaggtatcaaacctcaaattccattgtctaggtgcttgcttgaggccataaagagacttcttgagtaggcatacctcatctgggttcccaatgccaatgccctcaggctgttgcatatagatttcctcttctaattcccaatgtaagaaagttatcctgacatccatctgtttgatctctaagtccatgcttgatgccttcgccatcatggctttcagtgaagcttgcttgaccactagagagacaatctcattgtaattgatgccttccttctgagtgaaccccttggaaactaaccttgcattaaatctggtaggttcattatttaaacctttctttatgcttgaaaacccattttcatcctactggcttgtaaaactctgatttcttcacaataaccccagttttattcttcctaagagatggcatctcttcatggatggcttgcagccatgttgcagcatctttacttctcatagcttcttgaaagatagtggattctaaattgtcaacctcttctgcatcataagagcatatgcaatgaatttagtataaccaaaacgatcaggggcctttctctatctctagtataggtgagcataaaatccagaaaactgaaaaaatcgttcaaaccgacctacc

SEQ ID NO: 164598 - DNA, 1093 bp, Cannabis sativa
  modified_base (1025)..(1054): a, c, t, g, unknown or other
gttgggtgcctaggtgctccaaataagaagtgttccgatttttattataatgcctctaacatgcttgtgacaggtcttatttgtgtctaagtacaaagtttgggtggttttcactaagaggaccagttactgaaaccctagggccatatgtcaactcgggcgcttggtgaaaccctaggcgcctgagttggctttcgggatgccaaattgacatctataattttctaggcttgtgaataagagtcttctttacttgttttctctgaacattgaaagatggtgatttggaaacgacttcacggattcaaatacctgttccagatcccctgatgtcaacatgggcatagggctaaggactcttcctaaggttggctactatgacctcacgactctcaactccaagaatgttttccttttttccacatttgaaaaatgtagtccacatcactaggtctagtttacgggtaaacatttgcccctaacttagccttgcactcattcaaggttgagtttacgatgtgatctacgcttgtttcatacaaaacaatcagttgggcatcaatttttgacttctagaaattgctttgcggggtgtctaaacacagggtgacaggaaccttacttttcccatcgggatgagagttgtctcgttgaatcctgtgagctgtgaatcgctaagtgaaaggtccctatccgtgagtccgatggccgtgaaagcttctttgaataatagattcacgaagcttttgttatccaccaatatatcctagccacacaaccttattggtgataggagtttctatgactagagcgtcatggtgggggaaacacactggcttcacatcttctttcgtaaaagtaataggttggtccatgagcctgggcctttgtgttgggagttgagtgacctcccatacttcatcgtgttttagggctccattgtaacgcttcaactcattcctggtggtttctccgatatgaggcccaccaaatatcatggccactcttgagatcgaacctaaccnnnnnnnnnnnnnnnnnnnnnnnnnnnnnntcaactaggtgatattaaattgaaaagatattacggtaa

SEQ ID NO: 164599 - DNA, 1840 bp, Cannabis sativa
agttcctagagtaggacttagtggggggttaatgctgctttggaaagctgatgtaaatatcaatgtacttaattttggtataaactttgttgattgctatatcaccgcttctgatggtcttttatttcatttctcgggtttctatggagctcctgttacttctcaacgacatttaacttggcaactattaaagcggcttaaagatactgctccattgatgccttggattgtaattggtgattttaatgaaattcttaatcatgatgataagctaggaggaccagtctgatgtgacaaacaaattgaatgctttcgcaatacagtcgactatcgtggtctccatgatctcccctacaatggtgcaagatatacttggcataacaactgtgtgaatggtacaaatgtgaaggagagacttgattatgctttcattaataatgcatggccatctttcttcggagctactgaggttacacatttgcctttcttcaaatctgaccatcgtgccctgtttgttcccttatctaatattgcaccagcattacctcaaaggttcaagtctcggtttcatttcgaagcattatggctgaaagatgaagaagctacggatattatcttcaagaattgggtgatttctacggctgatcctcttcttcagattgctaataatctctctgcttgttcttcccatttacagacctggcataggcagaagtatggtgaattacctcggcagattaatagcacacaagataaggtttctgccttacagaactctactgtcaccacttttgagcactttgaagaaatgaaacactgtgaaaatatccttgatgagttactagcacaagaggaagactattggaagcaacgttctcgaatgaattggttgaaatcgggtgactcaaacacaaaattttttcatcaaaaagccaacagtcgtaagaagaacaacacacttaagaaacttactgacgctgctggtgtggagcacacttcacaggctgctattgctaaggtggtaaaggattattttcatgacatctatactactgatggtgtagattatgaagcactccaatttattcaatctaaggtgccaagaaccatcacagattctgataatattgacattgcacggccgtttactgctacagaagtccatgatgctttaaaatcaatgaattcagatggtagtcccagtgttgatggcatgtccgttatgttttacaccaattattggcacatagttggcgatctggttacttgttctgttttacaagtccttaatgagagaagagatccaacaagcttgaatcaaacattgataactctgatccccaaagttaaaaaaccgatcaatatgactcagctgcggcctatcagtctttgtaatgttctctataaacttgtttccaaatccattgttttaagactgaaaccgtacctaacccaagttatctccgagtcccaaagcgcttttctctcatcaagattgatcactgataatgtcttggtagcctttgaattgatccattcacttaagcacttgaaacgaggcaaagaaggttactcagccatcaaacttgacatgagtaaggcattcgacagagttgaatggcactttgtcactgccatgcttactgctatgggatttcatagcaccatggtggatttgatataccgttgcatgtctactgtctcttattcttttctcatcaatggatcgactcatggggaagttttaccaacccgaggtatacgacaaggagaccctttgtctctttatttgtttataatatgtgttgaaggtctttctagattgtttcaatttgaagaa

SEQ ID NO: 164600 - DNA, 1408 bp, Cannabis sativa
aatgtttaagacggccctgataatacaatataatataatacagtacaatacaatatgatacaatacggcataccaaacgagctccaaaagaacattatatttaagacattattaggaagtgaggaagcctcgatggttcctgtaatgtattaatttttggaggaaaaggtcaaatgtaaacttatgtacatatttttggtacatataaaaatgaatatgggtccatgtactgatgtacagactccaatacagtcatatactcatattaagtaagaaaaatacagcttctactccattattttttatttaaaaattagcttaaaagagaagaaaattataagcttggaaaataatgaaagaaaagtgtcttgaaagttgtgcacatacattcttttggctggcacaatgatgctgtcacaaaacactttgacaactcatctttcatgtatgttgtgatgtgttatatcactcttgacattttccaatgatagactgaatttttaaaggctactcttttaattttttatttgtaataatatgaaatatttttgttttgaattactatatggattttatgttttattaaaaaataaaataattttttttttttaaatagtataaataagattttgaaataattttttatcaaaataaaatttaataataattcgatctaaaagtgttgtgacaaaaatttttattattttttgtatctgttcatgttaaaaaaaaaattcaaattaattatattaaaaaaattatcaaaaattaagtttacgatactatttttactattttaaaaaggctaattagtaatttttccgttcgaactttgacatgtattaaattatgcccctaaattttttttagcgttaaaaattcccctgaactattgaaatttgtctaatattagtacaaaaattttaacatggatgaaagttcaaagggcatgatttagtacatatcaaaatttaaggggcatgatttggtagatatcaaagtttaggaagtataatttagtacataaacaatcactaaaacagtaaaattaaatgaaaatagataaaagtacttaaatttaacaatctcaatagtttatggggaatttttaacggcaaaaaaaattcaaaaagcacaatttaatatatgtcaaagtttagcgaaaaaattactaattaaccttttaaaaaatagaggatcgtctcttagtgagattttgatttttatgtgttagactacgacttttgccaattaattaaccttgaatgaagcttccattttcaaaaaaaaaaaaacatctatccaaatatctagggccggccctgggtataggcgggctaggcctgtgcctagggcccacctagtccaggggcccaaaaaaaaaattttgcccttttaaaattacaca

SEQ ID NO: 164601 - DNA, 1412 bp, Cannabis sativa
gttatgaaattgaagaaggctaacgtttacgataacttttcgatttgttctacaccttcggttgacaattatggatacattggtactatgttgtgattgtattgattgagtagaatagtattagtgaatttgttcaattattatgtggtataacaaatattgttgtgattatgagcgtgtagttatcttcaatggataatgcatttaaggagagcagaagtgaagcctttggtccaggttggaaattttacgactttgttgtggcagaagcacatgaccaccgaaggtgtgttggaaagtatgatagtagcttgaaagtgatgaacaaacttcttggagagtacgtggatggtgtcgatgtcttttgtgcacaagtaaatacttttaatttaatattattacaattattatttatttaagtgtagattgtaaggtttgatattatttgatcacttgtaggtgcctgaatccattcggaggttatatattgggtcgttaattctcacgtcagaagttaacaaggttcgagacattacaatggagaaagctattcacttttcaagcgccaaatgagtagtgtctttagttttctattgtaataattttttttgtgtcgatgtacttaagtttaattcagtgacaattgaccgctttaagttttatttttatcttttatatatatatctggttgttgatcttgataacttgcccattcaacaaccatggttaacctcgacgaattgtatagaaccatgaggaatgttaattattagctttcggatttacaagcaacgattcgtataatagagaatagagaaaagaatatggaagagcttggaaataagttcaaagagttgggaaaaagggtcgatgagtatatagcaacccacataaaaattactggagaaaccactttacaaactcaaattataaatttgaaaaaaaaaataaaaaaatagtacacggggtaataattaatgatgactatattgggaagatagataatgataaatttagcattttaaaatatactcttgggaaggcaaagagtttttgaaacaaaaaaatgtatattatatattagaaaatcccgaaattggtgcttattaagattttcgccaaaataaatgtgtactgtaaataaaaaaaaattattaaaaactataatgagaaggtacatagacaaattttttaattgttaaaatattatctttttatttgaaagagttaaaatattatctggggaaggcaattagttatgggggtttggaaacatagaaaaacaaatgtatcttatattagcatatggtcgaaattggtgctgcttaaaatattatatacaagagaaaaaaagtgtattattgttaaactacttgtttttttttttttttgagtgtacagtaaactacttg

SEQ ID NO: 164602 - DNA, 2866 bp, Cannabis sativa
tttataactcctaacactctcaccttaaggatccaatatgaagcctaaagttggtgtaaatgcatcaatgtattaatagaccctgggtgatcaccaaattcaatggagtctatcacgacttaagttctctcaagttgttccgtctactcacatatattgctctaggtgagctattatagcctctctcgatttgtggtatgcaacaaaacgatcctctccactcgaccctttgagtcagatgaagaaatgtcaatagggactactccctcaaagatcgtggtactagccctaaaagacatgggaaggaaacatggtagcagtcccagaagcctacacacaataggtcaagtggggttcaaggaaggtttagagttaaatcaaaaataggtgagaagtactcgaccaaaaagaacaaggccaaaggaaagctcaccctagaagtgtcaccacgaaaggagcgactctacacgaggaatctcatgcaagggtcgaaggtcacatggggagtgaatcatgtccccggaacccatgcttaagtcaaataaattttcagtttctgtcatccttaattcatcaaattgtgtccccataacccatgcttattctacttgacggatttccatgcctcctttacggatttaccagatgatataaattttataagccttcaccaacactattaaagattgcatgcaaaactttattattacaaccagataatttttcatcttcaatagactaattaagttcatgtcttaccttagaataacctttatcttcctttacactaggtagagagcaacccgaaagtatagccctccaagccttatcatcttgtaacttaatgaatgccctcattctgaccttttagtaaggataattagtatcatttaatagaagtgggcgagtgatagaatttccttctacaaagaaggacatctcatacaaaacaaattaaatgaaataatataactttaagatctcactaagagtttagtaacttgctctgataccaattgaaatactatagtttataattgctaatttattattcaattaactaattattaattaaatgtagaataataaaattagtattgaaacagttttatagctacaaaccaaggttctataactacagaccagaaaaccagtgaagaacaatagtacagaaaaataaaaccacacaaggttttaatatgtggtatctaaaatccttgcagattgttactagtctacagtgtcacatccaaagataagactcattagtaatctcaaaagtacaaagcttttaacttatgaataaataaacttcatcttattatatgtcgcaagcttgatgcattccaccttaacaaatgaaccttgctaaaattacaagtattcaaaccctcttcaatttgctttaagagtactttcttcctccctaggaaagactttaaccactttctccctaaggcttgaagaaccttctcctgaaggcttatgcacttttttctcctcctttgttgaattgtttgaagactcaatacaattaggaagatataaaaacaatataaatatagcataccaaactatactctatacgaaactcttttttacaatacgtaaaagaaatgcgaaagagctaattaaaccccaatagtaaatatgattatttatagacaatatacttatattagacagtaaatacacggactaaaccctccacaactcacaaggaaactttcttaaataaattcttcattttttataaatttcctgtttatgtagctacagaattatggctatatatgggaagaattctttttttaaagataggaaccaaaactttcattttataacctgaacatgaaataaaactcaataataaagtcagattcaaagagatacacggctggaaaagaacaactcacaagacttgattttctcatagtaaagacattatttttgtcaaactttcccaatataaaaaagttagacaataaatattttcttattatttaaatcaaataaaacatatataaagaatatatatttatatacggccgatatcaataaataaatataaaatatttttatcaaattaaatatggtaaaaatagaattaaaaataaataattggtatatttttaataaaataataaataatgattaataataatttttttatttatttattttacattttatgcattcaaataccattacaaatagtaaaaaacttattttttgtggtaaatttaaaatatatattatatcttgtattggagatagtggaagatggaaaaaagaaaactcagagcttctatttttatcattataattgtgtgaggctttcccttgcggtaatatcaaccattgagcattattttcttgcaagtgagtttggaaatgataagctctatctacttgcatattggtaagctaaaaggaacttttgctacaatttaagggatcttttcaccttttcttttttcattttattagtatagctatgattatggtatcacatgcaaaactgaccaatacactccacaccccttacacatgtaatgtagggttttcatacatgtttttgactgattggagaaatgaatgtaccatataagtattaaataaataaataactttgttaagtagccaataatatcttcagaagagaagattgggaacataaagatgtgtaactttacgaataattattggggtaagtgagtttgcaattctcaaggttggactgatgtgataatcaatgatattgggacccaaagtaattgtatataatcccaatattaataaattctataatcaatcctaatttgagcttagatcataggccaaaacaattaaaaaaaaaaaaaaa

SEQ ID NO: 164603 - DNA, 1294 bp, Cannabis sativa
gcacagcttagaatacttgttggccaataggatatttgatatcaagggccaattaaagtgcactgattgtaagtatgagtacgagatgaggttggatttggtgagagaattcaacaaggtgaggaggttcatcgagatgaacaaggacaatatgtatgacagagctccagccatttggaagcaccctccttaccccacatgcccaatgtgtaagcatgagaactcggccaggcctgtactcactgatgatcatctcaaaactgattgttacaattttaactggctgttcttgctgttgactcaattcttggggagttgcactctctctcacctcaaggtttattgcatgtataatgagattcatcgaactggggctaaagatcgagttctatatcttgcttacttgaatctctgcaagcaacttgacccttctgggccttttgaccgttgatcctatctcttgttcatcaatttatattgttagtacttagttatgtgttaattaattcatcgagattatgctaaaggtttttttagttagtttttctttgataacaaggtttttagttagttaattaaatttcttgggcagagttaagtttcttattcatacacactaaataaaataagatatcatctttgatcataatgctctttcttctcagtttgttgcagtatatatattttcaaactttgaataaaaagacattatatacatatataaatactagattaatactatgcctccacatatacatatatgtgaacttagtgttatattttttttgtttttattttagttagtttatttttatttttttaaaaaaatattattcaataaacaacattatttttatttagtttaacgttagtacttttaatcttataattttactattttttgttaaaatttacaatttaaattgctccaataatttttgtatgggctatttatgtccattttaactgaaatttaaattagtaaaaatgaaaaaaaaaattaaaaaaaaaagttctttttttatttattttaaataataataaaaagatatttttgaaaacaataataagtaactacttttcttttaaaaaatttaaatacttaatggatttttgttaagtgagagcactatttttgatcttacctataagagcattttttttctagttttaattggttgaatagtgaaagtatatggagttagaataagtggtggaacatgctattaatagttttaatattacttttttaaaaaaaaaaaattaaaattgaacagattcttactattccttt

SEQ ID NO: 164604 - DNA, 1696 bp, Cannabis sativa
acctggagatgctccaatagatgatatcgagattgttactaaagtagttggaaaacggcgtgattgcattaaaggggtaggacgcaagttgaagagcactcctgctatttttgcctcatcttcccaatcaccactaacccatgcaacaacatcacgtccacaaatgccacaagagttcgttcaaggtgttgctcaaactgttaatgtcgtaatgaagcgccaaaacaacaatttgaaagcgattcgtcaattattgcaaaccatgtgtcctactgcaaccatcccaaaatttgaagatgtcaccatcgatgtcaatgagcttgttcagacgattatggcatagttctagtcacagcaacaaccacaacaacactctgaatctaatggtgaagatgatactgatttaggagatgactagtacttttgtatttaactattttaaaccatgactgtcaaaaatttctacctctaaaatactttttgttttaagttaaaaaattaagtactatagttataaaatgaattttagtcaattttaattttaaataatataaattattattaacataaatataatagtaaatatatttttttaagaaaaatacttacatacttattgcgacaacatatcctcggaatagttattggtagcagactttttttattctccataataagaattgcgaccatgtatcgtcgcaatagctaatgtaattcaacttttttagagcaagtgctatgattattgcgacaaaaagtcgttgcaatagggtacaatttctaaattaaacccactatattgagacgactagtcatcgcaatatgttcaaaaatttgacttttttttttgaaaatttcactatctttttagagacgattagtcgtcgatatatatgacactattgcgaaaaggccaaagtcgtcgcaatatagtagctacaggtacgaggttattgcgacaatatatcgttgcaatgattctattgaaatgaatttcaatcctgttgcgacgaaaattgttgtcgcaatagaccctttttcttgtagtgtccttaatcccaaaatttttgatattgttaaatttctttctatatgtctactcctttagggatactgaattcttagataaaaatttcttaacttattcatcccgagtagaaatggatcgggctgggagtaaatttaatcaggctttagacttatcttttaatgagaatgaaaaaagtctaagcctaacatattcataaaaaaaaaatgaaaatctaaaagtagaataaatttctaaaaaaaatttacatgcatgtatgaatcctctccatctaacccataaaaagatgacaaaagttgaattatggaaggtttcaactcaaaatgtttagtatttgtgtcaggaaagataatgcatgatggaggattagcagaaatgggaggaatgataaatgagagttttttcttctacatttacttgatttggttccatgatgtcagaatttttaatttttttcaacccacgacaattttgtttttaccaaacgatttttagaatttcgttcccagcgaatcatacaccaagtatcacaaaattaaaataacaacaaaaattaggagacatgcctaccatatacgtgcgtaaataaagactgaatttaaaatatagcgaaaaataaataatatgtatatatttgacagaaatata

SEQ ID NO: 164605 - DNA, 1990 bp, Cannabis sativa
tgacatctcttgctctaccttcttgccacgaatcaaatcaagtaagtggattggaaagactaacaagagtaagttcaaaaagaaggttatctcggctgctttgcccttgtgtactacactacaaattgttatttggagtaataatatagttgctgatttatcaataaaaatgttgaaacttaaaattatttcattaattatttaatatttattttaataaatttaataatattagtataatacatttattttcctttatgtatttaacaattaatttttatattatttattaattaataatcataattattacttccaatgttttggaaaattatcatttttataagagtcaccactttattttttaacaattaaattaagatttttattaaaactaacagatttgacacaacaaactctattaatttattagatacgcataaggtatgtataatatatattttaatattatattataaatacatataataaacaattgatttcatttagtagcagagtgaatatattggccacaaatcttattgtttgtaggtattaagtagcccacgtcagtgaagggtttatttattattttgctttaacttgaaatgatggtgtgtatgcttggatcggtattccttaatttacaagcactactagagtttaaagatatacattctctgatgaattggccacttgtcacacaaccatagtaaaagacagaagtgtaacaacctcatgctttcctttctttgcaagttttaatatgatgatgggagatcaaataaaaaagactaaagagtagtcggtgtaaacgtagtggaatattatttgatatatgtgtcattacttatgcaaggcaccacaccatattattagtcattcagtactgcgtattcaacattcgtctgcgcatttaccaaaactttattttatatatggactacgttctaatggagtggattgattttggtggacacttagatttacatattttatttttcatggagctgatcaaagttgttagatatatccccattacagatcagttagattgatctgtatattaattagttagtaaactcgtatattgatgcagcatggagatgaattattgatttaagggccacaaatttttttttttttttataataataattaaacaagtagtgtgagttaagcggaaaaaaaaaaaactagtagtgtggaaattatgatgttctagatggtgataatctcgtttggtatacggtaataaattgtattgtatagtattgtgttgaattggactccccaaccaatcccaaccacagcgtggactatgacccagaacttgtcccggactcgaaccttagacccaaaccgggacccatggacccaaactcgaacccctgaccccggatctcggacccgagctcggatccagacctatacctcgacccttgacccaaacccagctccggtccctagtgtcagaccacgtttgggttcaggtttgtgattccggtctagatctgggtctggattcgggttaaggtccgaggttcgggttccaggtctgaatcgaggtcccactactaaaaaacccagaattcccaacatttttacaccgtcgggtaaagaattcccgacggtctataaaactatcgcctatacgagcgtcgcgaatactgggtagaataaaatgtcgtcataaaagaattcccgatggttttaaactgtcggctatagtcgatactataggccacggtttaaaaccgtcgactatactaaaccatggcctatagtatagctgacggttttaaaccgtcgctatagtggattaccccaaaaaaaaattatcgtcgtcatcctccttgaaactacttcttgcatatatcgcattcgttccaaaacccttacaagcttcatcctcctccactgttgttgtgctcatcttcatcctcatcaaaattttctttgacaggtttcagattgcttttcacttgac

SEQ ID NO: 164606 - DNA, 2052 bp, Cannabis sativa
tatctctacgtatatatatagtaatgtgtataggtatatataggactttaattttaaatataagtgaaacttttttcaaaataaatataattaataattgaagatattacatatatttttttaattaattaatttatctcttactgcatttattttatattactgaacgtaataatacaaattaaagtaaaaacattaaaaatataattttttttagataaaaatgctattatatagtaaaacaagagttataatacaatagatattagaggaggcacttcctccaaccaagagcaaatagtttccatcgaaaagatcatattttgataaaacataagtagcagtatttgcagatttataaacatgagaaatatacactctagggaaattggacactaaaagagcgatattcaataacaaacaatatgaaaatcagaaacagaggcttgtgtagtctgcaatcctttaaccactaaaagagaatctgtctcaaatagtgaacatgtaaatgaagatccttaagccattgcagactatatagtaaggccattgcttccataactttcggtcgaaaattccctttgaaaggcattgacataaccgcaatggtatcaccattgttgttgcttaatatggcaccaaaaccggaagtgttgttaaatttgttaattgcagcatccgtattcagcttcatccttcttgaagggggatttaaccttggaatatttttagatacaggagccaaagttggagcagaggagataacaacagatggttttgcaacttgtgcaacatgaaactcttcaaggtagctgatagcaaagtaaagaagaacatcgtgtggttttggttttgatccatgtttctccttatttctctcattccaaatactccacaaaatttttgcaaattgttcaactgtaggttagaccatgaaactgaggcatggagcagcagttcctttaggctcatttgtcttgcaaatatatatatcaccaagatggaaggaggatgatctccatacccgtttaagacgatgacaaaaaaacaaagcatgagtgatagattctatatcaaattgacacagtgaacaataaggagaatctgcaaatggaagccacggggagatagtcatgtagtgcacaccaaaggaagatgcggacctttgagggtaatgatagtgaccagttctttttttaaaattgcatagaatgggatccactaactatagattgctgctcctctaagtgtgtagccaaaaaataaccagatttgaccacatataatccattcaactcatgatgccatatgtattggtcactttgagaggacaaggtccaaggaatctaagagttttttctatgaaactttcatgctttggtcaatactattaaaaaccaatggcttaaagggagacaaaccaggtaaccatgggtcattagcacaaaaaatagaaagaccatctccaacttcccatctcaatcctttagattacagtttcttgctccaaataattccttgtcaagttagtgaagggtaagagccatggccagcctccaaaaatgatgaatttataaagtatctaggcttgagaattcagttcaagaaagatgaaggattggaataaatcctcgaagcatgtttgacaagtaatgcttgattaaaatgaacaaaacttttaaaacttataccaccttccaccttagattttgcaaagagcttttcaagtcttccaatttattcctaatcctgaagaattcgacccccaccaaaatttattcatcattacttcaatttgatgaataagagattcatagagacgaaaacaactcattgcatatgtaggaatgaattgtgccacaactttaaggagaacttcgtttccaccaattgagaataattgttcttgccatgccgaaagaagtttccaaagcttgtctttaatctcaccaaataggattttttatctcttccagaatacgaaggtagtcctattgggctttatgccctaaataaaactctatttcaatgtattctctatcatttaaatat

SEQ ID NO: 164607 - DNA, 857 bp, Cannabis sativa
tctctcctgtgtaggtgggcggacatgatttggctctctctctctcctgtgtaggtgggcggacgcgatttagagtttttttttctaaggatggtggtttcgggttttttgacatacgggggtgctgtgttaaatttggttgtattgttattggtttttttttattatatatgtgtgttttttcttgaactcattataaatgtgttcatattaccagatcttgtattggattcattaagtcagttattctaaaatgttagaatctaattttgcttgttttttgtgttaaaatttattttatgtacgtaaatattattttgatataaaatataaagtttgtatattatatttctgtctaaaaatgtatcatagaactttataataatattttagttcaaaaatattttcttaattactatttaaaatataatatattattaatttattaataatataaaattgaattaaatattatttttttcaaaaaaaaaaacctcatatagtggcatttttagtgtgtcactatatatgtaaaataataataataaataaataaaaggatatagtgacactttttttgtgttgctgttacttttttagttttcaaaacctgactctaaacacatagtgacgcgcagttagtgagtgcaaaatggtttagtgacacgtgtgaagtgtcactaaaaattatttttccagtcaccctcattagtgacacgcaataaagtgtcactaaagacttttagagttactcaacttgggtcactaaaacctatttttctagtagtggttcatgcaacccgcttgtatctctccaacaacaagttcaacagattcagttctttcctatgtgaagc

SEQ ID NO: 164608 - DNA, 1602 bp, Cannabis sativa
tggtggtcgagcaaagaagagagaaagaaaggaatttcttgatttttttcttaatttcttctaaatgaataaagcctaaattcaatattcagcttaagacactaaatggccagttgtcaagctccaaaataaccaccaacacccacaattcaaatgaccaaaatacccttgttccttaaacttaagccattttaagcctagggtaaaatggtccaaaaccacaatctcgcttaaacctggtattctatttatctcaaatatttatcccactaaaaaaaaggttctaaacttactcatgtgactcaaacggccatccgtcgccttttctgtcgtcgccaaacaaaaattataaaaaattacatttttcatatataacacaaataatacctctagagtttaataaaatctctgaaattgagaaattataactctaatgtccattctaataatgggacccacaaaataataaattcatgtataattataaaaatatcaataattaactctaattgcctttactaatccatattctaaaatgcagtcattacagttatatatgaagtctttatataaactaatacataatacttttttaattattttttgttttaaaaaatgattccaataatttagtatatttcctttataaaaaaattgcccattattgatttatgtataaaagtgatgagtagttaatttattgtttgatttattttatttatagatcaaactcatacaaatgatcaaatagagtgatggcaatagtttaatagtgaatacaagtgataagtgatatatgatgatgataacaataattttaaaattgatgaattttaaatagatttgtcaattgtaatacatattttttttttagatgatgactattacaagtgagatccagtaatgacatcgactttgaatatagtgacgagtgaaatacagtggtgacaataattttaaattaataaattttttatagatttatcaattgttatatttttaaaaactgtctttattacaataatatattaataattaattattattttttagtttaaaataattagaaaaattaaaactacaatattaaattatttttcttatgttattaagggtaaaaaaaataagaatttactagagtacttattcatattattaaaaaaattatataaaaatgtcaaaatttaaaattttatataattttataacttaattatcattaaattaacatacaaatgcacgtgaagcacgatttatttcctaattttatactaaaataatacgtggtgagcatttttaagcaactatattgatttaagataagtcactaagcgtaattctaatgataaaatttaaatttagtgttaactcaacactaaaaattattattttagtactaaatttgtttttaattttaatcaaaacactaaaatttatattctttattataatattattttattaatataataaaaatatttacttcataaataaattatttaattattaaaaaaaattaattaggattttttcgccttgaactttgacatgtaccaaatcataccccctgaacttttaagatcgttaaaaatgccccctgaa

SEQ ID NO: 164609 - DNA, 1473 bp, Cannabis sativa
aaaaaaaaattaaaatacttatccaatcaatggtcatctcagaaaacacttatctaatattattagatggttggtcatcgtcctcgtgttttcttacagatctgtctttagagtttttttgtaatgtatatatattaatttaaatttttgtatagtaataacctaataaaaaatttatacattatttgatgaaatgtggggtccttcattcttcaatcaaaccccctttataataatgtttcatttctattcatttaaaataattattacaacttcctggtctcaattgccttcttaattaagctttatttaacaaatggagaaaaaaccatggtacccacatctactagcctttcacacatcattttgaatggaaaaaaaaagtgtctgtttgactatatgatcacttatcatcagctttgattttttttttttttttctgtttaattacatcttttttatagctaaaaaaaagtaacaggtcttttcttttgacccaccatatacttttattatatgtgataatgacattcatcaaaggagctaatttataggtttatggtttgataatgtggtttagaaatgaacacatatctcttagtcttagctagagagagagagagctatatatattgatatatttttggaatgttgaagaagaaataacctaatcctctcaattaaaaaaaaaaagatttcttttaattggatatatttatagctagtttttttggggaggcaacgagaaaaattctttttgctttttggaactatttttttttcttttcttttttgagtatgaatctattttgtagcctcatttagttggcacttcgaaagtttaacgaactatattagtcaggcgattaattggtaaactgtgacaacgtggcatggcacaaaataaaaataaatcaacacataaaatcttttttttttcttttttgaaatcaaaacataaaatcttttgataaatagattactttcggctaattaaaattttaactaagcctttaactaatattatggagctaataaatatataactatgtatgtaccaaactatataataattaattgtatacatgttgtatgtggatatgatctttttgacaagattcacatatagttgaatacttgaatacttgaatgtgaactgcaatatatatatatatatatatatataataagggaaaaagaagaagagcatgagcatgagtatgcatattctaccatgagcctgtttggtacggtttttagaaaattaaaagctgtttttttttaaaaaaaaaatgtgattaaaaagtgtttggtaaacagttaaaaaataatttattgaagaatttataaaaaaaaaaattatagctaaaagctaaatttgatacaattaaaattaaaaaaaaaaaaaactgttttgattaaaatactataataaattattttttactatttaattatttatatattaaaaaa

SEQ ID NO: 164610 - DNA, 835 bp, Cannabis sativa
  modified_base (777)..(779): a, c, t, g, unknown or other
tctctctctctctctcattcacactctctgtgtaagatagaagaaaaagaaactcttcatttcctcatcaaacccgacacttctagctcctccattcctcgaggtttttgatttttttcgacgatccaatgtttccctgagcacctacaacattcttcatcagtgggtaagtcttcaaatctcactttcatattgttttcttgaatcttccatttttcaagctttttttaaaacctttgattctcacgttgtagtgttttctttattacattatagtatgcatgatagctttaggatgtataatgtaagacttccttataaaaaaagattagattttgagctctatttagattcttgactcttcgagtcacaaaaaacacaaagaactctgttcgagtttttgaaaaataggaatttgattctcgtgaagccttggccatcacacagggtccgtttgtgaccctatccgttcatgtttttggcctaagaacttggtctgttcatggcttcaaacctgaaaaacctgactggttcataattctgtcttgggaccctcgccggttcatggtttcggtcccaatatgccttaggtagagcctatcccagccaattaatagcttaaaactcaatgtttgtttaattttttgtacctggatcttgtactttgatgattaacgactttgtacgttagggttctctagctaatattcttatgtttaggccagttgacccgtagttggggattatattatcaagatctagatttactaccatgtnnnttgtttaacatcctaaatatgaatctctaaaacaatagaatctaaacacatataaa

SEQ ID NO: 164611 - DNA, 1577 bp, Cannabis sativa
tttctttcatcaaaaaaaagaacaaaagcttttcataatctttttagagaatagagagtggggtgggtgtgggttttacattacttttgttttgtttactgtgagtgtgagcttccacaaggagattacttaagcctcctttagtctcttgttttttcgaatatgtctaattaaatcaacttaatactaggggtgtctctgtcagtacacatgggttgtcgagagctagatctagttcctggttatttattctcatgtaaggacaaacctgactcttctcttcaatagtcatacatatcattccttgaaataatacaacatagatattagatatattgtatatagttggatatataccaccaaaatataaaaccatcaaagaggataagcactcaaaacactaaggttgggtttgtgtatggtgttgctttctttcatactatacaaatataacgtcaccaatagtactaatctatcttaaggaaacgactgcatgaacatggacacatacatttgcaaaatcaaacaaattctgccagtttaatcatgctgtctctcacggagtttcaaagcaaccaaatacctgtcagaatgatgttatagggtatctctccgaccgccatagacggtctgatccagtgctctcatacttcaccctcaaccttaagcactcccaaggacaatagaatagaatagaattgaggttttcaacttttattttcaaccaaccaatgttctcttatatgaatttatcaatgttgattgctttatgtattttctccacttggaatttcataattttgtttcttctctgtttgattatttttgttctatttatatcctaattcatagttggaaagtattggcagtatttttgaaaataagaggaaagcttttcataaaccttcttatattagagagtggggtgggttacattacttttgttttgtttactgtgagcttccataagcagattactcatatgattatttatgtgctctatttgctcaacataaacttggcttacacaacatctttcatttattataacatacttattgtttagttctttcctcttctggggcagagtgggagagtgctcttgccatagaattactgttttgttattaactgtaaccatggttttcctccaccacaagcgaagttattagtatatatcggggaggatcctgtctaagacaagaggatctcttttctttttcgaaaaaaaaaaaataacatacttattgtaagtggtattagcacaaataaattagttaaatgcctttagttatatacacttagtagtataccatgatttgagttgagttgttctgttctgtgagacttgacttagctatatataaatgccttcatttcatacattgtatgatgtatgtgcttaactttatttcaaatgtggttttaagggttgaagtttcaataaggtcatcgtggtggtggtggtggtagggacggtggatgagcacagcaaggacgttggtctaattgagctaagtctttttctttctttttacttaatttcttatagttaaaactacaactttgtttgtttg

SEQ ID NO: 164612 - DNA, 848 bp, Cannabis sativa
aaaaaaaaaaaaacagataaaaagtgtatcaatggcaacatccaagtacttacggtcttccgacaggaatactaaacgatattgggaatactctcaatcgcaaatttttttggagtttgtccctactaaataaatccaaatggcaatatgatacttgcctcattgttcatattttaccgcatgacaaattgacttgtcccaactccccacgaaataaactttctttgtgaatggaaaataagtcaaactcgaaaaaaaaaaaaaaaaattatttgcatgtctcacacctatatcttaattctaaagatttcaagtagaaaaatcatcctcaaatcgaggtacgaacgcgattagagatctgaaaattgacgatcatcattaagagttatttcaaccattaaatcaccataaatagccaagattagcccataatctagcgagacgatgttagctaattttctgcatcaatctgaaatgccctgtaattagtcaatgtaagcataatatacgatatttaggtaatatcaatgacgattaagatcgaccataattaaatcgggtaactgaaatatttgataattaaatctaaccataattagaatatttttattgattagtaaacaattaattatattttataaatcaaatcaaattaaatatttaatttgttaccatataaaaatattctaccacttttcaaacttaatcatatgcatagttctaaaaatttgattatttcatatgcataattacataaggaacattattttgtgaaataattacatttttacattcaaagaatgtttttttttttcatttttacggttttctaaaaaataacacgaaaa

SEQ ID NO: 164613 - DNA, 1302 bp, Cannabis sativa
taagatcaaatatgtgatattgacatagaatagatatagcagtgagttcataatatcttttccactatcaatatcagtctagtctgatgtatagtcaatacatctgatacaagtctactttgctaatgctctagaaaagagattctatgtatacaagtgtaagtaaaccacatctttaactatcatgttgttagtgtaaatccaatgctgcactgacaaatcatggaactaaaatagtttgaatcatattatcaggattattttctactgtgttgacaacactataatcatgaataaaaatatgattgggatttaacaaaatttatatatcaaacatatgattatgaaagtaacatgttaaccaaggaatgtacaaaagttataaaataatttttgatcttttattgataagaaaaataagattacattgaaattgagttttctttagggcataaaaccccaacaaactcccactttcactaacataaaaaaattagtacatttcaactaatcctatattccatttgcacttctcgaatgcagtctctatcagtgtcttcatgaatgggccaataatattattttcagtgtcaaccttcttcatgagtacatctcctctcgccacatactcctgggtgatgtggtatttcctctctatatgtttgctactcttgtggctttaaggttctttattgttggcaatgccaccagtgttatgatagagtgtcacaagttgtttttccatatttgggataataccaagctctgtaaagaactttcttatccagaccaagtccttactagcctcagtagcaactatgtacttgacctccatagtagagtcagagattgcaaattgcttaatgcttcttcaaatcactactcccccaagagtgaaaactatccaagatgtagactttctggcatcgacacaagcctaaaaatttgagtcaatgtagcctaaagggtttaaagcaccacccttgtatactaacatatagttttttggttcttttcaagtacttcagaatgtgtttaactatcgtccaatgttccttttttgggttggactgatacatgctcacaattcctactgcatagtaaatgcctgatctagtgcataacatagcatacgttagacttccaactgttgaagcataaggaattcttctcatgtcttctatctcttggggatcagtgtgacattatgttgtggtcacgcaagtgtacgtatcgttaacaagtagtaaactcaccaatagtgaggtcgatcgcacgagaattgtagttaagtacgttaaa

SEQ ID NO: 164614 - DNA, 797 bp, Cannabis sativa
aaacacaaaagcacaaaaaaaaaaaaaacaccatcaatttttctcaaggttcacccaaaaatgagttacgtcattgttgagctattcctcagatggttgctgactcgatctctaatatctttgacttgattacaaggtataggcaagggttccaagtcacattaagatcgacaaggtaatccttataattttgtctctatttttcttttctctctttttttctttgtattgcaatgttcctctctctaactctctatctatttctctctctatatatatctcggagtttccttagagtaatctacaaattaaactaggagcttggagaagtcaagtatatataggcgttgcaggtctttcttttctattgataattaggagctgttaaactgtattatgtgtaaattggattggatcagttacttttacatgtcaatcaacattcaatccgcacaagtgcggattttagatttttcaatccaatccaatccgcactttacggatttgattgaattacatcgtgcaaattagattagattggttattttatgaacatcctaattactattaggcactttaggccaatttcaatgggtgttgctcatgtagttgaccaaaaaatggtgggccatactatgttatgtggcaagcaaggatgcattttttttctcgtggggataggtgcgggaacccgtctttattggggcggggacgatgattattttttgtccccgaatgttaaacagggcggggacggggatcacactccctgtcccgacggggacccgtttagtatt

SEQ ID NO: 164615 - DNA, 878 bp, Cannabis sativa
ttttttttttttttgataactaaggtttggtcttggcctttagcgcgaagaaggttgaggtttaaggcatttttcacggtgaactggaggctctgtgttttggtgttggcttggccttggaaatgtagtttggaggtgttgatttcttttcggataatgttcagctggtcaaagctctgatcgccggaaaatctctattctggagccttcacttttctttctctaaactttgtgtttctttggtgagtggtgattgtattgtgagttggatttatcgtgttttcaataagactgcgcatgctctagttaggtggggtttgtcccattcttgtaatgatttgttgcgtctttgggaggtgagtccccatgtactcaccaaactttgtgtgttgggttaatgaatttcaatttcttagcaaagaaaaataaaataaattaaatagtacacacaataaacatcaattcttagaatcctattatagatttcatggaccatttttttgaagtaatattattggaaatcaacagcaatattttaaaccactacaagagcttaaataataaataataataataataattaaaaaaatcaaattacccaagaatagaagtaaatattttttataatttatttttctgaaaagaagaagcaaatcctttttatagaaaaatgggattagccttaataacaattattattatttgaaaagaaacaattacccttttcaaataaataaataaattaataacatttgtattactctcaaaagacatctgaattggtcattgcttttactctaccacaatcaaggtacgtgtgaggtttatataatagccacgtaatacaaaatatatttatgtattagtttttttttttt

SEQ ID NO: 164616 - DNA, 1132 bp, Cannabis sativa
gttttttgggtttgtattcatggtatggagagcttgttcgggatgcttacaaacaaatgtgcaattgaaaacgaaacatgttagtgtggatatcctatgcccgatgtgcaaaagtacgcctaaaacaacagtgcatgtgttagtcgactgcccgagagtccaagaatgttggcggttactgctgaaagctttgcaaattggtggcaaaatagtgttcaattgtggcaactggaagagatggagttgggtgctgttctatgttgggtaatatggaagacaaggaatgtgcttgtgtggaataagaaagatccaaatgttcataatatgtttttttttttttttgacaaaagctacacttaatcaatataaggctgctcaagaaaagatttttgactctccatcaaacaatgaaaataatgatgggagtcgggagcagtggacgaaaccacaaagtggaatgattaaggtcaatgttgatggggccatatttgaaaatgtgggttattatggatatggaattgtggctcgggatagtgatggagatttgattgaggcgttgcagtctagcacaaaagggagtttcaatttggacatggtggaagctattggcatgaaggaggcattgagttggattaagcaaaaaggatggtcaaatgttaccttggagtccgacagcgtaaacgttgtctctgcaattatgaagaatgccagtatgttatctccatatggcttggttattaaggaatgcaaggtgattttgtctgaattagttaatgtgtcggtcaagtttattaaacgatcaacaaataatgtcgctcatagtgttgcaagggcgtcttgttttaaaactggttgtataattagtagagggattgtccctacagatttgttatccttgttattgaaggatgttaattaatgaagtttgattattaacttttttttttaaaaaaaaaaaaatcacttttaaacaatgttatatatatatgacataaataatcttgggattatttcataagtatttcataagtacacaaaaacaataaaaaaatacaaaatacggttggtacggaattttaaacttttttacgattttattttattgttttatttacataaaatatagtctttt

SEQ ID NO: 164617 - DNA, 836 bp, Cannabis sativa
  modified_base (767)..(797): a, c, t, g, unknown or other
tgggctggttagccatagaactgacaatctagctggcaactacctccacaggctggctggccatagcttcattcaatcggtcaggcaatgctccctttacgtggttggccacctggtctgtaccctggctagcccgatccaccaacactctgctctcatacttttggtctacagtgaccaagaggtaaaacacatcttgctagcaggatcccttgatgaagggaaagaggaagagaccaagcaaactcaaagcatcatgtctgcccacaaagagttaccaggcccttcaaaaaacaaatcaaggaaagaaattcttcgtaagacacttactccctgaagagtattccttgacaagaaagatcctgtagcaagcatgctcggagcctactaaaaaggttcacatcgagttacaagataataataaaggtgcatacaagcttggcgagtacaacaagaacttggagttggctcttctaccaaaatactagaatagagaaaatctcacttagttttctcactagccaacttgtatattagttcctctaacattttgcaatgtagggatccataaaagagctagtacccgtcgctcttcaacgatggcatcccatcattctttagtgatggcctttgcacgataagccctgcagaggtaggcaaatataaaagagctagtacccattacttttaagcatggcctcccgtcactcttcagtgatggccattgtgcagtaaggaattaataactgagagtgcaattccaagtnnnnnnnnnnnnnnnnnnnnnnnnnnnnnnngtcagtgaatttacctggtaagttttgggtctgcttatt

SEQ ID NO: 164618 - DNA, 1841 bp, Cannabis sativa
tattttttttttcttttcttaagttatataattgatttatttacatttaaggtaaataaaatgaaaatgttacaataatgtaggtatgtataaattataggattttggttgttgagtaaatgatgtatttggtatgatataatctataaaaaattatgtacatatatctttagtttttggattttatttgttttgttttagatttaattcatttatatatatgtatactttttaggaatattataagcatatcaatggataaatgaatttgtttatatttgatttaatttgtttataaaaaattttatgttttggctatggcagtcaggaggtccagaatggagaaatctattaggaagaagagatgggagaatagccaatcaaactggtgccaatggacttccagctccctttgaaaccctagatatactccagagaaaattcagggatttagatttgaacactacagacctagttgctttatcaggtaattttacatattttaatttaataattattattaaaaaaaaaaactaattaaaatttttactccctaaactttgatatggactaaattatgccctctgaactattgagattgttgaatttaaggacttttatcccattttagtaaaaaaagtctaacatggatatgaaagttcaagaagcatgatttggtagatattaaagtctgaggagcatgatttagtacataaataatcaccgaaatagtaaaattgaatgaaattagacaaaagtttttaaatctagcaatcgcaatggggaatttttaatgaccagaaaagttcaggggacatgatttagtacatgtcaaaatttagaagtaaaaatcctaatttagcctaaaaaaaactaagcaagacagtactgatatatatttatatgtttatataggtgctcatacatttggaaggggtcaatgtggaaccttcagtggaagattattcaattttagtggcacaggtgctcctgatccaaccatagaggaaaactacttgagattattacaagatctatgtcctcaaggaggaaacgcctctatcttaacagatttagaccccaccacaccagatttgtttgacagaaactactactcaaatcttcaacaacacatgggattgttcacaagtgaccaagagctgttttcaagcccattagcagcaaatgacactcttcctattgttaacaacttcagctcaaaccaaactgctttctttgaaagctttgttgtttctatgatcaaaatgggaaacttgagtccactcactggttctaatggtgaaattagattggattgcaaaagggttaataatgtttcactttctaccactacaactactacttctggtagaagtgcttatgtttcctccatgtaatgatttacttataattaagatccatgcatgcatggattatatatgtttggtcttaattaataatatgtaataataagttgatatatatggcattgtatcatattgttatatgtgtttaaattttgataaataatggtacttttcaagatacaacatgtcgagtattatgagtttccatctcaaaattaattggtaaaattaattagtgatgagtggagtaacttatattcttatatatggttcaatatttttatattatttgatccatgtgtgggataatactatccaacatccccatagtggctatttttttgctaattaccatcttgaatcaccttgttacacataaagaattagttaagaattagttaattagctttacttttcttgattagttatttctgttgtaacagttagttatcaactaactcttttctttctgta

SEQ ID NO: 164619 - DNA, 3829 bp, Cannabis sativa
  modified_base (3760)..(3786): a, c, t, g, unknown or other
aaaaaattctttagagtaatctatgtagatttacatttattttttttaaaaaaaattatacataaaaatattaaaattatatcatataattttattattcaattaatattcatatatataatttcaaatttctatattgtgtaaggattgttcaatttctaatttttcttctataatgtacatttaaaaaaagtgtgcttttgtatttatataagaaattgtatgataatttttttaaaaaattctttagagttctcgacatagatttattagttttttaataagcatatatatttaaatatttttaaaaaattatatataaaaataagtttaattatttgatttcaattttattgttcaataaatatttatatgtataataatttaaccgccgcatgcgaagcgcggcctgtttactagttttaaaataaccataatagaaaatttatagaaaaattaatttttcaaatttaaagtctcataatatctaaaattaatataaattaataataaaaataataaaaattaattttactctaccaaaaaggagattctacataaaaatctaccaaaaattgaattctattttattaaaaaaataatttttaaaacttgaaataactgcaaaatagaaaaaaaaaaaaataccctttttcgcccttgcttagggtttaaccctagccaaaattttaaaattttaaaaattcatatctttttcactttaatccaaattaagttccttaaaaggctaatctgctcaatttttcaccaaatttctaaataaaataattccagatcgaaattcaaattatttttcataaaaaatttcgtaatatcacaaacaatcatcaaacacacataaaccctcatgaacacatccatttcaaatatcgtttgaaattcatattttatgaaaataaatccttaccatcgctctgaggctaattgttggatattattttatcaagatctagatttactaacatgtatgattgattataaactataatctaacatcctaaatataaattccttaaaataatgaaataaacacataaaagattaaggaatccttacaattatggcagtaaaataagatgactacttccattcagatctctagcccttgattcctgtctgtagcagagcattatcaagatttgaacctgaatcttctcctccttcgatggtgttcaacacagtcttccacaaaagtttgagtatcaccttgaatagagtggcctaatactcaaacacctttagaacaatatttttgagagagaatacgtgtaattttcaaaatatacaaagaaagaggagaagagagtagtctgacaatgaaaactcaagttaattctctcttctcatcactttctttatataggcttctcttagggctaggttatatgagattgggcttaaaatagagacatgggctgaagtctaactctagggctgaattcctcatgggctttagggttagatttatgccactttattttatttaaatgaaataacgtctcttttctaattttactacttatctcttctaattatttaaatactaattttattttaataattataaataattatcaaataaaatacaatttaaatatatttattatttagacccacaaagtgtactaattaacaaataaacccctatttctcttttcttctcaaaaatgccaaaacttagtgaaaattctcaaaaaagagagtctatttttgaatgtgttaacgcaacttttcgttaaccaaatatatggccttttacgtaataaatttactacagaatttaattataataatgaacacatgatattttacgtggttttgtagttaaaatctacatactccacaagtacatcttattagggatatttctttgaatgtacggtataaatcttaataataataatagataatagaattctctttctattttgtcgtcccttttctcatagtttttgtctctatttataggtgtataggttgacagttatttttattgcgatcgattcatttacaattgctgatgaaacgtggacatttcccacctttcatttattttcacatgggatatatctaataactactcaactgctccttgtcttgatcttttaaacagttatgctgactaaaaaggttgcttctcgctcagaatgagttatccttcttatccgtctttagagaaaaatatactaagtgtagacatgcttcttctcgcagcactctcatattataaagttatttgcgaagtagcgttgagagcgagatggatcaacgtaattttctccatgtacaattgtgtgatttgatgagttgaaagcttttatttccaagtatgaggaataacgagccgtaaactccttgatgtctcatcttgcacgcttttattatatactctgtttatctcgagccagacatatggcctcgtcaattatatttaatagttattattcctatacaaatcaaagaaatgagaaaatactattgaaaataagcaatcaacgagtttgaacatttctatcaactttaatgaattggaacgagttatttaaattgcatttaagaatgcaatttacttattatattcttcaagctggttcatattcctttgtaggacacttgtgagcttttgataaatagcctaattttgggtataaaaatttctccctaaaaagtattttttgattaaaaagaactttttaaatgatcctaggggtataattgtatttaacccatttgaaaaattgcgtgctttgagttttggcggttcaaaactttgaggcacatcattgagcatttaatgccctgactattcctattttgcaaagtttccacccgttagatcagattttctttgattgaacgatgatcacttattgggtatagatttaaaactgatcatctatttcaccatttttgttcttcaaaccttcgagcatttttgcaaaaaacttcaactgtcctctttccaaatttgtatgccctcattatcccttacatttttcttgcatattacatctgatcacctttttcagttctagaaatcatcaagatccatcttctcaaccctcgagacttcactcacaaagttctcttctacccaaaaattcccaacaagacggtaagtgatacattctcttttcttattgatttttctttttatcttcacaatttggttagtgtttctctatctgcattttttttgttgtttgtgtaattttgattttgtttgtttgaataattctagggctaggaaaatttttaggttatacaattcgtagattttctgggttgagtttgcgttttgattttctaggaattaggatattattatttataaatatgtcccaatttgttcaagaaatcacaatcccagaatccctagaatcagtttgtcctcaaatttttgccattaaattcaggcccaaaacacacatacccaaaaccattctagaagtaaatgatgcaaaaattagggatcatctcgttaaaaccagccaagatgaaacctctagttgttataggtgattcttccaagagataattgcgtgtagatgccactttttgagagaagctacttggcctaaacctttgaatttaattgatattctcttagtgagactactgtttttacctcttgtcactgttactttttcaccaggtgacttagattttgaaattatggcccaaaaagcacgcaaatcaaagaccctccaagtgttggattttatgtcctaaataaaannnnnnnnnnnnnnnnnnnnnnnnnnnattaataaagatcagaaaaaacatttaatattgcatggttcac

SEQ ID NO: 164620 - DNA, 980 bp, Cannabis sativa
tgtgtctatagcccacccaaacctataactcaaaatttttatgtagtatactttttttgtatttaaaaaaataataattttgtaaccttttgtgaacataaatttaataatactttacttgagatataatacacacaaaaaaagaaatctttggcccattattacgcaaggtcaaccctgcctattgattaggttgagaaaatcacaaaaattttgtgatttgctatggataattttgctgcatatgatcaattttgaaatgatccaataatttggtgatcccaccaatgccttgtgcatggtattgggtagcaaaatccttaactttggttgccttgtattttggaggattgttttctgataataattctttgatgggtccaaacacttttgaagttggcaacatatgagtactgaaaaagcatgccactgatattcttggaccttttctacttgctaatactctatgctcaacacttttgaatttatcattggttataagctgcaaaaaaacaaaaaatatatagtgacaaaaaatctctaaatacactacaagaaaaaaaaaaactctacatgcacgatgtactttggaccgacatttaatcgttccctctgtctagagaatcaaggccgacatttggcatgacaaaggcccattaggcacgtcagctgtcgtgcccaaaccctttttttactttgaaaaggattcgttaggattgggcaagaattttcccgagctcattattggggccaacacctgtcgtgcctattgctctattgtgtcgtgtcatttgaaaaaataggtatgacatatgtcggcccaaatttccccctattttataacttaaaacttcttcccctttgctcatagccctttacactgtgtttggtaggagggagaagtggagggatggagaggagaggagggatagaagtgggaggagataacaaatccatttgtttgacaagaggaagtgaag

SEQ ID NO: 164621 - DNA, 2461 bp, Cannabis sativa
aatttgatgcagaaactcaatattttgattatttgatttcagaacgtagcagagaagttgggattggagcgagacaaccggtcaaacttcaaagcagagtatgggcggttctcaacaaatgtggatggagtgtttgccgcaggtgactgtcggcgtggtcagtcattggtggtgtgggcgatctccgagggtcgccaagcggctgcgcaggttgacaattatctcaccagagaagacaaaatcgaagctgttagcaacggagcccctggaaaagatattctgaagatgcacaatgatttttcgaagaggcaacaagacagtagcagcaaacacacagtgatgacataaagcggtggcgtttcggttgtagaaatgatgatgacgtggaagcccaccggtcaccggagtgttatacagaggtgaacaggggagcaaagatttgtagtaagaaatatggtttgagagtgggagcgtcgtttgttagatatatttattttgttgatagttttagcggcctggttgctccggttaagctttttttggtttacaaggaataatgtacagttttgtttcttaatattgattttagaacattttcacagaaattgtctagatctttttctagtttatcaattaatggaaatttctgatattcttctttatgttatcttttcattagactatattagattttgttccttttattagtgtttttaagtgattactataattctcccttactcgtaatgtttttttaattattcaatgacaactttagagtccaactacacacaacaaaaacaatatgaaaagaaaatgagttctcactgaataatttcaagctgcaacagtttgaatttttttttgttcaacatataaataaataataaataaacataagagtttatataaacaagacattaagtatagaaataattcagaaaacatatcctatacccagaaaatacaatcaaagaataaggctaattcgtgcaggtagattttaatgaatttcagtgttaacattcttcatctgtttttgaagttgaaggtaattcaataattttttcttccattttcttctacgaattctcttctacttctttagtatttggtaatgcttcattttgcagtgaccaccatgacgaagcttacccaataccatattttttgagatataatacttttgcagttgcaaggttgcaccatttctatccttttcgttaagatacactgtatcttcttatcgaatttgctacgtagatgattttgcacgaatacgcaacacacacagccaaattctcgaaagtggcttattgtaggtttacagccccacaacttctcaatgggtgaagcaaaccctaacttttcttggggaagtatatatcacatgagttgctgtcttcaaacctttggctcaaaatcttcctggaacattctccgcgtgtggcatgcttcgacatgtctttgcaagatgtcaatttttccacgtgtcaattcttcctctcggctactccattctgttgtggcctatttgtacatgtgaattgatggcgtattcgacattctcaaagatactcagaaattttatctgaggtatattcaccactattgtctattcggaggcattggattttctttccgacttcttctactatttctttaaactctttagattttgaaagagttacaaatttttccttcataaagaaaaccatatgtacattgagaagtcgttgatgaatgtaatcatgtaccacatgccgctgattgatggttgcttgactcgtccgaacacgtcagaatggaccagctccaatggtgctttggctttgaactttgaatcttcatatggtaattgatgcgccttcccgtattgatagctggcacatactgtcactattctgacctcgagttgagaaagacccttcagcatagacttcttcatcatcaccttgagtttatgataactaacatgtcttagccttgaatggaacaaatttgctgtttcgttcttctaagtcttgtctatataagctgactctactgaaattacatagatagactctaagcgtcatcatctcatcatcgctgttccagagatctcaagatcttggtagatcttgagggctgaatacgacatggaggtcgcatgtcgtaagttgtgccactaatagtaaatttttcttcatcccaggtacatgatagacatcctagagtgaaacttcttttgggctgactctctgtagtcttgagttgttgcccgtcaccactacacgaccatctttgtaatcgatcttgtcttgtagcttctcttcgtctcctgtcatatgatttgagcagccaagtcgactattcaatcattattgtagtcgattgttccaagaataatagctgtcaaagctaattcttcttcctccactgcgaatgatacttctgcgtcccattcttcatcacttgt

SEQ ID NO: 164622 - DNA, 2557 bp, Cannabis sativa
actttagagatagaggtactacaagatgaaccagtgtaatgagtcatggatgattatggagaatctcgaaaccattatatctaaagaaggaaaagtaagggtcgccttattaaggaatgtgacactcggcaccttcaatattctagagactagaggagtcgatctagggtaccataggctgattcatctaagaacacacaacaaagaacatcaaacaattactagaattgaaaatgtaatctaaaaccagcaataaacaataaagcaatcacatgaactgagtatgaaacttaaatggcaagaatgctaaaaatttaatgaacacctatttttaacgagcttcgaacaccaagccaatgagacgtccctacatcctcgagaaacaacagttcatgaatctttattgatgaataaaagatggtgattacaaattgatctctcaagaacaagagagccccaatgacaaaggagacttgctcgtgaacactctcactcaatctaatctatctcaccctctctttctctcaaatctatcatgttagttgttgtaaaacaaggacttaatcaattgtatatatagagctagaattgtcataggtcccctaaccaactaactccaaaaagagtaatagatccaagagtgccacatggcacattgtgacttatgttaaaaacattacaattatcctcctttttaatttaagttacatattcttgagtttgctacttcattgtacctctaaaggaggtatatcactacagagttgtgatgttgagcaagtttagacaatgtctaaactttgctagagttacacacttagtcatcacatcattaggtttatcatcaatccttatcttcttcacttgcacttcaccactcgtaataatttctctgatgtagtgaagtttgatgtcaatatgtttgcttctttcatgaaatattggattcttcattagatagagagcaccctgattgtcactgtatatgtctactgcattaacttttagttcatgactaaagcctttgagtcatactggttcctttatggcctttatggctaccatatattctgatgttgtggtagacagggcaacaatgtaggttcaatttctaacacacacatccacccaaaactataaaacaataacctgtaacactgcttctaatgtctatactcctagcatagtctagattcacatagcatgtcacctcacaaggtgagatgttgtctttgtgaaattttattccaatgtttaaggttcctttgacatatttgagaatccattttccaacatcccaatgttcagtgccaggattggcaatgaacctactcaccacactcatagcattggtcagatctggccttgtacataccattgaatacatgaggcttctaacacatgatgcataaggtatgctgctcatataccttatgtccatttcagtttgtggtgattgagcttgtgtgagtttgaagtgaggagcaatgggagttgttacctgtttggttgtgttcatgctgaacttatccaagactttctaaaggtaacttttttgagacaacatgatgtactctggtcttttcctaacaatgtcaatccccaagatcttgttcgctcttcccaagtctttcatttcgaattcactgttgatatcttgtctacttcagctcctaattttcttataatcaatatatcatcaacaaatagaagtagatatacacgatcattgagatagacacagggatcatacttgctcttgatgaaaccaattcgaatcataatctcatcaaaccttaaattttactgtgttggtgcttgctttaaaccatatagtaacttttgttgagtaaacaaaccttgtcttctagattgtccacttgaaatccttttgaaagtgtcatgtaaatttcctcatccaacatactatgcaaaaaggttgttttaacatccatttgatccacctcaaagtaaaattttgtagccagggccatcataattctgatggatgtttatttcacaataggggaaaaatatcattgtaatttataccttctttttgactaaacccctttgcaactgtagagaatggtgaatcgaattgtgtattgtatttcatagagtagtatacatttatatacaaagctaggagactaaatagaaaactactaaatacaaagaggaaactactaaatacaagttaccctaatttttacaactaatattctaacactctcccttaagctggagcatagatgttaatcatgtctagcttgttacatagataatcaacctacaccccattcaaagcctttgtaaaaatatctcttaattgttcttcggtcttcacatatcttgtggagatcagaccttactgaatctcacaaaaatacaatcaatgtgcttagtttgctcgtggaacacgagatttgaggcaatatgaagagcaacttgattatcacattacaattttgttggaatagaaatcttaaactcaaattcagtcaaaagctgataaatccatattacttcacacacagactgtgtcatagctcta

SEQ ID NO: 164623 - DNA, 2233 bp, Cannabis sativa
ttttttttttgcaagggaacagcccaataacataataaccagacaacccaaactttatcctcactttcttgattttcgaacctaccagtgaaccagcggctgaggtccgacttcagccaaaaatcccaaataaacggccctaaagtcccggccagccatacttggaaggcaggcagcgacaacaccaagcttaactccatctttattctttaccaaccaacgacacctcactgtaagtcatctccaatctccaaagtttttatcatttttttctataaaaactttgtctttgcttgtttcctatgatttagatatgtttaatttggtttgcttgtagtcttcatgaaacagactaggtgtggtcattatttagattttgggttcttcatttttgggttatttttttggtcgatgagcagctctattcttcaattgatgtgtatatatatatatatacatattaatcttattttatctcatgatctcatattatatatatcaaatttgaaattaatgggaaatttaggtatatgggttgtgatattttttaatggtatgtgtacatataaaacactaattaaaatgaatggtgtgtgtctgtataacatatggttaaattaaagctgtgacacaatttgatcctacttatgcagagcatacacatgcttaacctctctctctctctttctcacaatatgaaatatatgattattcccagcatctaaggaatagatacacacaccttaccatattccccacactacattatagtaataaactgtctgtattttactttgaatctctctagcactatagtttggcccacctgctcctcacggcaccgaacccagaaatttcttggcaaaaaacaatacaaacacaataaacaatatcttgttggtttcagtattttttgaaaaggtgatataggcatttatatatatgtaggtaagagatgtattattattatgttaatttgtatattgaatgtttttaatataattaatagtaactaggctgatatactattattataatcaggtaagttttactaggtctggagaaatataggacttgaaatttgaaacaagtatcactaaaattagaaggcaactcagctttcattgtttttgatgatgctgatatagatatggcttctgagcttgcacttatggaattttatttaacgtgtactacatttatagtgctttacttacatccttacttttgctataacatttttaattattctatcttttatgtttttcagggagaagtttgtgaccttcaagaaggtatatacgatgagcttgtaaagaagtttgaattttttttttttttttttttttcagaatacagaggatgacatagttcaacttttactataggtgatggtcttataaattataatgaagctttaaattcaagaaggtgaaattctaacctgacacaataaatatcccaaatttattaaacttttgagagataatatttatcagcaacgcttaatggtactccaccaaaaataactgtgatcaatatccattaaaaagaggaaagttttaatcaatattgtactgcgaaacaatactgaaaaacaaaactacttaaacaattaattaagaagattgggattcacctaatcgaagataatttgttgatgcaaaactcaataatagttttgcccagggtaaccgatcagtttaaaaaatgagccttgaaatcaagcttatgcagtgagaaagtgaaatagaatatgtaggagaagaaagtgggttaggtaatgaaaaaatagagatttggtggttaagggagataattttgtttttttgttttttttttttatagaatagaggagtggaatgtgtgtgagaaaaagaattatattctgtgtgcaacaccccactaaattatgtgtacacttaatattacatccaataattattaagaatttaaggggtggatgtgtccaattttaggatgtgaataaccttatatacagtagattttaagaatactctattcaagaataacctttaatttattataaaaaaaatgaatttccaatttaggccaattataaataaaaataacttctatattataattagttatatattttttagttccgtattaatgaaatatatctctataataataattacatcttaaaaaaatatatacatatattttataaatttatttatgtagaattaataattttatttcaaat

SEQ ID NO: 164624 - DNA, 900 bp, Cannabis sativa
gaaaactttgtattgaacaaaatggagatattaactttattgcaaaataccacacatatgtgaaaagaggttaaaatattttttaggggctaaatgatacaaaaaaatgtaggtgtagaccaaatatataattatgaaaatttatccaaaatatatatataattataaaattgttaaaaagaattagaacaaaaaaattatttattttccaaaattgctaattagagaattattttgtgatgcatatatattaattcaagttttagtattggagatgttttaaatgaaattttttaggggtattcttgaaatttatataagttcaaggacttgaagagaaaaaagaagaagcaaagcaatgaataaagttgttatttttgctgataaagttgagtagtattaatggtgcctacataaaacatcctaattaattctgagtacaactacactgtttttattttaaagtataaattctcaatttattattattattattattattatttttactttaataagaaaaatacgagaaataataacaacttttcctaataaaactcttattattaagttgttatacattttttaatctagtcaattaaaatatttttctaaggacttttgtattaaaatgtgttgagttgatattattttggatcttgtattttacaaaaattatcgattgaatctcttgtcttgttaaatgataaaataaattttatatttttccagatagtataaatatgactttgagttcaatttttgataattttttttttaatattactaatttgaagataatttttaacatgaacagatacagaaaatataatcagttttgttataacttttatatagggtttgttgaccgaggttttcggcaaccaatataataataat

SEQ ID NO: 164625 - DNA, 841 bp, Cannabis sativa
catgtctcattcgtaaaagcttagataacaaccataaaaaccaacacaactcgggtttactcatcgccgtgatgtcatctttcatgccacgtgtcaacattgatgtccacgttactagagaaaattttcgggttaacgataattgttgttaggtttcttatatatcggttgcctaatgcctcattaggcaacagtactggaaatgttgtctcattaggcaattcaattggataattgttgtctcattagataacaatactagtgttggttgtctcattaggcaacaatacttgagttggttgtcttactagacaacgaagaaatagttactttataaagtaacagtttagtttgtcttattagataaatatttggtattagtgattaattgcattgtgttattagatttcgtgtttatggaattatacatgtgaatacttgaatatgtttaaatgtgatatagatcatatttgtatattgttatgaatgtttgtgttattttttgatgagtttttataatttacgagtgctttgtgatgcatataagctcataggtcagaggacttctcgacaaatgtacatatcagctcattcggctagcagtgccgagttgttgggatttcgttatggcccttttgagtttcaagtatattttttttgatgcggtgatcaaaatcacacatgattaaaaaagaagcaatccacaatcggcagcggcacctcctcgaaccaagttagctcattgttgtgaaaattatatacgcaagtatacgcagtcaaacaagtaataaagtgataagtaagatcgtctccacatggattgcaaacaaagtttgatgta

SEQ ID NO: 164626 - DNA, 1062 bp, Cannabis sativa
aaaaactcttaatagcaagcaatctaggagtacaaaaattagatagcgaaattaatcgagaaggctttttcaatggagttttcaacatttttttctctattttcttcttttattcttaattgatatgtgtgaagttgctactatgaacaagagtagctaaacagtttattagggtatagatggatattaattgacattaatttatagttttaacgtgatttaattttcttccaattttctatgtattttattttattcgtacttattctttttaattgcttagccatcaattaattatttatgattttgatatgaaatctgagaagtgagtgtcaattatgctatagtgaaataggaacaaattttgatataggacgagagtacccatgtggtttggatagcttataggtttctgtgtttaatgccttttatatatttaatttatcacgagagtagaaaatttgcatgtaattgagatttctatatctgagaaggctataaattacttgagtaaacctgttattgcatagaaattaattataggaattgaatcatgctagaccataatagatagatacaattgaaatcaataactctaatcttcaatcattattaatttacatatcaatttacttacttgtttttattgtttttattgctttatattctagttctagtctcttcttaaccaaatagaagtaaaagtttaattttaaagtacttaactacaatctttgtgggatcgacctaactctttgtgagtctattacttgttaacgatacgtatacttgcacacttatagaaattttagaagtgtgacagaatgtatttttacagctaaattttttacttaggtattaatttgcaactcggagcagtggcagacccaaatttaaagtgacgggatgtaatttatttttagtaaactttaaaagaaaaaaatacttttagtggaatttaaacatttgatctccatcctatatgtaatttaggacaataattatattaaagctaatattatatttttaaatattatcgtttattataaatatatatcctaa

SEQ ID NO: 164627 - DNA, 850 bp, Cannabis sativa
  modified_base (591)..(593): a, c, t, g, unknown or other
acccctcatttccctaaccataggattctttgtgatctctccaagtcgtcgatctcatcttgtggaatttctttctcttttcgacataaaaaccgtctgtggcggtattaccattctttattctttcatttaaagctccaccttttctctacaattcattgtcttttttctttcttcttgccatcttttgcatgcagaaagaattggaggggtgcatcggtacaccaattttagaggagtatatcatagaattttccaaatttatatatatgttatgtaatttaggaaaattctacaatgcactgcttgaaaaggatgcattgatgcaccttaatctgttttggtatttaggaaaaatatttagtccgatttttttatgttcgtatatactgtagttatattagatatcctgcaaaattttgaaaaatctaaaaaaaatttacatgccaaaaatagggttcaaagagtctgttgaatgcatggcttttttactttatacgagtgtaaaatggacagtttaaacattgaattctacattgtaaattattctaaatttctcaaaattttgcaagatgtcttaaataactatannntacacgactataaaaaaaattagactaaattttttttttaagataccgaaacaattagagattctaccagtgcacaattctagtgaggtgtattgtagaagcagcctgtaattcatataggtgcataggtattttatttctaatattaatcaaaatgttggtgtatactaaaaaaattaggtagaaaattaattattatttttttaggctaattagtaattttttcccctgaactttgatatgtactaaattgtgcc

SEQ ID NO: 164628 - DNA, 6119 bp, Cannabis sativa
ctctctctctctcgctctctctactacacgacacctgcagtgaactagagactaagtctgtttctcatctcactcatttgagattcaccttacattgttctcactattatactattcatagagagccactctagaaattacaaggtaaaagcctataatttgagtggtgttatctctcaaatcaatacaactaaaagggaagtaggttattattatacccaaaattcggctatgtaccagaagttgacacatgtccaacagaaagaatttgaaccatatcaaatattataataacgacattacatcattaaatgcactttaaaataactcgttacaattaagtacaagtttgatagaaaatattcaaactcgttgaatgtttagtcttatgcaagataagaataataactattaaactgagattgatgagacacatgtttacctcgggacaggcagagtaataaaatgtacaagacgagacagtcaaagacgtcgtgaatcattaaccctctcttgagaagagaagaacttatgtcgctcaaccgcctcacgttactcatattgtgcaaatcatctcgcatcactaatgcaaataaaagagatacatcgagatgagatgcttttaacacttaatttttttcctattaagatggataagaagaactcacaatttacgagatgtaactctccttgttagcattattgtctaagggataaaataaggaatggttgggtagttattagatatttcccatgtgcaaataaatgaaacgtggggaatgtccatgtttcattaaccgttgtaaatgaatcaatcccaaaaaaaataactgccaacatatattcctttaaataggggcagaatccatgggaaaagggatggcaaaattgagagagaaaatcttattatttcaaatattgagattgtattttgtatctagaaaatatccctaataataaggactcatggagtatgtaaattttaactataaaaccacgtaaaatatctggtattattaattatcatttatttctgtagtgcatttattgcaaaaaatgctatttatttagttaatgaaaatctgcgtaaacagtttggtgctttcattgagagccttggtgataaagactcagaaaaatccctccttataaacacaatccacctatattaaatggttgataatgatcaacataacgataatcgtcttgagtaaacaacccatcatcctggcaaagaacctatgggatctcaaagacctaacacatctaaaacaccacgtttagggaggagcgatggtaatttcaatgctgatggtgatcaaatcctagaaagaaggagtgaggacgcctatgatcctactagatttgtattattggtagaattagagaacaaaccactttgacaacgattggctgaatcaaactgacgaaacactgagttggaaagagaaaccgcagcagccagggctacacatgggacagttcctcaaaaccaacctgatcctactgtaaggagaccacaaggaagacctcaaggctccaggaccagagaatacaagggatgtccaaatagatagagcaaatcaaccaaatcctaacaatgcaaggaatgaaaaacattgacgagatgttccacaaacttcccatggattttctaactaagggaatcaacgaactagcatgccaaaatcatcttgcatgattgaagaggcgaggtagcctcgactaaggaattagatatttcctcgtaataatgagagaaaccctggaaatcaagcaaggtcaagtggcttcctttgagacatcctcaatgtccttcttgcatggatagagaaaatgtccacacgtacttgagtagagaacatgtgtctaatctcttctaaagaagaggacccacacgagatgaaggaagctcaagcacaggacaatcgcgatcttgcgggcatagtaggtcaagtagacaaaagtgagatggttgtagatctctgcgttactatgctaacaaggaaagcataagtaattcatgtagatattagtctgagagctactctaaaactagatttataagtaactatgaacaaaggcatcgcaaacctaatttacgcaagagattaaattgaaagcagcctgaccttcgcaagcacctaaattgaaatgcacttaatttgcataatcaacttaataaaaatgcaaatcaatagccagtggatcccacccaattacgagtaattcaattagaggataaattcagaaaatatcaacatggaaaatatggcaagttgccaggttacgactcagacgaagaaactgagccatttcatcccaatatcttaaattcaaaatttccttaaggatttaagaacctacatgtctcgtaatatgatggaaccatatacttggttgctcatttaaataattttaataccattatgcgagcaagtaatgtttcaaagatcttgcgctgcattttatttccaacctccttaataggggccacgagtagttgatttgataaattcataaatcattccataacatcctgagaatagttgtcgagagactttaaaaattagttttaggctttaagagaccgtcgactcgaagcatcatctttgaccaacataaaacaacaacctagggaatctcttaaagcgtacatgagtcacttccgttcaactgctgccaaagtcacaaacctgaatgatattataaaactaacaacacttcaagcaggaatcacaactgactgatctacaacatgaggtgagttatgggatgttctccagggtcgccctatgaggaatattaacgagtttaatgaaagaacacaagtctttgtgcgaaaagcggaagcaaggactgaaatgaagctgttgaagactggcttgggaagtaaaccaagcataagtacggctacagtgagcacagtcacaatgaaagtagacaattctaatggaataaatatagaaagaaagaatgagttaaaagaatcatccaaaaacaaaaagaaacaaaaaaaaaaaacatgagaagtatgtatccttcactcggtatatactgagttgaatgaaactcacaagaatatcttcctcgctaatgaaaacagggttgtgtttagcaaaccagagccaatgaggcacacgaggcaaaagcaagattaccctaaatactatcgattacacaaggatatagcgtataccactaaagaatttcgacaattgaaagatgagatagaaagtttgatcttgcgaggatactttaggtagtatgtgaaaaatcaaggaaatgagcctaaccagcctaacaacccgaataacccgaacaatctgagattgcaacctccccctattgagggcgaggatatcttggtaattaatggagggccacacctggcgggaaacaacaacaatgcccaaaagaggtatataaatgaagtgaaaaaggaacaatcagcattcgctctagtaccattgaaaagagcaaaattgaatgaaccaccgattatcttctctgaaaaagatacaaaacatgtgcgatacccacatgttgatcccctcatgataacgatccagctcaaaaataaaagggtgaaaagagtactagtagataatgggagttcagtcaatatcatttacaaagacaccttaaaaaatgggattagaggatgcaaagttgagaccatgcatggtaagcctatgtgattttacaagtgatagtgttgcgagcttgggcatcatcaagcttccattaagtatgggagaactgcctttatcagcgacacaaatgcagttttttttggttgatgacatcccttccttgtataatgtattgatgggtcgtccaactctaattagaccaacggcagtgagtttgattaaacacttgtccttgaaattctttacacagttaggagtgggagtggttagaggcgatcagttattggctcgagaatgttaccgaatggaacttcagaataggagagccagtcattaattaatggtaattctaactaaagaaaataagagggaagtagaagatttggatccgagaatccaagatgaaagtatcaaactcaaaccaatcgaagagttagaagaaattattttagatccaaataaacccataaagtgtgtttacattgggaaaaatttggaggaagaactaaaatagcaattaattatttttctcagggcaaaccaggattagttcgcctggagccactcggacatggtaggaataaatccaaaagtaatttgtcatcatctaaatatcgaccccaactatcgagcaaaacatcaaaagtgacgaccattggattctaagagacaaggtgcactcaaagaagaagttgacaaattgttaactaatgacttcatacaagaggccttctaccgctcgtggatttcaaatccagtccttgttccaaaaccaaatggcacttggggaacttgtatatattttttagatctgaacaaggcatgtcccaaagattgctttccactacctaggattgatcagttagtggatgcaacagtaagacatgagttgatgattttcatggatgcatactctgaatataaccaaattaaaatgcatgtcccaaatcaagagcatatgagctttgtaacaaacatgggactttactattataaattcatgctgtttggattaaaaaatgctagagcgacataccaatgtcttgtaaatggtatgttcgagaaccatattggatggaaaatgttcttgggatttcctcaggaaaatttttggtcttcattgtcaatgcaagaggaattgaagccaatcgagaaaaaataaaggccttaatcgagatgccctcaccaacaaagccaaaaaaagttcaggctttaataggaaggatggaagcactcaatagattcatttcaaaatcaactgataagtatctcccattttttaacattttgcgaggcaataaaaaatttaaatagactaaagagtgcgaggaagcatttaaggtgagaaactttatatctttatattcttgtcttggaacatgccatcagtgcagctttagtgtgagaagagagtaagaaccagcaacctatttactatgttattaaaagtttactgggggcagaatcgagatacccacctctagaaaaacttgcactatgcttaattcatgcatcttgcaagttgcggccatcttttcaggcacatccaattaaagtcttaacgaatcaatcattaagacacgtcttataaaatcctgatgctttaggaagattgataaaatggttgattgaattgggacaatttgacataacttatcacccgagagtattaatcaaagaacaagctttggctgactttttaatagaaggaataaactccgaagaagaccttgatgttgaacgcggggcagaaacatggaaactatatgttgatggggcttcaaatgagaatggctcgggggcaggagttatagtgatgtcaccagaaaactacaaattccactatgcactgagatttcagtttgatacttcaaataacaaggtagaatatgaggccttattagcatgtttaaaaatagctgaggcactaaaagtcaaaaacattacgtgctatagtgactcatagctaattgtgaaccaagtcttgggagaataccaagcgaaaggcctaaaaagggctaaatatttagagaaagtttgaaaaaacttagaaaagattgattattttaaaattgaacaaattccaagagaacaaaactctaatgcagatgcactagcaaaactagcatctcaatttgatctcgataaattgaatttggtaccagtggaggtcttaggcgatccaagcatatgtgaagaggaataaatcgagatgatagatactttgccaacatggatgactccaattttcaagtatctagtaagtggagaacttcctacagacaaaaccaaggcacgcaaactcttatacttaatacctcgttatacgatggtcgatgggaaattgtacaggagaagttattccatgcctctcttacgatgtgtgttaccagtagaagcaaatgaaataattaaagagatctatgaaggcttctgtggagatcatgcaggttggcagagctt

SEQ ID NO: 164629 - DNA, 1806 bp, Cannabis sativa
  modified_base (1468)..(1482): a, c, t, g, unknown or other
aaaaaaaaaaaaaaaactgtacaagtgtcatcaccacctctgacaaaaagagacataactctcaacttcatacacaattttgcgcatggtcatggtcattttagtttcactgtctcacgatgtgataagtttatcataaaatgataaaatagaggggtgagaataaataaagaatgaaaagtatagagtgcaccttttataattttttagtcaatattcacgcttacaacatcaatttttcaaaattttcaaataatttatagtgcatgtttgaagtttttttaacacttaaactgaaatattaggaattatttggaatttttcaaaaaaaatatttcaacataatttcaaacgtgtagattaactaaaaaattataattagcattaaaacattaaagtggaaaggaaataaataccttatacatggtatcaataatctcaatggagttcgacaccacttgcgagtacatgtcgcttaaccactctttgacatctttgtccattggattgctattattacccctctggtgaaaaaaaaaaaaaaaaaagaatggagcaaatatagatcagaaaacttagaaatcaataaataaaacattgctaacttaaatttagtacagggagagcaaataaaattacttcaaatttttagattcccatttgtatttaggattgaataaaattttagttccccaattatgttgttttattttcataagaaacgtgtatatatatttgctgaaaaatttcataagaaatattggtagtgttacttcttgtctatcagaatttattttctcgtaattccatgtaactttaatatttttattctaatatacttctcgaaccctttcttctccaaatgattccagaattgaccataaacacttaacaaaccaattgaatatgagacagaatttacacatttaattaaattcaagagaatacctacctatatttatcatcattataaaaattatacaaaagaaaattaattcaaaagtgtttacttttttacaattattcgtatcggtgacaagaaaaccaaacactccaaatttgtcatgcaaaacccacacagaaataagccctaagcatttgaagccgttgcagctattaatataataagcaaaacaaaactataaatttcatcacttcatagttcataccttcctctccttctttcacctctcgttacagcctaaaatcttccaatgaatgcaatcaataatttattataaaaaatatatattaaaaaaattgatattggttagttaaaagaaaatcggttttaacctaaatatctattctaaaaatttaaaattttaaaacagaataagaataaataatttatttcctcaattaaagaataaaataatatttgtttgaaaaaaaaattaactacaaaaaaaatcatttttaattattagattaaaaatatgttatatttttataataataataatannnnnnnnnnnnnnnataataataataataaaagtaataatgatacactttattcttatacattatgttcataaaaattaataaaattttgtgttgtcaatacacatatgattctaagaattttgcttattttagaatttatgaagaataatttttttgaaaattatagcaaattagtgaatgtcctcattttaaaactggtagagaaatgaccattttagactatttattatttatatcttttttttgcccatcacaaaaaactgttagacaactttttagtcacaacataatttttttttgactaaatgtgactttagtcacaacaaaatgttactt

SEQ ID NO: 164630 - DNA, 1543 bp, Cannabis sativa
aattctcaatcagtaagtgtattggtttttggtattcatgtttgattcccaaaaaggttctagtgtctatattttattgccaaaatatatctctgtctagattctgttatatggttgttttattctattcttagctctcatgagtgggttactaaatttcttcgaaatccaggttatggttggacgattcgggcagcttgtttatgtgcatccagtttctcaagtaagatacactgcatccaggcgatgggatagctggactaagttttttaaatgcatgaattatttgcttggttgtcagggtaatttttttatttaatataaattcatttgcttaatcatcttcctcttacatattgtaggagatggttcagggtgtaacagctctttcatcgccatttgttcgtccattgtcgtctccccatcaggttcagtttccaaagcaccaaggtattattatagtatagctactattgtcttttatctacttattaatctgttgctctcgaggagtttaaatttcttgataatatatgatcttctacttagcaaaaagtccgaattttttttaatattccaatacattaagtcaagacgtttattttaaatatttttaactcagaaagtagaagattcattttttaaaatccaatgcaggaactacagcagcagcccaagcagtgcagctaagagttgctccacctttaatagccagtggagagcaaccctactcagtgccactgccaataccgattttgcaacaaccaagcctttctaatcggtattttcatgttccaggatctaacaacctcttgaacacaaaatatttgtgaacatttttctgttctgttttattggtcatttttggtccctcaaattattattattgttattattattattatttcaacaatttccagaattttgatctgttcagcagtggttgaaagaagagtaatagtatagatgtattcatttactgtgttcttcatacaagaaaggagaacttatacagggttgaggtttgttagaagtggtttgaaactttattcaaggtctttcttttggggggtcaagggttgagttctcaattgatctttttcaagaactcaactgcttgttgtttaaagtgtctataatctccattgaaagagtgaggcatgtcaaattggatgatttgcttcatgtaataaatctcctatgatcaaaggcaggaatatcttgcaaacacagcttggtgctttgatacataatgttggtgggactgctcttgcacttgaacatattttaccctttcaattaagtcagtttagtaattgttttcttttttgaaagtccagactagtattttctcactggcaagtaattatttttagtgacattcctataggctgaaaaacaaagaaagaaaagtgaattgtgtaacaagaattgtattgtgcgcgggtgaatcccatacccgtcagtcctttacagattttaatttatggttcagtttttctttatgtgcacttatgtatcaagtaataatttttatttgttt

SEQ ID NO: 164631 - DNA, 1249 bp, Cannabis sativa
taaacacaatcaacacaagttgtgccaaataagcctcaagcactatcctcaaaatcctcattttcaaaaccaactttaaacatgggaaaagcttcatcaaaaaagttgtgaaagcagaatcttcatgaatgattttaacaaattttctttcttaattactatcactactgaattagagaaatatttagttattcagtagtgatagtaatattgcaattcgcacaccattataatcataagattcatgaatgattttaacaattttctttgaatgttacattttgtatcataaatatagtcattatcaaaactgagaatatatatatatttatatcatccataaaaatataatcaaaatcaagataaacacaaaataatatcagacatatatttcataacaaatgggatatatataatcatgaataaaatagattgaaaataattttctaaacaaattctattaatatccaaagtaaatgactttcaatcatgaaaaataaataaagaaagaaatgaccaagctaagaatccagtaaatacctgtagagaagagaaatagagctaaagagagtgctgaggggaggagccagagtcggatgtggaggcaaaactgcatgcatatcgagtcataataatagaaaaaaataaataaaactaagagaatcaattgagtcttttgagtattgaagaggaagaggaaggataaacccaagaaaaactaaataaataattcttaccagagaaagactaagatggggaaagaaacaaaggtagggagaatagcatgaacggatgggagagagctaagatcgaggctatttaggtagttggggatagggatttcggttatttttccatcatgccgcactaaatgaaggggaaaatgaatttttgggaattaaaaatttaaaataccaccattttatttacgtgtgttgttgagaagtttttttttacttttttttaatttattcaaaagatggaattatttattggttggtcaaatagcaacacttcagtaaaaagcgttgctttattttaatatgcattcaatatagcaactattattctaaaagtgttgtcgtatgatactttatttgaataacaaaaatatataatttgtcatgtgcaatcttttagtaacacttttgttaaaagtgttttaaattagtaaaataaacagagtagtaacacttatgtttcaagtgttgttaattaagtgttgctatatatattttttgtagtagtg

SEQ ID NO: 164632 - DNA, 1147 bp, Cannabis sativa
cttgaatatgttgctgactattttatttatggctcgtgatctttttttttttttttattcatggctcgtgatcttaattctttgtacaatacaagtcacaacctcatatatgaataagaaattttctaatatttatatacataaattatcaataaataatttaatcatcaaatataataacattgttctctttatttaataattaaaatatatttacatacttttataatctctaataaaatggtctccttccaactcttcataaaatatttaatgcattttctataagatagtgtaaatctcaaacatctattgaatatccagttgaaactttcaacaacccaaactccatcatacagtacaatcacaaacacaattaaaaatgcaaataaaaacagaacaaaaaattaatttaaatcactaaaatgccaataaatgtcgctaattgtccctacaactttctatatttacaatatcgaaaaaagtactgaaaataactaataaaacattgctaattttcactcggctactattaattgtctcatatcacaacttatatagctaagcatgcaacacaaatgtccatgatatattgcaaaggatgttgctatacatcggtaaatatcgtcaaacttcatccctaacttctaactcacacgcatatcgcaaaaagttgcgaaaaatgttgctaaacatcattaaaacacggaaaaacccaaaaaacccgtattccgtacaatttcatttcagaaacaaaatgatcaaacaaaaagtagcatatgtgaagatctattcatatcaaacaaaatacaactaaatctaacaacatttagtaaagaaattatattatacattatattttttttcaagaaatgtgttgacacagtgagattttgggtttgtcatacgcaattgacgtagagtttggtggtccagcgaagttgagaactccggcaaagggtgctccggcaaggttggggtgacttgggtgtgtgtgtgactttctagagagagaaaatagaaagagaggggaaaaattgagatgagtttggttttattatttagggtaaatggcggcaagacctccaatactttcgttttggtttcattaaacccccaaaacccaaatttctgcgggtaaaccccc

SEQ ID NO: 164633 - DNA, 735 bp, Cannabis sativa
gttgatataacagtgaaatgaacagtgccttgttcaatggagtaccaaggcttatccttggcaagtgttggcatttgaaaatatgtctcataaggaaccccacattctccacctgaatctggtgtaacatatactgaccctgaatccatatagtccctgcaaatcaccatacaacaacagtctcactatacatacatattttcttcaaaaatacagaaaaaacaatttagggtaaccagttacttcttaaggtgaggtaaccagttactttatcatggttcttctaaaaaatttcactttatctataaaatgtgtaatttggagtgtatggggctaggcagactaaatctgtacccaatttcagagtgagttctaattgtacctctcatggtttccgatagcagtcatgtacgaaactcgagaagcaacaggaaagatttgatgaaggaagaaatcccattcaacaagaaagccagtggcataacttatgtctccaatatggaaaattgagtcaacatttccagccttaacttcttcacccatagcatctgtcactgaaattgatcctggctatatgaaattaacatacatacatatatatataccacattttacatgtttagtaaaataaatcataagaaagaatgaaactttcatattacaatcaaatcaatatgtatctatgtatgtatgaacctgaatataatgctcaatagaggcatctttaggagcttt

SEQ ID NO: 164634 - DNA, 911 bp, Cannabis sativa
attctcagcctagttatcataagaaccttcacttatttttatcaataaataatttttcatgcttgaccaagactgaatatggactcttctctaattataactttcattaagataaaactaaagattacaaattacaatcttaaaaggtttgaaatttataatgctaccatttcacacaaattcttcatcaaaccctagtgtttttttggcaactctatgagcatccccattaaacacccttggatacatctaataattacattagggagatttggtaaagaattacaaatgtccacaaccatgtttctcaaaattgagagatccatcttattaaacaatattttacatacaagtaactttgtctgattcaataactttagagcagccttcaaagcaagtgcttcagcataagttgaattaaaagcccttataggacaggaatagccagaccaacaacaacattaactatcatcttttactacagctagctccaagtcccaaactatattcttgatatccattttagttggttgtgtgatgttaggctattttcaacctaattttagtattacacacaatactgaatttgatgataaaaaactttcattctaacaacaccaaaacatacacaaaaaaaataatattctttattattatatatattttaatgaaatagattattttttattaacaaaaataatatatataaatacctacttaaattttgttagctgcttctttaggtttagtcttaaaagattttagacatttttttttccgttagtctctctttctattctagatctattaatattgttgttaattcctcagttaaatatgtcttgttagaagttatcattcttttatgggtaaattgcggcataaatatctaatgttttagattttataca

SEQ ID NO: 164635 - DNA, 1239 bp, Cannabis sativa
tgtcaatctaatactttaaaatgcagccatgttaagggtattcagttggtcagttagttagttttcaattaattcagtttttactgttattgttgttggtgtgttctgttatgattgttatcaattcggttacaactgatcttgatcagttggattgtatcttcatgtataaataatgtactaactgatcattaatgaactgaactctttcactctatctttcaatctctttcttctacctttctctctttccttctctgttttctagttcttgttcatgcttgtgtttatactttgaacaacaatgtcaaggagattcaactctcctaacatggtatcagagccatggcctcatctcgtggctaacatggccagcaccggtcttggaacaggtgccaatggtggagctacaactgtcaatggtggaaatcaaatcaacagtcaaaatcaaaatcgaaacagagattccgatgagaatacaccagtctattttaatcactcgatttccattaaacttactaatcacaatttccttctttggaaacaacatgtgttagctgctattcgtggaaattgactgctgaagtttattcaaaatgtggcacctcctcctcagtttctcaatgatacagatcaagctaatagtgtgtacaatcctgcctttgtcgaatgggatgtgcaggatcaacttcttgtttcttggcttctatcttccatgacagaaagcctactcaccagaatggtaggatggaacacggcaagacagatctggagctctcttgaaaagtacttcactcttcgtgtttcttcatagatcttggagtttcgcaccaggcttcaaaatcttcgaaaaggacccatgtccttgaaggagtacttacttaaggtgaagcagactgctgatctattggctagtgttggagaaactctcaatgatcgtgaccttatctctgcaatattcaaaggattacccagcgagtatgacacgtttatcatttcttcaaacacgagaatagaaggctacactgtcgcagagatcaaagccttactcctcgcctctgaatcgaggattaaaaagactgatcaagaacacaagatcagcgctaacatggcaaaaactgaagttgattactctctcaatccatatctgaattttgaagccaatatagctcagtataatcgcaacctacgatatccagtgccaaatcgtagtaacttcagtaacacaagaggagaata

SEQ ID NO: 164636 - DNA, 614 bp, Cannabis sativa
aagtcttacaatgaagcctttgagttttggaaagaattctagcaacaactatcaatggtcaacgatagagctcctacaagtcgaaaagtagcgggtgttcttgaagtagatgctttaatcgctctaactgctcaaatggcctcattgaccaacattttgtaagaacatgaatattggagaaattgtacaacaaattgttgccattcaaagggcagagatctcttgtgtttattgtggggatgaacatttgaaaattgcccttcaaatccagttttagtttgctatggtattgtgtacccaatttcagatagttcatgggtcagccctattcaatatgtacataagaaaggaagagttatgagggtggctaatgagaataatgaattgattcctactagaagcgtgactggttggagggttttcatggattatgagaagttgaataatgctactcggaaggattatttcccgctaccattattgatcaaatgctagatcatttggcgggaaaaaagttttattactttcttgatggttattcgggttacaatcaggtttctatagctctgaaggaccaagaaaagataacttttacttgtccatatggcatcttt

SEQ ID NO: 164637 - DNA, 1055 bp, Cannabis sativa
ttgaagaagtatagcaatgtgcaagaaccagccagaagccaaatcctacactgatgtaggtatataggaaaggcgtcgtgagggtgttatttatcgtaaaaaaatatatatttttatattaaacgaaaaaagaaatgaaaaaaaacatcattattttaaggaaaataaatagagggagttaaagataagataagaaagttagaaatgctggtcgatatcccaaaataaataataataaaaaaattagtttgtgaaacatatataagaactaagatgttctagtacgacatcattctaaatgattgccattgactaactatattagtaccagattatgaatcacgttattttgacagtttttagtttgacttttccttgctttatagggctacattttctgtttctgctgaagtttatatacattacataagcacaacaactaccaggcaccagtctagtctaccagaaattaaagtaaattaatttgtaaattactcacaattatgtaatcaaatttcttgaagttctaatctttactccctaaaaaatattataagatcattttttaataaaatgtaaatagtgttagaatgtatttatgacccttctattacaacggcaaacacaaaattacatactacaaagagataagccatttatgatgaatcaatgcacgcactgctcaccatacttgtataggcaaagaagcagttgataacattgaaaaccagagggagtggtagttggtagattcaatttaattctacagactgtaatgaaatatgtaggaaaattttaaggagaccaattttatatctattggtaaggatattttaattttcaatacataaaaattatatttcaaaattattgtgtagtaactataataaagtattatagtagaaaatttagaataatgtagaatactaaaataaaatttaaacatttcagtgaaatgcacgcttattttctttagggtgacacactcttaaaaggtatgtactgatacacccttaatttgtttcggcatttaaaagaattttttagtctaattt

SEQ ID NO: 164638 - DNA, 2760 bp, Cannabis sativa
  modified_base (2731)..(2731): a, c, t, g, unknown or other
aaatatttatatactaatcaaaatttattatatattaaaactatttatctcttttccaattttatatataaacaaatagtgtagtatttttttttaatcttttgcttttaaaataaaaaattatatatttttttattataatctcttattaattattatttatttcgaaaatataaaaatattaataataattttatattaatataaaatacattttaataaaaaaaactttaatttaataaataattgcatatattttaattaattaattttttataatctacatcgtcaattatataataaagagaaatactaaaaagcaccattagtgcttggtaccttttctatgtgtcatatcattattggtataattgagtatcatgttcatgtatcacataatttgatttaataatttttagagggtatcgctgaccaattgtagcacgacacctttagatggtgctagctggcaccaccggtatctaataacaatgctttataacaaaatataagtagaaataaatataatataaaattaatgcttaatacttaatatgtattttctatcttattatcaccaaaatatataactattttttatgatttttttaattagcacacaaataataataggctacttatgatttttgtccccgaactttgacgtgtaccaaatcatactctctaaatttttcaggccattaaaaatttcgtaaactattaagattgttggactcaatgacgtttgtccaattttactaatgaaattgggcgtggatgaaagtttatgaggcacaatttactaaatgtcaaagtttggcggacactatttggtagatatcaaacttcaagaggcacgatttagtacatagactatcgtttctgtaaattgaatgaaaatttacagaaatccttgaattcaacaatctcactagttcggatgaaatttttatgacctaaaatgttcgagaaatatgatttggtacatatcaaaatttacagagtaaaaatcctaattatcctaaacaatgataatataaactattaaaaataaaatatataattaaattttaaataaaaaattattttaaaattataatttttagctaaaagtttgaaaaaaaaaataactatgtataattatttttctgattttgtttagcacataaataataaggcagattattaatacatataaattttaaataaaaaaattattttaaagtttaaaattttagctaaaaattttaagaaaaacaactacatcattaatccttaaaataatttgacaaaaataaaaagtatttaataaataaataaaaaaaccttttataaaaataatttatatatgttatatgcttaattttatgtatatattaattttattttcaatattaattattatatttattatgtttaaagaaaaaaatctaaaaaaaatatataaaataaatttcaaaaaatcaaaattttattaatttttttttttttaataaacatattaaaatagaattattgaatgtgtattttcttaatatatattaaataatgtaaagagagaaagtaaagacaaaatgtacaaaaatattactaggctactagctaggttacaccattactatcatattttctcatctttatgactattagatcaacaatcaacatgtaaaagaatatctccaccatagggacaaaactaatgtatctaccatagacatgtcctatatatatttatacatatattaaaaaaactgctagcaaaaataaaagagggacgatataaccgaatagaatttctgagttgagtcgcggattaggtcacttttttttaagacgttcgcatcactactcaaaaatataaaagcagttggaatttcccagtcgtccccaagataaaacaactcagtcgtacaatatcgagaccccactgctgtagagaaccgtcgaatacaccctaaaatttatgatatcggagatggatttttgtagtaaaaatagtgtttatattttaatataatgaatggattgaaataatatcacgagaagaataccattttctgaatcgtgaaggagttgttgttaaacatgtctcataattgatacgactaatgattcagttttatattaaacacgttttcaaatatttaaaataaggtgaaaaataattattttattaaataaattttctataaaaataaagtgacagacacactagtcgactcgaatcaatcagacggacagtgcgcacgtgcatgtgtggtgagtctagtgtgtgtgtcctcacccaatcgcacaaaactgggtaccccttgaggccctaacccatgtgccaaagttgcaccttatgtactcttgtaaacaagggttcatatcccatttgggactctttctacttcacacacactaggacactttcatatttttgataaaatattcatcaaagttctaacaacttgaattttaaaaaaatatttctatttaatagtatcatttaacagtaagattgagcataaacaaatgtgtctttcgatttgaacatttgtgtagtggatatgatttagattttactagagtgacccgtagttaatttgaactctatctctaaaattgtaccagacaacaactttttcaagggtgtaaccaaaagcctgtgtgtttatggccatgcatgtctatctcaatttagtgaatgctcatgaaattttgcctaaaatttcataggaagcggccncactcccacattcacataggtgagtctat

SEQ ID NO: 164639 - DNA, 1665 bp, Cannabis sativa
cctcgttaagaaggccccagccccacttggctaataacacttgatccatttccgaggatttacaaaaactgaggcctccccgagattttagaagacacaagtggtcccaggcctttaagcaggtaccacgattgccttgctcacagccccaccaaaaatctctaaccataccatccacctttgaggttagctttttggacagcattgtagtttgcattgtatcaattggcaacacaagccccacagatttgattagagtaggacgccctgccttggacaaggattttagcttccatccatgatgtttagatataaggttatccagaatgatattaaagttgacttttttttggcacaatctaaacaacggaagacccaaataattgatgttctcaatagtattgttgagaccaagctcctgcatgattcctcttttcattccggccgaagtgttaccgctgaaaaagatcgaggttttgagtttattaaccctttgacccgaccagttacaaaatttttgaagacattgccgaaaaccctttgcctccgcgacattagctctgcccacaaaaatcaagtcgtcggcaaagaagagatgggagtgtctagggccatccctactcagctgaatacccttgatagtaccattatctaaggcgtttttaagaatacgagagaggattttagcggcctagataaagaaataagggaatagggggtccccttgacgaagtccacactcaggctcaaaactactcatcttgcatccattaaggaagaggttaaaagaggttgtagttatgcactgcctcacccaggtacaaaacttatcaggggccttgaagctacagagcacatgattaatgaacttccaactcagcttgtcataagctttaaccaaatcgattttgatagcaaacaacccttctttccctttcttacatttaaaagagtggataatctcctggattagaacattattatcctggatgttcctaccagcaagcgtgccagcaccacgaaccccggcatggaaggtattcgttgacggagtgtcaaacaaaaacagatccggtgctgggatagcaaatgatatcgccagaccggactccgactccaggcggccctgcgttttgaattcccagcttctaacaatgaagccgaatatgaagccctaattgtggggttaaagttggcgaaagccgtgggagccataagagtagaagtctttagcgattcgcaactagtggtaaaccaagtctcgggagaatatcaaacgcgtggagagaagatggctgcgtatgtagctattgtctgggagttgctacatgagttcacggattacaaagtggaaagaatccctagagaaaagaattctcacgcagactgtttggccaagttggcatcgaacagcgaaatagagagactaggggtagtgcccgttgaacgcctcacggaaccgagtatcaaaattaaagatacggtggttacaatcgagcaagagccaaatcggatggaccctatcatcaaatacataaccaaaggtgagttgcctcaagaaagggccctgtccaaaaggctacagtatcaagcacatcgatatgtgatgatggataatattctctaccgaagaggactcaacatgccgtacttaaggtgtgtatc

SEQ ID NO: 164640 - DNA, 1144 bp, Cannabis sativa
aataattttggaataaatggacgtatagcctcattatggttgcgttgcaaaaccattaaaaatgttgtatgaaaaaagtataaacaaaatgccttggtagaacttctcaactaaggctgcaattatgaacaagaaacaatctaaaaatcatcgtagaaagtttttatctttaaaaatacttacatatggtattttggtagagaacaatgaccaaagtttaatactaaccgaaaaaagaaagatattttctgataaacgaactccaaaaaggagagaatttaatatgcttactatgaattattgaatgaagattgcagactaagtgttttttctaagatatttagcagttcaattcgaagtgtgcatggtagtctattaactacagcgttttcaagataaaacagtttctttatacaatttgttaacgatattgctcggttatacctaaaaattgctctgagaaaaatgtcaggaagaagagaattttttttttctttgtgtattcttccattattctaatacaacttatataaagaaatcaatctaatataaaatgataagaaaacggtaatatgatcgtaaaaaatgttagtttaagacaataaaaaatagatgattagatgtactatcacacacttcactattcatatatttttgtaaaagtttaactaatttccaacacttacaaaccataatcatctgtaagtctataagccaatccaactctcagtcgaataatttaatctagttgatgggattttatagtttggttaaaacccattaaacaaagtaataatgcagatagtgacatttaagaactagtagtttatctgtgaaacaatcctcatcaagcggggatagctcagttgggagagcgtcagactgaagatctgaaggtcgcgtgttcgatccacgctcaccgcattttggactttgttgccattttccgctcgctgaccacatcttttgtttattttaatgcagttttggctgaattctttgtcaataggttttggcagttttcaggtgctcctcaaatagattttgccattttggagtagaaacacaccgagagttagtcccctgtgactgtgagtaactacttcacacacaaaaaagtaaaatctttgtttttaaaaaattt

SEQ ID NO: 164641 - DNA, 915 bp, Cannabis sativa
agatacatttagtgaggcatggtttaaattctatgcaatagatagttgggacagaaaagtgaactcttgtgttgttgaaaagtgtggtattcacctgttgtatcgccaagaggcagctagattcggtttcagcactggtttgtctgagcaaagtgatgcaataattgaaacatatgacaatgatggtggtgatgatgatgaaacagatgaacaacaacaatctacggaaatcaacagaacaaaatcaaatttcggaggatgcctctggattatttcactcattagaggcaagttgttactaactcatttactttctttgtgtttcccaaatttcagagtacttttatctattataaaagagttagtgataggtccacttataaatcacgcatgaatttgacatactcttatgtgacaatatagttttagagcactatatattgggaggtataataggtaccaagttaaactatagctcaaaattcttaaaattatccttagatgagctataatactttaacattaactcacgaatatagtgtgtttataaatttagctaaaatttacctattagctaaatatttatttttattattttttgttgttttatctttttctttcatatcatataaaattgagtaactgatgtatggagttaatcttgtttcactgagcttctgcttttaaaaactactaaaatagatttatgctaaaagaatttttcagagtcaaaagctgaaacttagttacaagtcctaagtgttttttttgagcttcagaaaccaaaaatagcttttaaaagtccaatcaactaggattatacgtaaaagtttaaaggaagtagaaaaaattcaggcgccttttgtaacacttttgttttttaattttttaatcacaaaatgaaagcaaaatttt

SEQ ID NO: 164642 - DNA, 2318 bp, Cannabis sativa
tggtaaaataattccaacactctacccctagttgccagcctggcaatgtgaaggtcgaaaggtggcaccctgtggcaagtctgtttgatccttgccataatggaccaatataagccttaagatcactcgaaaatctgctagaggaacagactggatactagtctacaaaaggaagatcaactaaatctatgtcaacacggttgtcacctcccctaactgtcactcaagatcacctgcatagaagagacaaggggaggtgagcaacttgacaaagcgataaggtataaacaaaattttagcaaattgtacccaagggtacttgccattaaaatttcatcatacgaggctgagtatcagcgaagtaccgtctcaagtataataacttagacaaatgttgagtcttaagttgagcatttgactataatagactcaccattaagtttcatacagagtttctaaggaaaccacatatgagactaaggttgtacatgcctacaaagccttagcgaaactcatgccgaggtcaaaagatgatagaaatttagtcgcctacttggaacctaggcaagagttcgacccaatgctttatttctgtcctagttgatcctgattcgaccttagaagtatactgattttttagcaataaccgaatactttataagagggtcggctagggttccatgacccagccaagaaccgaccaagagtcccaggcccaggcataggccaaccagccttctaaggtgcacccctatggtcgacaagctcccatgagaagaccatacgtccgaccaggtcttaaacaagacccctatggccgaccagggtttatgatgaatcaaaatgtgtttttcaaaaactcaaacatgttcatcatgactcaaagagtcaagaatcacaatgaaggtcaaaattgaatccttttcctcaggaaaccacacattatgcattctaaaactctcatgcagatcaaaataccaaaaagattacaatctatcgtgggaatctaaagatgtttaaagcaaagaaaagcttcaaaacaaccatggcacatccatatgaacaagtgaagaacgagatttgaaagcttacccactagtagaaaccgttgaggaatattgtggaaagcttgaatcgtcgaaatagcacaaaaatctcggtagatggaggacaaggggtgtcagcctcaagggaaatgaagagctttccaaacttgatttttgaagagagagaatgaaatgtgaaaaatgagaagtgagttactcctatgagcttatatagcttcagtggaaccctctctcacttgccaagcatcgtgcatcaaaaaacatgtagaaatgtaatgttattaatttactgccaaggaatgtgattagacaagcaagagcgaatattttaaaggctaaatatattgtaagatctacccagttaaggctacaaaactccaaactaagctagaaagtccctatccgtacaaacatttgcacagggacttagagggcaaatattatcccaatttttttccacttgacgtggcatgtccatgtggccaagatcaatgccacgtgagagtacaactcgtcaacaagaaggccaagccatctaatcaaaacttttactaacggggggtccgagtacatatgagggacgattaaatgacaaaccagccaatttccaagcattgtgtggccagctagcctgcacctggcaagtgcatggacgaccagcctttattggcaggcctttggtgtgtagccttcatctgtggacatcaagctaagcagcgaattgggccttgaaaacccacaaaaataacgggaaaatatctataacttccatattctcgagagataattaacttatttaaagtttatttaattatgtaaatatagattttacatatttttaagagatattagtggttattcttgatgtaagctctactatataaaaggcattagtaaaaccctaattccctaagtcttaagctctcaagctctaagtctaaaattcatgtctctctcacacgccgtaggcatactctctccttcacttgagattttccaattcaattctcttattgtaatttaaagagagccacttcaaattccacaacacttgtgatctgtctggtattatctctagtatttgtactaaaattctgtattttaatattcccagatttattatttaattaaatgcagaataataaaactggtactgaaacagtttttctgtagctacagtaaaacactctgtaactccagaagaaaccaaaaaaacaaacagtgcagaaaagtaaaaacacacaaggtttt

SEQ ID NO: 164643 - DNA, 687 bp, Cannabis sativa
gtatagattaaaaattttaaatattaaatgttttagatttggaaaaatctaaatgaaattctactctatctattcaaggtgaaattcagtcaaacctttatctattccatttgtaatcattatacgagttttaaaatagtgtacatatactccatttctttttataaaggaaatttagaatttaagctatagaagctagcttagttgtgagtaagagaagaaaaaagatgtattagttgattgtaatatctattattatgttactctaaaaaagataatttagaatttttgtgctaaattttgaaatagattaaattatatttttttattttttattgaatttaaaaattttatctagttttattaacagaagtctgatctgaatgaaaatttatgaaatacgatttgctacatatcaaaatttagtagcacaatttaataaatattaaagtttaaaggacacgattgaacacataaataattattatattagtaaaattgagaaaaaattacagatcaaaatacaaagagtgaatttaattagcctttttttaattttattattctttttgtaggcgaaaaactcaagtacttactatattgattttacaatatactactatttcagtaatgattttaatgatagtaaaaaaacaatagtgttatagtatattaatttagaactac

SEQ ID NO: 164644 - DNA, 1545 bp, Cannabis sativa
  modified_base (1008)..(1017): a, c, t, g, unknown or other
aaatattctaatatgatttacacatcattgttaatgttatttcatttctatgtgagattttaagaaaaaggaaacacaagtcaaaaatcatatccttaagagaaagaaaatctcaaaaaagataagtgagaattatgtataatgtacacatgtaaagataatacctttgatgaaaatgattggtgagaagaatcatcaacagccgatgcaaatatggagttggggtttattgagcaagaaatagttgtaagtttgaagtgtagaataaggattctggaattgaagagtcgggagtgagaataaggatcctcttaaagggtagaagaagtatttggaattgaaatgtggaagtgaagaagtcactaaggctagcttagtggtctgggaagaaaaaataggaaaaagagagaggtcataaatttgaacttcaagatttttaagctattaagttattaaaatgattgtaataccattaccttattctaaaaaaagtgtgaaagtgaaacaatggaagtgaggatgaaaagagatattagaacatctctaatgggagctaacatttatagttgtcaaaagtacacacatcatgctgaaatattgtttattttattttattttatttttcatccacataagatttgataatttttttatataaaaatttctctaatagttgacaataggagtgttcgcagtgcgggtgttgcggtttttgattattttttcaaatcaacccgcacatgcagttttttcaatttctcaaactgcacccgcactgcaaaactaaaaaatcacaaaaaccgcaccgcaaaaaatggtgcggtgtggtgcggtttctgcagtttggactatcaccaaataattaaactatcacaaatataataaagcttgagcaacacttgtcaaaaataccataagatttgaaaataaatatgaaaaaaaaggtttcaagtttcaacaatataacaattagtgggcttgggttgggccttcacatattggacctannnnnnnnnnaaaattagtatttttataatatacagtgcggtgcggtttgaactgcatagtaacaaccaaaccgcaccgcaccgcgcggtttagaaaaaattcaaaccgcaaaccgcgatcgcaccacaaagaatttcaaattgtattttctgcggggtggtgcggtgcgggcagtttgaacagtttgagcagtttgataaacacccctagttgacaaccccaaaagttatcctacataccactatttaaatgattaaattttattaaatactataaaataataccataaagtaatttttttgaaataaaaaagaaaaataataaacaatggtattgataaaattgtattaaacatgataaccacaatgcatatgtgttaaaaataactccatgagtaaaccccattgaagatggggataagttgaaaattacccatttttattacacattaattaaatataatcaaagtactaaatataacctcacataacttatcaaaattagagttcttagtgcatataatgggaatatgaccta

SEQ ID NO: 164645 - DNA, 1796 bp, Cannabis sativa
tatcatttgactttatgacaaagcatgtggttaaggaagcaactaagactatcgatacgtttgtggagacggatctaaaaaaccataatgggctttggcgtgattatttacgagtacgtgtgactgtgaatattgatgtcccactggatagatgaatgaggatgaagaaaacaggtggggattggttctgggctaattttaaatatgagtttgcaataattttttgctatatttgtggtatcattggccatatagaaaacttttgctataagttgtttgatacccctgaggaggaaattgttaagccttacagcgagtggatgcgtactcaacctcgatgaaagaattatttattgagttcacaatacttgaggataggttctgaatcatatggtcaatttttttagtaacagaccgatgactgaagatggtggttctggtggccgatcgatgaattgtgatggtggcgatgatcgtggaaagcagaagttaccatgtatagaagattccaggtttaatgtgcattcaaattctcctagtggtcttcctagagacttaggtggaattcaaaatcctaaaattatggattctttagttggaaagtctaatatgattgagaatcatgtttatggccataatatggttatgatacaacatagtgataagcacgtgcctcgtgggatttcttcagattctaaaaggcgtaggcccaatgaagtagcgaatgtagatggtgggcctcttggcatggaagttgaagttataatgatgattgctagtaataggctctcaaaaaatgggctcgaggtgggtcttggttttcaggcccaccagacattatgagtatcctgagttagaattatcgtgggttttggattccacaggctgtccaattccttaaggatcttgtaatccaaaagaagcctaattttattttcttatgtgaaattcttagtcgtaaggatgtggttgaaagagtacgtgtctctttagggtttgatggtcttttttcggtagatgcttgtggtcgtagtgggggcgttgcattgttatgacaggatggaggtgatgttaattttcttcagtatgctaataactatgtggatgtggaggttattcttcaaagtaaggtgtttggcggctcacatggctttacggtgaaccaaatcgtaatgctcgatcttctacttaggatcaacttcaatttctttcacaagcttctagccttctatggtgtgtaataggttatttgaacaatgttttgtctcatgaagataagaaaaggggacttccctatcctaattggctgattgaaggattttaaaatacaatttttgattatggtttaattgatttggagttaattgggcatcaatttacttagggaaaaagtcgaggaacgaattcttggttggaagttcgtctcgatagagctcttgtttctagttcttagctccaattatttacagcagctaagttgtttaacatggagctaacctcatctaatcattctcccatattgcttgatcctctttgtattcctattgttccatgccagagaaggtttatatttgaaaatttctcgctgcaagagccaatatgtttacaagttattaaagatagttgggtggagtcttctatggctggaattcaagagagaatttagttgtgtgggtactaacttatacaagtggaataaagactatcttgaaactttgcagagtgaatcaagttctggcgcaatgaagccaagaagttcaaaaagggtcaggatacttttggaaattattttacca

SEQ ID NO: 164646 - DNA, 2896 bp, Cannabis sativa
tctggtgctggaaggggctgctgctgtgtactggcagaaaattctgcagtatttggtgcttgttgtgcatcagaattttcctgcaagatcgggttagaagatacagtggtcgtttcttgcataggaaaatcatcaatatgtgtgtgagtgacttgtgtgctaggaacaacaagaggtaaaaaaggatcaatagtatggttagtagaatttagtttgtgaaaaggatagacatgttcatgaaaaatcacgttgcgtgaaataaaaatttgcctagaatttaaatcatacaatttgtaacctttgacgcctctaggatagcctaggaaaacacaagtccttgcccgtggttcaaatttagtccggtgagatgtaatggttgaagcaaaagcaagacatccgaaacacctcaagttgtcatattcaggtgacttaccaaataaaatctcatatggtgacttatttttgaggttcgttcggagtaggagtgcgtgcgattgattaaaaagactgcagtgaggagacattcggtccagtatttgatgggcactcttgattgaaaaaaaagagctcttgcaacattcattaaggaggtgttgatgttttcgttcattcagccaccgcgttttgttcgggtgtttcaatgcaagtaaaatcatgtaaaataccatgtttggcaaacaattctttaaaggttaattctggggcattgtcagatctaaaccttttgaagatgcaaccgtattgagtttgtatatatgaaatgaattcaggtattatagcaagaacatcagatttttgcttgaggaggtaaacccaagtaaatcgtgagtgatcatcaactaaagtaagaaaaaatctatggttagaatgagaagtaatatgataaggaccccaaacatcacaatgtataagatcaaagcaatgagaagtaaaatttgcattattgggaaaaggaagtcttttttgtttagcaagagggcaaatatagcaaggttcagtattatgcaaattcttagtgttacattgtaaggaattttgaagcaaattcaagtatttatttgacaaatgacctaatcgtctatgccaaatttcagcagaagtgaaagcattaatagagacgggagtggtatccaagatgtagagaccatcatccgaatcacctttgccaatcatcttcttggtgtacatttcctgtatgtaaaacttattagcaagaaacttcactttgtgcttgtcatcatgagttaaacaacttacagatatgatattatatttgaaagtgggaacataaagaacttcatgaagaatgagatgatcatttatgtgaacatttccacttctattgaccataagatgattattgttaggcaaaataagtttagtaggatttataggatggatattttgaaagaaacttagatctgaacaaacatgtctatttgcaccagaatctaaaatccaagaattgattttaggtagaggattgcaattagacaacacgatactaggattacctgttgagggaccagggtctgtagggatttggctactggtttgagcagcaaggagaccgagcaattgttgatattggctcggtgtcaactggggaagtatagtgttgctgtcagtgttgctgcaaccggtttcagtggtggaatgaaattggtttgctgcaacatcttttgattttgctgatttgttgtaccccggtggatagccgtgtatcttgtagcatttctcaatggtatgtccgtgcatattgcaatgtgtgcagaagggtctcccacgttttggttgttgagctttagattgttcagatttgcccgtggacttctctccttgaaaggcaaacgccatgctggtatttggatctgcagtagcgttctgtcctcccctttgattttcttcttgggaaacaagatgaaaaactcggttaatttcaggcataggatccatgacaagtatattacctcttacttgagcatagagatcagacaatcccattagaaaagacatgatgtactccatattgtggtgttcttgcaatttcttgacccctccgcaagaacagccattgcacgtacaatttggtctgaaattggatagttgttcccaaactgttttgagcttagtaaagtacatgctcaccgtttgcgattcttgtttcaagttcatcaaatcttttttaagattgtagatatgggctccatttctttgctgaaaacgcactctgaggtcattccatatagctgaagccgattcatcatacaagatgctagatgaaatttctttagaaaccgagttaataatccaagaaatcacaatgttgttattacgaatccaagcattataaagaacatgattagagataggaggtttagaaattgaaccgttcaagaagcccaatttatttttgacagaaatcgccaactccattgctctactccaagaaatataattttcttgtccagtcaacaattgggataccaaaatattcccaggattgtctccgtgatgcaagaaataaggatcagaaggatcttcgatttgacttcttgatctgtttgtctgcacattgatttctgcatcagatatttgagtctgattttcgccattgtttatctgggtagaagatccatcttcagttcttgtctcttgatcacttgtcgacatgttgaagttggtgtgacgaggacaggagttcttagaagaacagagaagaaggaattgtcgatgaagagttcaacgaagagatgaacaccttcaatacagacgacgatcgttgccggaggagaaggactaagacacggcgaagacgatcggaagaattaggatcggaaggaagcatatcttccttgctctgataccatattgcggaaaaggaaaagaacagaat

SEQ ID NO: 164647 - DNA, 1159 bp, Cannabis sativa
  modified_base (178)..(178): a, c, t, g, unknown or other
  modified_base (424)..(427): a, c, t, g, unknown or other
  modified_base (783)..(789): a, c, t, g, unknown or other
tttggacaactcaaatattagtgttaagtcatagtaagagtaagatgcggttagaccatctccaaataaacactaaatttagtgttacactatcattaaatttagcgttaaaaaatatttttacttcaaccacaacaccaaaaattacactaaaaaaatatttcttattattatattnattttttaataaaataaaaaataaattaatatcatattaattaacaaaaattaccaaaattgttatatttaactaaatatttaaataaaagagacacgacaaaaaatttgaattttatttttcggcgtgttaaattttttaaaaatgtattaaataactataatgtacacgaacataaaaaaaaagactaaacaagtctcccgaatgccgaaacaggtagaagtatatcattgcgccacttttaannnngtgcattattttcggcgtattaatttttttaatttttttttaaattttacaagatgttttaaataactataatatacactactatataagaaaaaaatagactaaaaaagtatgtcgggtgccgaaacaaatagaagtagattcgtacattacttttaaaaatgtgcattgtaaaatttctcaaaaaataattcttcattttacaaatacaacaatgtaaatatctataaatattaactaaataataaaaaaaaattaaaaaaaaacgcaacctccttggaagatataaactgtagattaaactataaaatgctgcaacaaatgcagctttcttggaagatatatacactgcatannnnnnntttgcagtctctttggagctgctcttaattagttaaaccatcttttgtcattttttgtttcagggatattttagatgattaatttttaaaaatatatatttttttatatacatataatataggggaattattctttatatttttttttatttattttttaaatttacagtttgggtttctaaattggttgcagcgctagttacaataaaattttttatacgatttagttacaattggaatttatatatagaattttataaaaatatataaaaaaaattgttttgaatgtaaaaataaaaaatgccttataatatatatggagattttttttttgaaatggatatatatgtatatattatactagcaaaaa

SEQ ID NO: 164648 - DNA, 3049 bp, Cannabis sativa
  modified_base (3013)..(3024): a, c, t, g, unknown or other
ttatgggcaggctcccccaacataccaccaaagtaaagcatttttgctggaaaacatcatgtgatcggctaccttgcaaacctaacttatccatgcatgaaatgtcaataaatcgccaccgcccattgtgtggggcttgccccactcttcggagtatccaaagctccttttcagtccatgtgagctaggagttgctcatcatttgaaaaattagctctatgaaacatgaatttacttggtggccgggtatcccgtatattttatacacactgtcacggctgattcttagcctttttaattgaacttttcaattctgtaaaaagaataataataataaagaatatcggaatgaaaatcgggttatttagcatctttgttttgaaatatatgttcttcataaacattcaattaaacaaagaaggctctactctttccaaactccaccatactctatattcaacccaaagaatgaatatgcttaacaaggaagaacacagaacaataacaaaagaaagatcttataatgcaccatctattgcccctatcacatatgtaaatgaaactattttcgacttaataatatttagactagaaggaaccagaattccacttttactgggagtgtactcattcattcacgtactataaactggtatttctttaatcatatcaattgtcattgatagctagtgtcataggcccttgttagtgtcctagttcaatgaacaacaacagaattaagaaacttgatatatataatgaggaaattattacctattatggggaaaaaaaacctcagtgaaataattttgattggaacctcaaccaagtttatcactttcagtaagtaaccaactactaaacaactatagaaccctctccttaatttgggcttctgaaatgtaaacaatgaaaagagagtacaatggcacaaggcaccagcaatataacctctcgttgttcgaacaaaatttaaagcacctgcataagactccaatgtttcttttcttaaccactgaaattaagcttcttcattactttggcataagctgcagggacaatagaagggagcctgagcctgcgttttgctttcttcgactgcaagtaccacaaatttcatcttacttaagtggtagcatggtaatatgcaaactgaatgcccaatattgaaacactgaagacaaggcaaatggaaactagaagcgaccaaaaatttaacacctcattagcaagtcaatatcactttttaataaatctattattcattagttcattattagaatagttctaaacataattcctggcaaaggcaaatatttagctatcaactctcagcaatgctcaaaacaaggagagactttctacccacaatatatatatatatatagagagagagagagagaccacaaatgcaaatggaaatttcttatgaaagctcctcatcaaatgttcaacataacactgaaagagcagatttcttaatgctttctagcaatattaagatagcagacaaaaggtgaacaactgaaatgattttctaagtcctactgcttaaccataatctttgggagttgggaatctcaggcaattcaattgttaggtaggtctcattgagtcaaaagccgaaactcatgcaaacgatttgttagtgtttttgtagcagcattaagataaatcaaggtaacagacaagatatttgtacagctaagaaacattttaaccaaaatccacacattcgtgtatctgaccatccattattagaaatctcataacagagatcttctacataatataaaataccatatttaattttctcatttgttctacttagcatgaacaaactcagaagaacaaatttcattaaaaagaacccaccacacataagagattatataaactacactacaatgcaaacaaatatcatccgctcactaacaacttatattctttaaagtcaggaaaattattatcaatcatatgaatccaacatccacaaacaaagcgcccaatgtacattcccttcaagattatatttttgcttaaatcatgcatcggtaatagggttaagaaagcacaccttcaaatgcgcattgtgtcgttttccctccctccaccgtcggatattcccatcattcatagtcctaaaccttgatttgtaagacctggttgacatctaaaccaattattccgggaaacttattaaaccttttcacaaatttacagggtttaagattatcaatcagagtataaacctacgagaatggtttcatttttattttcttgagcttggaagtgattggtgtcatcggtttcctcctcttccgtctatccctcttcgaaacgacgtgccgcacttgaaccatcttaacatacacgaaaagaaacacaatttcagttagttactgctcaataaacacacaacccctaatttacttctgtgaaagaaaaatacgatcctagtttccatgacgcatattctcagcaaccaaacggaaagagaaaatgcatacaaattgaaacagatatcaaatgccgaactcaccgacatagggaatcgagaagaaataatagagttaacacccagagaatgatgcattggtgaagaagcgccaaaaaggggcttaaaggtccatgaattggaagcggaagagaggagaggttgaagaagctttggggaagagtggaacagacgacgagaagaagaggtataaggaagtgtttgggctgagcatagtgccagagatcgaaggttggaggatagtctcttcaacatcatcgtcgttaatggttcgaaaatttgtgttacagaaaacctaacgtcttaaactgagctctttgggatgcagatgcgtttggcaaactgaatagcctagcccagtcccctgctcgggttgaaattgaataaaccctcaacggaaatttttttttttttttttgaatagtttcattatctttatatattaaaaggtctctctaacggcatttttttgtttaacagaatatacttaaaaannnnnnnnnnnnctgttaaatttaacgattaggtttg

SEQ ID NO: 164649 - DNA, 678 bp, Cannabis sativa
gattcaatcgaaataccactgtacagagctcacccaaaaaataaagtgattacaccaaaccagcttagcacgatcctacggtgcacatggtgggtcaagtgtgtgtattttcactcattagcacaaaattggatatatcccttggaaccctatcgtaagtgtcaaacttattctattacaggacactttctcattttatcaaaattcatgagcctcatatcgatatatataaatatatgcatgatgtagttatctcatttggtgaacgattatttattaacttgcagtacgatcattccattaattgggaggatatatatattaaaaattagtacacatcatcaattatgtgtcctgctcaaattgtctagacaggatttgtgtaattgatccatgcaattttaaaaaagaagaaaaaagaatttgtgttgttaatgatcgagtcttaacatattatacatataagtttttgtaatatatattcttctacattaatatatactgcgttgcattgtattaattaaatatatacagtgtgtctcacactaagaaatataatcccctcgacactaaaacatactttcatattttttttttacataatttttgatacaagatattttcatattttggttgtgcaaatcaaagaaattgtaacgtccccgcttcaagcctcca

SEQ ID NO: 164650 - DNA, 1424 bp, Cannabis sativa
ctcatagataaaaactaaaaaaataaactcttctagaaatctttatataaaagtaacaaaaattacacaataatctaacaaattttcaaacttatcgttataatattttgttgcacatatcatcactcatatatataaatcgttataatatttaaccaaaaaaaactaagaaaaaaatttgttagatgaaatagcaaccaccaaatctagacctatagctcaaaaccacccacatatataaatcccatcattattagagttcacccatttatatatttatatatatatacacccaaaataacagcaactcatccccatttattagcaacaaccatattgattttttcaaacccatgctcttctcgtgcctctttctctacaactccatgaactagtcaatctcttttttaatcatcattattataactttcttgtacatataataaatatatatatatatatatacatacagtgatatatactttagcttagctctagctatacacaaaacagaattttttaagaaaaacttacagagaggtcctttcatggctgcctgtggaagtttacaacacatctttgaaaacccattacccgaaaatccaacacttcttgaatccctttctccatggaaccaaatcaaacctgtaaataaaccaaatattgatcaatcttctttcactgaaatctttggtgagcttcatttcaaagaaagcacctctcttttttcatcatcatcatcatcatcttcttctgtgatagatttcgattcgaaatctaagaaaacatcagcatttgaaaactctttctcgagttcatcatcaaagtacacaaacacacacaaaaagagtgagagtttctctttgaaaagctttgaaagtttgcaactttgtactgagggactcggttttgagagctctggtgaggttgatgatttgatgttgaagaacaatactaattctataaaggaagatgatgatgatgaagatggtgatcataacaaggatgttcgagaaaactcggtggagaaagaatcaagtgttgttggaaagagtagtagtactaatttctctaacttttgcagtgaaattgttcgaagatcaaggaggggaacggcgatgaacaccaccaccgcgggaggaggagtagtaggaggaggaggaggaggaagattcccaccaccgatatctagtttgagcaagagtaatggaaagccttgggtgtgtttcaagtcttatagacaagatgggaggtttgtattgaaagaggttagagttcaaagccaggaatttctccatgcttgtagggaagatggtcggttgaagctccactttgttcaaccaaatgtcgacgatgaagatggcgaaaatgatgaggaggatgatgaagatgatcatgatgatgatgatgatgatgaacatgga

SEQ ID NO: 164651 - DNA, 1444 bp, Cannabis sativa
  modified_base (168)..(168): a, c, t, g, unknown or other
  modified_base (1372)..(1372): a, c, t, g, unknown or other
ataaagtaaacaagagtgaggagagtaggaaatgtattccccaaaaagtgatgtggtacatgcctttggttccgcaacttaaatgattatatcgtagtgcaaaacattctaaaaatttgatttagcatgagaccaagagagtaaaagatggaaaactcagacatcctncagattcctaagcttggaaaaaagtaaactacataaatcctaaattcaaatttgaacaaagacatatttatctcggtttgtctgtagatggagtaaatccacatacatctctaggtagtcttcatagttcatggcctgtcttgcttgttatgtacaatctttctctgtggttagtgatgaaaaggaaatttaatatgctttctttaatgatatcaggcctgcaataatccaaacataatattgatatatatttggaaccattgattgatgatttaatactattgtatgagaatggtgttcaggtctatgatggttttaaaaaaaattctttaatttgaaagctgtgttattatggactgctatcgattttctagcttacaacaatttatgtagttgctttgtctagataactttatattttgtttgttaatggtgtagatatgacaaactcaagttgagactcagatttagatttggatccagtagcagagtgtccagggcgaaacctaaacgaggtagaattgagatgaaagaagtgtccaagttgatggaacaagaaaaaagactttctcttcttgtcaatgataaaggagagtactatggcagaaactatgccaagcaagtatcgactttagtgtttagatgtcgtatgataatagggatgtcctatgaaaattggaagcaggttaatcctgaacttaaaaatgaaatttggaaagatatataggtaagcaattatttttagaattttgatttgtgtttgattaattcagatgttaactctaaacatatttgtttaccttaaaactagatgggttttatagttccggatgattttaaacataattgcatgatcgttgttgggaagttaataaaaaatttcaagaatagaataaccaaggacatctttatgctcacattagaagaaaatgatttgcaacggttggcagacgtctttgaaaagcatcctaaaattgacaaaaatgactggttgaaatttgttcaaagtcgcttaactcctacatttcaagtattaattatatttgtactaagataaacttttaaatgcaagtattggtagctaacgtattttttgcattgtagaaattaagtaaagtacaaagggaacgatcagcaaaaatccaatccagacattgaagtggtcagagtgggattatgaatgtaagagaagatgtggtaagtnttaatataatgaatttctagcaatgtgcatcaaaatgtaatagtactcatttagagttatttgcggcataac

SEQ ID NO: 164652 - DNA, 1749 bp, Cannabis sativa
gtacttattatgttcccttaacaggtgacagcttctgcttggctgaacgatctaagaaatcagattgagcaaacaagaattcttagtactgtctatcgttctgcttcagctttaggttctcgccttccatctattgccactgctagagcaaaagttgctggggcaggtgcgattttacgcccagtttccagtggtactcaggtaactactattttttgtgataccgaataattttgtggtgtaatttggatatttttttttgctacatctggtcgatcctcttttcttgcatgatatttgaagggaagtaataaaatataatttgcccactattttgtatgctatgtaaaccttttcattttacatttgaagataaacaaagaaatataagcagaactttacttttggttgaactagtgtttgatgaggtgattttgttgcttttttttcttttttgaatttttcgtagtatattactttttttttttttcattgttttaaggcctttcaagtgccagagtacttttctttcaagctgctatcgataatagaaagattgcaactactggctttagtttgttgagatgactgagggtactagtttgattgtattatttttcattctcttgatcttttaacaggtagttatgaaaagagcccagagcatggcgcaggcagcatggagacgtccttctcttcgcctgtcatcgtggtcttgcatgggacctcgccagcgaagcacgactgctgttttaaactcttcaggatctgctacggagacagaaacttctgacggtcttctggcatcctcaataaagagtacaactataactacaactaccattgaaaatattgaccttcctgaatcttcatctggaggctggacttcagaaattgagtgttcttgtactgatgaaatagttcatgatggtgaagagaatggtgatatcagtgatggagaagatctgatggggcataacagacatgaagaccgcatgactgaagttgagttgtggcaacagattgagcaggagctctacgatcagacagagggagaagatgttgatgtagccaatgaaataagagaagaagaagcagcagccatggcagaagtaagtgatggccagcctgagagttctgctcctgaagtgaatgaagcgcacagatttttccctgctgggaagatcatgcatgttgtttatcttccttccgaatctgatgatgcagagtgtgaagttgatcggcagccagaagaggatagcccaacctcaagcaccaacagctcaaatgatgggcagccagaagaggataggatcggtatctttctcaccccgagatcgctttacagtaaactgagactgtcacaaaccatgattagtgatcacttcatgcctgcctacagaagacaaattgaaatgctgattaaagcacttgaaaaggagcaatcttcggtgggagaggtagtattatagggagagtagttgaaacagctattttgtacagaaatatacacaaaacaaaggatagaaaataactccattacattgaagatagcatgtggagattagatcctcagaaaatatcctgagattagatcacatatctgggattgccatggcaagaggttaaaaagagccgtacacctcttaatcggcatagagtcaatgacccggtcattgggaaattgattatttttgttcattttgaataaggcaagtcattttcagttggttctcttcaactcgttgg

SEQ ID NO: 164653 - DNA, 640 bp, Cannabis sativa
tttagatttaacttatatgtcacacatttcgaagaatacaaatttgaaactatatatacataaaagttttacaagatgtgaaataaatcactttcaacacataactggtactccttcatcagaaaaataaaataaaataaaataaaacataactattacgtacacaattattagaataaaaaaagaaccaactaattaattatttgatttttgaattgttttacaaaagaaataaaaataaaaacagatgaaaaagaatattacaacatcagagttaactttaaaaatatctatattcagtttacttcaccactcaaaagatacaatatataatagatttgctgcaacatgttcattcaaccccttacaacttgagcatagttcaactattgtgcaagatacgtatttacactactaacattttctacaaccacagagaacttgttatacagagataaaataaaacataatcatatcacatagacaagactaattgcaatggcaaaaccacaaatcccaatcccaagtcatgcctaagccgagagagggtcaacgggcctagccagagaaaaaaaaaaatctcaaatggctaaagatttgagagaaaaacccatgttataaaataatataaagtagatga

SEQ ID NO: 164654 - DNA, 1128 bp, Cannabis sativa
tttcttttaaaaaaaaaatgaaaaaagcttataaaataagttttttattataatgataagtgtgttttattcttagttttaaaattcacaacattatcattgtttaatatgttaatttacttttctatatctatttactttgtaagtagttttggtttaattggttgcttacatcgaatgcctcttgaggctgtggtttcaagttattttgtctaaatttttaagataatttagtcttatataagttgctttgtatatatagtgactcatattttgacttagtatatatttggctaaacaattaacttttattggaagttctattttacataaaagaattgctagaaggtattacatgtgcttagtacttttctcgatgtcatactattatcagtgtaattaagtatcgggcgatcttatataatttaataaaataatttttaaaaaatattagtaattattatgtatcataaaaagtattgggcaccattagttagctaataataaagctcttcgcataatatagggtgattatcctcacttggtgagtatggagcacaagcataatggccgccgattgctatgctcatagaataaaaagaataaaaagccttaattaacgtgttaatgacttgctttagaattagaatctctactttttatttttttcaagaataaaagaaaacaaaacaaaaatgaaatgaaaagaaaagtatacatcctttattttttaggattcttttctttcttttatatatatttctttaaaagaaacactaaaaggtaatagtggagttttgtaaactctaacattaatttaatgtaataatttttaaagagtattattagtcaattgcaaaagatacttttaaaaaatgttaaatactactgatacctaatagtaatactctaatttaatataataacttttagaaagtatcgctaaccaataatcgtaaaagtattagacaattactaatctctaataacagtgtctgtacctttatatgaagggtaaataccattttaattctgtgttttgtaaaagttaccaattggatcctctagtttgttaaatgacaaaatgaaccttgtaatttttaaaattgtacaaataggacctgaact

SEQ ID NO: 164655 - DNA, 1433 bp, Cannabis sativa
  modified_base (974)..(985): a, c, t, g, unknown or other
aggccacgtatctcttcatcgggagcttaaccaggccggccaaagtggctcatcaactctgaggaagagccaggtaggtccaatgaagcggttgaaccagtcagtcaagggatcgagatttaaatcccagacatttccggcgtactcactgcaagtaaaactatccttggcctcccacaaaatctttttcagggcctccacctcagcgttccccttcgtatactccgctgtggcgtagttatgcttcgctactcgaagttgagtcctttcctcgtcagtaggattgggggttaagacaatgccgtgtggcactgtatactcctctaccttagatggaatgcctgagcgggagcggggggcaggagtgtccatgcgccgtggcttcttaactgcctccgtctccaccatcttgcctttacgctttcagtccaggggaggaaggattttgcgttcttcttcttctacttcctcttcctcgtcgattaaaatgactcggtccaggggtatgctagaataagacctcccgggagtcaccaccaggtcttgtgtctgaggcagaactggttcaggactgtaggtctgggcaagagcgtccaggagatcatccattggcttcgctgcttaaagaaatagacaaataaaggcattagaacattatcgaggagtcatgcatgcaagaacaaagtaatgaaactaatcttaccctgacgatctaattctgccctagcaaaagcatgtattaaaaggctggtgtcgtcgtcccctagaaagctgtccgaggggaggaaccatgtaaagaccgcttacctttaatttagaaattagcagataattagggcttgattatgaaaattatttataagtattgaattatttatttatgttgatttatttgaattcagaatgcatttttatgtcatatataaaaattttatatttttgcatgttttgtgtccgacaacattggaacgcgnnnnnnnnnnnntagaatcacatcctagtatttttagtataacaggacaatatagttagacattgggaatgtcaggaatagtcggaatttttgaatttcccaaaatacccctaggtgccatttttccccattattttgttgtcttttgtggtatgtttttcaataattaaatctgatttttagttatttaatggctaagacttatattaataaaacaaagttttatctcattttacaaaaataaggaaattggaaaaagttagaaaacactctctccttctactctctctcgaacattcctagagaagctagggtttgatattttcttcaatatttcaagtaaaatttagcaagttttaagtgatttcaagctctaggtaagctcccaacactttgccttttagtttcttgaatttcaagttagtgaaattgcatgattttgggtatttgtgttctgttg

SEQ ID NO: 164656 - DNA, 601 bp, Cannabis sativa
ttatttaataaggtccaaaattcttaaatctttcacaaccgataaagtagttcggaattctttcataataacagttttattgctctttaaaacctacaaacttttaatgctatttttcaaaatgtagtcatttaacacaatacaaaagttactatttgtgaaaattatgtcacccagctattagggctagttctaagactagacagcccgtagctagggctcctaccgtacgaccccccaaaaaatatatattttatttataaatttaatgtagtaaataaatatttatttataatattagacacacaaaacttatttaaggtgtccgttgtaagaatcacaattgtcttaccaagttgaagtcccaagtcttttttcttttaataaatttcagtgcaaaattatataaaataaaactatataaaatgaaggatcaaaatgtggaaccaataaactcaaatacaactatttaacatcttaccactaaaccaaaccaattctttgtagtatgtaaatatatatttatattttgtctaattacaaacattattaattaaaactttctaaaaattagattacctctttttttttttcttttttt

SEQ ID NO: 164657 - DNA, 1573 bp, Cannabis sativa
ttgtgaagacagtcctagacagtaagctttgtctattgtatgacctatattatatagcagaccattcgttgtgaaacgtaagctactcttggctgcaataataatatattagcaattctgaataaaacaatataaaaaaaaatagttctgcattattaataacattcatatatttctatacaaaaataaataaaaattaataacattcacatattgacggattaatatgtgtcattaaacttttcttaaatgaaaaaggattttattttaaaatgcttttctttccaaatgaaatattccaaatttatatacttaatatataccttcttcccaggtttgggtcataaccttttaggaagagtgtggaatatgttttttccgttttgcgcacatgttaaggtatcgtttacgtttatgaactccagcttcctcaataagaaaaatatatataaactgtatgtatatatcacccaagcctgcgcataatgggccttagagttatgtaccacataattctcaaacataaatatataactaaataaaatacacgaacacactttacgtatagtatgaaccttagaaatcatctgactttgtgactgaaaatcctttcctcaattagtagatacctcggtatctgtatatgaatttggacagtcaataaactttaatagatgagttgtttcgttggcagtgagactttgactttcctcattaatattatattaattattattattaagcacaaagagtgttacttacaacatgcttaattatttattttgctgaaaagacattttaaaatattttttttaatttttttttacgtatttttataattataatattatttatggaaaattttaaatttcaaatagtttataatattcaaataggtttaaagttttttaattatcataaattatatttttggtacaataaattatttagaatttttttaaaatttacaagattaatatgaaactataacaaatattattatgaaaaaataattgaaaaaaataatcctacatatgatttcagacgtaaaaattaattaagatattataataaaaagttgtaattaacacttccctattaactattatagctttttatttacaataattaactcaatatttaataagatctttttttttttaaaaaaaaaaacattaataatacaataacaccagatataatacgtacatagataaataatatctacacttctattaatagaatttggaagtgtgtacattgcccagcacacgtaaacaaaaattttgtataatctgctttccatatacataattttttaagaatgtaaataaaattatataattttcatttggtaaattataaaaaattaaataataactacatgaatattataaaataagtttatattcaatttttatttttattcagtaatctgcattctacattgtagaatacattgtaaaaatattaaagctatttacaaaaatatgggaaaatgaatatatgttttgatatatatggcataaaaatttaattaccctaaatttaacattttttaaaaaaacttaca

SEQ ID NO: 164658 - DNA, 1954 bp, Cannabis sativa
tttttttttttttttgtattctcacctcgccagcatacagttgcttaaaggtgctcataacaaatatccacttggccccttcctgtccttcttttgtatcaaggagctctccagtttgtttgtgaataatctttccctccacaacaatgtattcgtaatgttctctctcttgctaaaatcagaacaagccaaaaagataaaaaggagtaagtataactcagtacagcaggaactggggttataagctcataaactatgcataagatcaatctgatcctctttagaacttacaggtccaagatatttgatgcattgttgcctaagctttgatctaggacatttttcgaggtcaatctctttaccatctcctatgtccaacctaccagacaaataacaatataatttacaagatgtatccgagtactgctaaatccattacacaactatagagataatatatgaaatggtaaatcttctcaccagtaaaagaatggctgaccagcatctgctttacaccactccttgtagtacagatgcaagctatgaccatacctatgccttggatcaatctacataaattattgacaagtataaatacaaatccaaagtcataaatacagtaataatatggttgaaattgaaagcttcaaattaagcgaaaaaccagatcattcgacacatcaaaaaggccaaaacaataaaaaataatataagaaagtcattacagcttcaatccaatgttggaaagccagtttttgtgctttggcgtctttagacaaaccctttcccacctggacaaaaaagtcaaagatttcataactattaatcacggcaaaactcattcatagccgacttcttgtaaaaataatagtagccaaacgacaagaaaaattcaaaacccacaaatatattccctcatattgttctgtataatcaatccaaacccaatatagctttaacaaaataaataaaccataccttagaagcatttaagctaacacgattccacctttcagcagcggtttcaggttttgagaaattgaagaacgaaatcgtactgtgattcagtctaacgtagtccaaagcttgccacctacagaagaatttaacatttctcttcaattaatttccctaaaaagaaaagctaaaataatcgttatcgtactacttgaactgaaaacagagaaaaagagagtgagatttcacgaactttaccagagctcttccgccacaacggcagtgtccgctaacctacgccgtatgcgataacccctataaaccttctgaagtttcaccgcagcactagctgactcctcacgcgtcgtcgaatcgccgtcgactacaggagcctcgctgccatttgaagtaacatgctgatcatggacagtcaaaggagattctgaggcagacattctagggctgagaaagcctagggaacgagagtcggaggaggaaatgctcaagtccccgagtgagtatgggaatggaggagaagactttgactggagctcgaagctcgagagcgactgagcttgttgaacaacttccattgaataagaatcggtcaaagaaacgactgagtgaaattattcgtaactcagtccgagtcaccgaggattctagagagagaaagtccacggccggaaaaataaaataaacgaatggtgtttatagagagagaaagctcttcttctgttttctggactagattttcgagggttatttaaccgggaaaaaaataattaataaaattaaaaaaaaattgaaaacgatagggccttgtgtcggtgtgagagccacgcgctgagctcagagaaaagaattggcaattggggtgctgagctggttaaataaataataatgagatagaaaaggaaaggcatttattatagagtaatttgcggtaaaaccccctcaactatttacttgcaaaaaaccatccaacctcatattt

SEQ ID NO: 164659 - DNA, 686 bp, Cannabis sativa
tcttttgtcctctcatttgcaaatgcatgtcttcgatttcattttataaattttgcataacaaccaattatattgctccaaaataaattaaaattaagttagttattatatgcatgcactaaacactaaagtgaacatcaatacaaacaaaattaattaataattaagggtgttgatagttttctatttttgtaatttgaaaggatttatcttatttattattgtacaataatctccttgcaaagactaacatttttcaatcatttagcctatattgagtaggtttttatcaatattaagtaccaagagtacactattgatgtatctcttgtccttttttgtgtcaatgtcaatggtactttttacaactgcttccataaaattaccattactaattttgactttcgtcttagatttgtcaagactacaaaaaatactttcatttttcgtcatgcggttactcaaccagtgtcaagataccaaatgtatttaacttcttctgttgcaacttggcaaacatataagagattattctcattatttttttcttcaagaaaaattaatctctctaaacaacaaatttttttcaggaggaaattatactctataccctttttatattgtcttttttttttactctcttttttatagtctatcattttcacctctttttttaaacattgtac

SEQ ID NO: 164660 - DNA, 936 bp, Cannabis sativa
agctaagcgatgagcggctttattcgcccctctaggaatatagctgacagtaactttagggaggaaagacagtaaactatcaatcttccttgcaaacctatttaaagagagtagctttagcaatgttaattgctaattacaattttttaattaatatttgtgtttaaaattatatgttgaaatattttttatagcaatatttattatagctataatatcatttttataattctttttaagagttccgaatagtttatagtaccgaaaaatagaattattaatatttcaatttactatatatattcaaaaaattataacttatttttgagagtaccgactattcaaaaatttttaaaaatttagaaaaataatgatataactataataaatactaccataaaaaaatgaaaaaaaaaaaatatttgaagtacattttttgacacaaaaattgactaaaaaatttatagtaacaatatataataataagcacctaacactagaatatttatatgtattatttgagtttaaaatgaccacttgtagcttagattcccccacaaactccctttttctatctagatgaattactaggtctatatatctattattggtagagttgaaaatttaaaggttatactatcaaaaactgattaacaaacttattgcacacacccttatcaaaatttcttaaaatatatatttagaacatctccaataaaatgttaaattagtaatgtagtgtgttataatttagcagtttttaaaaaattagctatatatgcaaaatgttgtaggtaaaggtatatatatgcattttggaggtccagcgtcaggactacgtaccaaatcatttaaaaactctttctctaccaaactaacaatctcataagacaaccacttgaggctagttcaagtggccatagggggtgcgtttgt

SEQ ID NO: 164661 - DNA, 1693 bp, Cannabis sativa
tttaactcattgatggtcatagtatatccgtacagctataactggaagattgtagggttttccagagtccagtgtactagcggcgatgaggaaagtagttgttatattgatgtttttggaaaatgtagcgaagggattattacataatagtgtgtaggtgttggttttaaggatgtaaaaaatattataaatcatcgatcaatgatcaatctctattgaacgtaacactaacaattgacatgtctttttcaaatatctcaataagataaaaccactaacaatgacagcactaccattactggtattcctgaaaacgacctcactaaaacctttttctgaaaaattaattcaatcttttcttttcaaatgcatgcgcataatattatatttctgtatatgtacatatgcatattatttctgctcttattctaaatgtttataaatatatttaaacctccaataataattaaaagaaaaccatatcagcaagaaaaatatataattaaaagaaaaccatttattagatagttacaccatttaaatattattttatacaaaataaatatataaataaaattatttacacatcttctgaagagaaggataaatacctaattatacttcatcttcatttacatagttataaaaatatgacctcaagctccactagcttcgtatatgcttcctatatgttttttttctttttatttcagctactttattttcttcatctttttttactctgcctgtaagaaaaaaaaatcgaaaatggggtttaagagaaaacaaataagattaacatgaattaaacataaaaaaaagacatcacaataatatttatatatatatatatatatatataaataccgtaatcgagattgaaatcactcttcaacttaattaacttcataacctaatagtttggcaatgtaatagcaccagtgttgcttactttctacaagaaaaacgattgtataaaaactcaagctatatattgcaaaacctatatattaagaaaatcaagaactattataaaaatccaacaaattatttaattaatttaaagaattttaagtgaagagtaaactcattgtttttcaaaataaataaatagctgtaagtcttacatatctcaacagtagtaaaaactcacagaaaatacacaacaaaattttaagcactaaatccgataaaacgctaaacaacatttataagtgattaaaaatcttaaagtaatcaaatttcacttaaagtggaattgaatattaaaaagattttttctcctatagttgtcttgatattatttggaactcactcaaggattaattattaactcaaacttttaggtctttttttttttaataattagcaaatatttaattattatttgttactaatgatttgttgatttggtagcaaaattaaaacataaaatatatttttcctaggtaaaatagtacatttactaaacttctcaaacccaaagtgaatttaacaagcatatatcaactactttatacttgataagaacaaaaaattcatcaagggtcaagaattcaaaaccctattcaaaagaggtttcagaagctcaaagtcaaaagtcaactttaaagtcaaagtcaactctgaggaaaaattaattttagactaaaacatgcaaatcaagctaggaagctcatctacatcaagacca

SEQ ID NO: 164662 - DNA, 1115 bp, Cannabis sativa
aacatgtaaaatgtctttaaagaacaatatcatactcatttgaaacttacatcttattagaagctaaattcactaaatacaaacagtcagtaaatacaataatacgagaataaccagagacgcctatacatagaagagaccttgtagcatagccaaagcctccaccacatgcggttcaggcatactaatagctggagtagcaacaaaacaaagcacatcctcattagattgagatataaccgccctcatgcttaactaccttttttccaagcaaatgccagaatccacaaacaaattaaattttattaaattcaactcagaagtcaccccgctatatgagaagaacaagctcattggatttactcactacaaaaaaaaaactacttttagtgataatttttgtcacaacataatttttttgtgattaaatatgattttagtgacaatattaaaaagttacttgtgactaaaatatagtatttagctataagttgtcactaatttaattttagtgtcacaacaagtattgtgactaacaacacatttagtcacaacaaattgtaatttttatgactaatacttttagtcatggattttttagtcacaacataggaatagtgatttataattaatcacaattgttttactttcagtcataagttttgttgtgactaaaactaaaaatttttgtagtgaattttgtattctaaattatttagaattttgtaaatttttgaaagaacttaaatatagcatatattattaatatcatataaaaattgattgtgaactagtttagtagaaaacttttctattatcgctatatgatgtacacccaaactcgcgataaaaaataataataataatattaatacacagttctctccatcgaaaaagtagaaaaatatatgaccatttcttagagcaagttcaaggagacactataacgtcaatatggtgtaaattctttctccaaggtaacactaaatcgatccttcaccaatttgatgtacatactatgccgtgcactgtagcgcacaccatcttcttttatttatttattttttttaatttatattattatttaattttataaaattaaaaatttaatttag

SEQ ID NO: 164663 - DNA, 2781 bp, Cannabis sativa
tcccatccacaaccaatgctcaaatgacagtaggagatgatactgagatttagaacctctgcaatgcccttggactcatgtaaggtcacactaataccttgcatcatgatcaggatgagctccgtgctgcaatgaaccttacgttcgaagagcagaggcatcaggtcattgagtggagggatagggagatggaaatattgaaggctcagcaagcaaccatcaatgttcgaacaagacaggccaccgtactgatacagagagcctatcaagctgctaatcagcaaccaactgatacgtccagtatctcactgggcgacacagaagagattcctgctgggcataccgcccagactcataatggttaattgtccagtccccggtcacaggttccacctatgggcctagcggtaggcagacaaaccctatctgacaatcttttaggtggagttatacctaataattccatccaaactgacagttctagctaaccaaccggccaaaccagtcaatcactgcgaccacctggtgcttcagtattgaatagattggacacaacccatgatctcaggaatgatttgaacagaaaagaggtctggatgagcaatacgtttaactagctattcaactaggtatccaaatccaagacctagctttaagagatccagatgtgacagaggtcggccaagaggctgaaccagtttccccatttgtgaaagcatagttagatgaactaaaaaatatgtttcaaggcctggccagccaaaaactcactgatctcgagctggaccgagcatgcggatccccctttactcctaagatcaatgtcttagaattactccttaagtttaaaatgccgacttggaagatgtacacagggaaggaggatcccttgtcacatcttaaatattttgaaatgcaaatggatttacaaggagtacgaggtgatatgcggtgtagagtattccctcccacactttcagaggccgcacaacagtggtattttaagttaccaccaggaaggtttaattcatggaaagctttctcttcagagttccatgcatagttctccacttctcgccaactcccattacatttagaagacttggtcgaagtgaaacaaagaccaggagagcctacataagtaggttcatgacagaagctacgaaagtagcaagattaactagaaagggatggctggtcgctatactggggggcattgaagtacttggagaactgtggaacgacattaaaaaaaagtggctttgtaggatctatggcagagtttttagaccgagcagatgggtttataaagcttgaagaggtccttcaacgggccgatgtcgaacctaggccaggccaaccacgggtcccctcggcaagagcatctgctcagaccctacagtatcctagcagctcaacttcgagtggcaaaatatccaataacaatggcatacaaggttgtggaaagaagggaaagttcgcaagcaaagccgaataaacccctagagaagatgcctccaaattcactgccttctttgtcctaattgacgacctagagacaatctaaatggtaacccagtctgttgtcccgtacaaaaaacctgctcccatgaaaaaggacataagcaagagggacatgtccaaattttgctattttcatggagattatggccacgacacaaatgagtgcaacaacctgaagcgggaaattgaattcctaataagaaaaaataactcacacgtgtagaaatgcgtcaagaccgatcagaatcaacgggccgcccaagaatacaataatcaagacctactaatgcttccaccagtagacgggcatttacaggtcattattgggggcccacacattgctggagactcgggcaaagctcgggagaggtatgcctgaactttacagcacgaataaaaggaagtagtattggccgtagaagaaagaaagccaaaaataccacgggtaggggaacccactataaccttcactgaagaagatgctatccacgtttgcttcccgcacaatgatcccttggttgtggaagtacagatagcaaataagatagtggcctggatacaaatattctgttcaagacaccatatgaaaagatgggactccaactcaaagatctgatcccctgtacccaacaggtgtatggcttctccggctagagtgttgcacctttagggcaaattctcttacccctcactgttggacaagcttcgaggagcataactgtgatggcacaaatttttataattgatgttccattagattttaatgttatgttaggccgacctgccttatatgacctaaaggctgtcacatcaattttccattcgtgcattaagttcccaacaaagaatggggtagggtgcctaaaatggaatcaataagttgcacgggaatgctacaaccttgccctgaccaaggccaaaaaggaagattcctctggcgagagtttggacagggggaaaagcattgacaaatagggaatcgcctaaggctaggatgaggatgtggatccatatgtaagcgtgttctatatctataagttgcaagagaatgctatatttataagttgctcgggaatgctacaaccttgccctaaccaaggccaaaaaggaagattcctctggccagagtttggacagggggaaaatcattggcaaatagggaatcgcctaaggcggggatgaggatgtggatccatatgtaagcgtgttctatatttataaatttatatatgctaattaactttactttttgtgtag

SEQ ID NO: 164664 - DNA, 1721 bp, Cannabis sativa
tattcaagataatggcataaacttagaagcgatctcaattgaaactgatcacgagattaataaagcgatgaaagaagagcctattgatgagcagaacagtttcaactcattatcatcatccgaacaactactaccagtagttgttaatcatcaacaaactaattgtttgagtgatcaagaaaacacagataaattagaaatcatgttgtctccgttagagagttcaacatcatcatcatcagttactaacactaacacataccaattttgctatacatatcaattagtacctcaacttgcccatcctaataattattgggaccaaagtaacaacaaaaaagaagcacaaataataacgataacagatacatttcctattcccactcccacttctgttttgactataaaagatcaacaaaaattaacctcttcaaactatggtcgatggactgagaaagaacacatgtaagtagtaatacatttaacatgctatattattgttattaattactttttatacatctattataaaaaaatactaataatacttggttttatatttgtaggatttttctacaagggctgaatatgtttggttcccgtaattggacagaaatatctactttacttggtggtacaagaactccaacccaagtggctagtcatgctaaaaaatattttaagaaaatattgaaagaagaagaaattgcaagaacaacctctgaaaataataataataagaaattaaataagagtataaatgatataagagtaagagaagatggctcaatttcttttccagactaatttaaaagctgattggattagtttgtaatctgattatattttgaaagaatattattttttatcaattaattaattatttatatgatttcaattccaactttaatttatatataattaatatatactaggttaatattacgtgcaatccacgtataattagtttttttttttttttaattaggttcaattagataatatggatgtatgtttaatttttttttaattagtaatgtatttttttttaatttttaaataaggtttgagataaaattttagccattgctacattggtgtgtcatttggatgattatatataaacgtattttttaaattttctaaattaggtaacgtatcaaataatgcatatattgtaatttgctatattcttaaccaaaactcacataatcaaatttgagtgtgtctatatatataggctggattcgtaaatttgatataaaggttttttattctcaaactttacaacaaatattatgatgtgtgaaaatcgctttaccataactaaaatgaaaagcaatcaattcctcattacaactattttaatttaagatgtaaaataaataataataaagttaaaaatatggttaaaaatatttataatattttaaatttaaatttctttatataaaatttctttgttcaaataaagaaaaaagttcatatgaagaaatatatgactatgtgttagttgatttggttagagcagaaccaaaatatttttggacatacctagaagaattttctcatgacacaatataaaaagttttaaaggttcaatcttttactatttttgctaaataataaattttattttaagcatttaaaagaaaaagaaaaatggagcagatataaataaaaaattgtgagagaaatgatatacaaattcactatgacca

SEQ ID NO: 164665 - DNA, 809 bp, Cannabis sativa
  modified_base (773)..(780): a, c, t, g, unknown or other
tagaaaactgtaaaaaaatatataacaaaatttaaatgtaaaaatataatttttcacgtgtaattatctattttttttaataagataatccaaatttaaatcttccttcctccaatataaaatataattattttttttattttttatatatatatatatctacatataggggtgtcaatccatccttttgcattatttctaaattaattaaccgtccatttggatagtgaatcataattttttattagatacaagaaaattatttgaagaaatactaaaatatttttataggtcacgtttgattgaagataataaaaataaaataaatttattttaattttttgtttgattgcattttgaattattatatggtcattttaatagaatgatttttctatagttttaatagaatgactatttcattttgaaatggaaggaaaaactattctaaagccaaatgatattaattttttattatttttttatgtgttttaaatttaattcaaatctattactatttctattcttatttttacattatttttttattttcattcttttcaactgacactttagtgtttaaaattgtcatataaagttatattcttattattattgtaatcgaatattaaatttttattttaatttaataactataataaaaattacaaaatgatatttcataatggtatgtagattagagtaatctcaaataacttctttactctattttttaaaagaggaaattacacttagtatgggattttaaaagnnnnnnnnataaatatggcacatttaagtttggccaa

SEQ ID NO: 164666 - DNA, 692 bp, Cannabis sativa
taacgtgtgcccaaagctatgaattcgaacattctatttgcaaaaatgttaggccggccatagcattttgtagccttgaaacaaagtttaaaattgggcatttatatatgagcattgctattaggtagtgactagcaccttctctacatgttgcgttgcgattgattagcgatattccctaaaaattatgaacgcgatacttagttagaccaatagctatattgacacataagagattgctagggaccattggtgccttttagcatttctctttatatatataaaaaaaaatgtgtattataccacaattttattacatttttttaagatacattctaaattttcaatttattgtatatataatagaaaataaaagttgagccttataaaatatgggcattgagtaatggtttaagctgtccaacttttaaactactcttattgatatattttaatattgaattttatacatttttttgaaagctcaaattttatattttaatttaataaataatatagaaaattattaatcaattaaagggcaccaccgtgtggtattgaacatcttaaaatgtaccagataacaatactctaagggggtgtttggaataggttaatgttagcaagggaatggtaatgttaaacattaccttgtttgtttggaaggtttaatcttaaaatgtcattccctt

SEQ ID NO: 164667 - DNA, 676 bp, Cannabis sativa
tatatatataaaaatttcccatatatatgtatcgatacaaattaatgattagagaataattgagtgatatactgtatacaattaagagaaaaaaatgttataattatagtaactttgattacgatcactcttcatcaatatagctttataagaccgaaacataagcacttgctcaagaaaagaagttacataacaaatatacctcatgaattattaaagaattatgctgaataatcagttaattatcacaaaaatcatgaattattagtaaatatatacagaaagagattaaaaatagagtattatggttaggtgtaaatgtttttttttattatatatgtgagggttatacgattagtgtagaatattttggtttatttttttatttaaaagaaaaaaattagttagaattattatgtttttgggttaatattattattattttatattaaattgatagttgacgatacttttattgattaattatatatattttttattgtatgtaaatatttgttgacacagtttttcgttaatagatctaagaaatcgtaaacgagcaagataaacacaagcaatagttaatcaaagtaaccgggttgtaaaagtaaatttaacaaacatgttaattccatttttagcatatttaattgacaaaaatattttattatttaat

SEQ ID NO: 164668 - DNA, 1051 bp, Cannabis sativa
ataccacaagttaatttataattttataatttattaaggggtcaaattataaatattctaaactcattctaagatgagttagtggtccttaagaaacactagggttcttgtattatatcattccatatcagaaaaaatactttagagaaagtgtattcttagaaaataataaccttctacgaaatctataacaatttaagcaagtactttcactcatcttattatcatcttcttcttctttaattttacaaattttctataaaatgtgatttatagttttttatattaaaatacttttagaaatgtgattagatttgtgattatttttattttttgagtgttttataaattctaacattcttcatatactggaatacttctacaaaactttctaattattttcgaataaaaaatgtatctacatatacacaaaaaatatataaaatatatactataatggaaaaaaaaaaaaaaaaaaaaaagcaagctaaagaaattatataccatatactgataacatcacactggaaaaggaatagagtttatcaaaactaatgataaaactattatagataatttttaaaattatatatatactcaagcatgttaaattgtttataattaaaatatgtaaataagaaaaaatggatcagtgagggtgattatgtgtatcatcaattaaaaaattgtaattataagttaataaaattaaccttagcgtcgtaccctagcggttgaattctataactgcttgcaaattagggtcgtggcacctaccagagtgtcactgcctccacttctgcctctgtccacctagcggagacgattagagtgagcgatgccggagggagagagagagaaagaaagaactatcatgctcgggcaatggtgtggttgttgatcaattgctggcctcttggtgtggttgttgatcgatcgttggcctctgtacagttttcgccgtcatgcttgtgcgatggttaagggagtgaatgttgggttttatgccctaaataaaacttcatttcaatgtaatctattttatttaaca

SEQ ID NO: 164669 - DNA, 1997 bp, Cannabis sativa
ttaaagttgacttggtaaaccatgctgcaccattcaggttttccggtagtaagagttttacagaggcattggttccattagagtaaatctccttaacttttggcaaatgaggcaacagtgattccaaaactccagtttccaaattttgtgttttcccgttacagcaaacacttgcttcatacctaatgcacccaccccacacccaaaataatattaaaattaaataaaagcttataataaatgagcaacaatacaattgagatactagaaagctcataaacatacatctagattcaaggaagtgggagcttagataatcaagatttacctgttctgtgctgggaatatatggatttcagcatagtcaagaggcacaccaccatcaatttcactctgcattttaccaccgaagcaagaaaatcctgaacgagtgaaaaggagaaaaagaaaattagtgaagcccactttgggattgtgtttcacttaaaatattcctaaaagttcagaaagtaaaggttgccaaaactaaaatattctgtaatataaaagaagagtgccgtcactagcatctaagttatcttcttgtgtatgcaaatcacggtagctaaagctacttgtgagaatcccttaaagctcaaaccattcaacaaagtaaaacatagttacccagtaaagcaaagcaatcaaacaaaatatgaatataataaaattctaaaatgcaactcgaataacaggcagcatctttcagattccacgccaaaaaatgtcggcatccacggtcagatctagacaaagaaagcacctaccttggccaaaacataggacttatacacaaaattatattcaccgccacactaaatcacgcaagctaacaactcaattaaacaaatacccaaatcgaaaaaaaccaaaaccaaaccaacattcccactactacctacgctcctttcctcaaataaaaattcttaaattttaaaaactcaaaaaaagaaacaaaacccagaacgaaatgggaagaaatcccaaaacccatatgagcaaatgcaaagaaagtaactgggaaatcttccatttttaccttccagaaggaaaaaaaaacggcaagtagactgggacagttaagacgactactactcccccaagtcaatgcgagaaaaaaaaataagcaaatccggagctgagaatcactggtgaaagagagaacaagaaaaagatgatgatgatgaggaagaggaggaggacgacggtagtgatgatgatgattgaagagtgtaagagaagccggtgagtgaaaaaagaatagaagaagagaagagcatagtcctattagtggcacctactgcttagctaatcttgaacaaaagaccaaactttcgtttcaaaataataaataaaaataaggcaaaaattataattccaaaccaccaatttcccaaatcacatttatgacacaagcactatgtgcgcgtgtcttcacgcgctctcttttattttttaaaataaaaaaaattaatataaatagcttttgtttctttttattgatttaataattatttttttttttaaaaaaaattgtttgtattattcgtaattttgaaagcaactgcgctcgttctttttttttttttttttcttattctcctaaatcacatggtcgtgtcgctttacttaaaaaagactaataattttaaaataaaaaattattgcaaactttgtttgattttctatttggttttggtctctttctctttagtctttaccatttcaaaaaatatattttatttgtttttaattttcaagatctaaaacctacccttcattagtttttaaatactcttctttttgtcagctttcttgtttttaagccatactacagaatttcataaattttcctcccttaaaacaagctagagaaattttaaggaaaaaaagagatacatgatttaataactacagcaaattttatttaataaataaatgaagtctaaataaataaa

SEQ ID NO: 164670 - DNA, 3598 bp, Cannabis sativa
  modified_base (3554)..(3571): a, c, t, g, unknown or other
acaggaggattcgatgtcgtggcaccatcctttgcggtctgctctttaatcacatgttgctctgcctcttcagctatcaaggctgattcgaccactttcttataagaagtgtcatgagcggtggtaattttcaagtcccgactaattgtggcatccagtcctctaacatatttttgtttctgggtgaagtctgttggtaccagatcactagcaaatttagatagccgatcaaactccaaggtagactcggccagagtcatttttccctgagtcagcttcacggaatcatccacatgtgaagttcttacggtgatgttataacatttttcctcacacagactcttaaactcatcccaattcatggtactaacatctcaagtctgtctcacaatgtcccactagacgcgggcatgatcttataacataaacgcaacacaatttactctttctattcccgtcacccccatattatctaggatgcgggtaatagtactcatccactgttcaaccttaattatatcagtaccttccaaaaacgttggaggttgcagcttcacaaagtgctcaaatactgaatctctgtgtggcaatataaatttgttgttatcaaccactagcacaggatctggtggtaacacttattatgtaggagctgccggtgctgattgcctcaacccacacaattcatcttcttgacgaagtatgatacttcgcatttcttgaaacatctattgctaatcaacaggcagataagcattgccaacccccgcattatcccctgaattttgcggaggcacaggcagtgctggtggattggtttggtcaacaccaggctctacttgctcgccctgagatctagatgattgttgagggtccattttcacaaataaccttgtaatcaacaaccccggcgactcaaacaccaataccacacttacacacttattgccttaaaccctaactcaactaatttatttcttataaatgcatatttattaattaatcacactaatcatggctttcatatcataaattctagatgctcacatactgcctaaaatggaaagcggtaaataaataatcacataagcagttaagcatttactctcaacacttattgcaccacgagccaagcttgtctctgacgatgattgtacatgttcagtcgttctacaagaagtttaaaacatgatttcagctacacgaaatctagctcaaatgcacaccaaagacaaccaaaacatgctcaaactccaaattcatattccacaaattaaagccatcacagtatggaattaaacacaccaattcaagcttaatcaataaaaaaaatatgcatcatagatcaaactcaacaacaatcaaggtaacctctaaacttgagctaaattcaacataatttccctcatcaaaagcttgaacaccaaaaccaaaacctcaagcttgaaaacaacactaaacagaacccaaaatcagattcatgcacaaaatcaaatctttaaaatctcatccaaagcataccaagagcaatatccactattttaccaacacaatcatgcatacacacaaacaccatttaacaaattcccacatacatgcattcaagagcatcattaaacaaaacatgccttttacaacttcaaataatagaataaaaattcaactagaaaacttaggagcttaccacaaattccaagctccaatcaccaaaaccaactctaaattcccttccaacttgaagtacaactcatacaatcaagaacttcttttatttttaaaagagaaagaaaggaagaaaaggggggtccgttataggctgaaggaatcagaaaattggttttctaacttgtgaaaattcattttgttggaaataatgccaaatggtcaaatgacaaaaatgctcctagggccaatatatcacatatgcataaatcaagaggaaagttgtcatttcatcacaaactatacttaaataaatttcaaattattctattaattataaaattctaaaataaaatcccaaaaatgtatttcgggccccaaactcggtttggcccaaaatacccaattgtgactatcacacgccaacttgtcagaaacacctacagaagaataaaacaaatatactatataataatatagtccataagcatactataacattaaaattacagtcatacccttctcaggtaagaattataaaaatgtcccttgctcaccaactaggtcttaacaagtcctttatcagtataattcatatatatattaaattctataattatacaattccacattaatatacatgtcactattttgctaacccaattccttaatcttagggtattacaggtcgcttcgaatgtgtatcgactatcgggaattgaataagctcactattaagaagagataattgctaccccaaattgacgacctatttgatcaactgaaggataagacagtcttttcaaagtttgaccttcgctcaggttaccatcaactgagaattcatgaagtggatatcccaaagactgcgttcgatactctatatggacattatgagtttttggtgatgtcttttggactcaccaatgccccagctacatttatggatcttatgaaccaggtattttaggattacctggaaaagtttgtgatagttttcattgatgatattttggtttattcaaaatcagaggaggagcatgaactgcatctcagattggtacttcagcgattatgggatcacaagctttacgataagttcaagaagtgtgagttttggttgtcatgtgtttctttcttagggtacatagtggatgaagacaggatcaaggttgatcccaccaaattcgaagctgttcgggaatggccaattccaaaatcagctaggaagttagaagctttctaggtttagctggctactatcattggttcgctgagggtttcccaagaattgcaagacccttaacagaatttactcaaaagaatatgaagtttgtttggattaatcagtgtgagaaaagcttttaggagttaaagcagcgcttgattaccgctccattaccaactcttccatctagtaaggaaaagtttgttgtttattatgatgcctcgagacaaggtctgggttgtgttcttatgaaaactggaaaggtaatagcttatgcttcttgacaattcaaagagtacgagcagaggtaccctactcacaatctaaagatgtgagatattcactgatcgtaaaagtctcagatacttctttacccagaaagtcctgatcatgagacaaaggcgttggcttgagctggtaaaggattatgattgtgaaattctttatcatcctggaaagctcaatgttttagctaatgccctaagtagaaaaggtaagaactagatgaatacaatgaagcaaatctccaagtaactgacagatgaaatgacctaagctaccattgagtttgttgtgggacagttagctaacattaccctacaatctactcttttggaaagaattgaagaagatcaattgcaattgttaggttttatgccctaannnnnnnnnnnnnnnnnntaatcatatttacttattaatatagat

SEQ ID NO: 164671 - DNA, 640 bp, Cannabis sativa
  modified_base (607)..(615): a, c, t, g, unknown or other
gccatcggggtcgtacgcgcactcacgcttcacgtgcttgcactctctctccatcacttgctggttgcttctctttcttctctatgccgctcacttctcttggcaactgagttggttcttcttaacagctcgcttgctcaatccaacctctcaccttctcttgcatttccttcgggtcaagtggtattgggctttccaattggactgggctaacactactcccctgctcgaaaacaaccttgtcctcaaggttggtaaacccgtacaactgacagaattgttgaaaatattcccacgttgcatcctttggggcacataaagaccattgaactagcacttgttgctggccttcactgagtctcgtagctaaaatagcctggggagtcattaccggtttgttgttgatagagtgcttgagcagtggaaaaaaaagtcacgttggaattgtcatgaaacggtttcaacagagacacatgaaaggttagatggattcgactaccaacggataattccaaagtgtatgccaccgttcccacgtgagctaagataggaaaacgaccaaaatactgttgggttttgtgcactaaataaaacccattacaatctnnnnnnnnntcaatctaagaaatttgaagtgatt

SEQ ID NO: 164672 - DNA, 1956 bp, Cannabis sativa
aaaaaaaaaaaaaaagacttatatataaataacttaaagtgacatgaactttctttcaacccaccatttttgatcgagctcactactacggattgaagaaaagaaattaacattgaaaaaaaaaagaagaaagaaagatagagttcgaagtggtgggggagtggacacaattaattgaattggtaaaaatgaataaatgtaaaatatacagcctatcactataaattaatgtaatattttgtataaatttgtttggtacacttgatatctttctactcatgcaataaagatttttaatatatatattttttatatgtacattttacttatttaaagactaagtaaattttcaaataattttgaataatttataatattaaaaataaaatctaaaaaattattataaataaaaaaaaaaaaacaattatgcaacatctatttttataccttaaaatattcaaaatttataaaattttacatacaatgattttaaataaattaaacgtacacaattattgaaaaaatagaattaaaaaaatttctctcctttttttctataaaaatagataagtattgtgttagatgatcgacttttttaaaataatgtaccatatacaattatccaaaaaattatttaaaaaaaaggcattaattttgagtttcacaaattacatagtttttcatatatataaatgagattaatattataaatgcacgtttatttagttattttttaatttttaatttttattttagttatgtatatttttagaatgtataattattatttttatgttattcattaaacaatattatttttaattaataaatatttaagttaagtgttatttattaaaagaaaatatgataatatttaaaatttgttgttaattataattttactttaatcataatacttttaattttataatatttttattttttagaaatattatacacattttttatatttatttttttaaaaaaaaataacgatataaaaatatttttagtaactgcaataggtaacagctttttaagtaacataaacacttttcctattttattgtttaaaaagaaaacaataataaaaaaaatattttatagatatgtgcattataataaaaatatatatttttttagatgtgttgaatgagtttaaatttgaattgcatgattaaaaaaaaaatatacacagtgagtttaaatttgaattataatgtttgaaaaataaaagatattagagatatatgtagcgagtttaaatttaattagtaacattttttttaagaaaaagaacaatattttcttattttatattcacatttcataaaacatagatatatttatatattttctttttaagtaatagagtaactagtgttgtaagttcatgtgtgttgtgctggttcagtctgtatttattcgtacatttaaaaaacaggtcgtgtcacagaaaaatatggatcgtgttgtgttgtgccaatatttttgaatggcaggctcgggacgacccgtagggtcgatattttcttgttgtgctcagattcgtgttgtgctttactagtgtcgacctgtatttcttaaataggccagtctattttcatatttaggcttaaatttatgctttactttttcatataaatatatttttataactactaaattataatttatatgtatatttcaaaactttagttatatttatataaattttgaacaacaatttactgataatcatattaaaaaaaatattaatatcattaaaatttaaatatttacttataaatactcaaatttttaaatgacaccctataaataaattaatatataattttagttttttatattttaattataaaattataatattaaatcttacaaattttattattattttaacttatttataattgataaatttatgtaaagtttttttttttttggcaagttagt

SEQ ID NO: 164673 - DNA, 823 bp, Cannabis sativa
gagagagagagagaggagaagaaagaagtgagttttgaactgagagttgagagcttatggagcttagaggcttggcacttagcgcttgagacttagcccactagggttaggctaatgctctttatatagtagagcttacatccctaatatcctttaaaaataggtaaataaaactatatttacataattaattaatacataataaatgattaaattattccttaaaaatagggaagttgctgatatttttgtggtatcttcgtgggttgtcaaggccaaactcacagtttggcttgttgtacacggatgagggctacgcatcaatggcttgtcaggcaaaagttggtcagccattcacctgtaaggtgcaggctggccgaccacatactatctgcaggttggacctctggccatgctcctgccagggtttggtcggccatgctcctgccatctttggcaagtgttggccagcttttgcaagtgttggccaacctttgtaagtgttggcgagcctttatacacctttttcttgtagaggtcagacttccttggtcaaacggacccttccttgatctgaaagtcacttttagccagccagcttgtgctcaaaccatagctagccatacaagcttatcctagtcagccaatgtactccccttggccggctaaacatgatgatgcatcctcttgacggctcgcttaactcttttcgcttgctgcccacaccttgtatggagactttgtccttctattggcaagattgtattccacgtgtcctcagtcttggcttacatggacatgccacgtcaagtggtcaaaattt

SEQ ID NO: 164674 - DNA, 1124 bp, Cannabis sativa
tggaaaccttgagaaactcttattatataccctacacgagcaatgtcattggggaatcgcattagtcgtgtatgacttcaccccaccttttggtggattccctcattttgcaagtgtcacttaatgttgaaaaaactcatttggccactttcctcctttgaaatttctttgggcgagcactgccacaatggtgtggcaaggctcatgtagcacccttgggggactattccttgtccaattttgattctatgttcaagccttggtattcttgcacctcaataagtcatgtacttttaaatttcttctagaattaggcttaacaacaaccctacctcagattcataaagatgccaaccctaggcctgaaaccctaaggtgcaagcactgaaaccagtaattaatcagtactcgcataaaatattgatgctaaaacttagtatcaatgtcatattagtttctctcttaataaagccaaaataaataatatattaaataataatctttaagatatatagtagtaaatttgatgagtgcttatcattgtagtactttacaagtaagagtgtcaaaagtaatatgaaagagagatataattaaatattatattttcagattatacggagagttttaacacttttaaaaagtgtaccattaaagatgctctaagagctctctcatcaatgtctctactttatttttcgaaatatgtcactaaaatgttactttttgtattttacatcaaacttttacattacactatatatgtatttttctatttttttttctctatatcatttaaatattatataattattagtttaatatattttatttattcaattattttatctcattatcaataatatctatatatttttaatatttattcatatataatattaaatataattataatatattttaaattaattccgattgattaaacaaactaaaatctaaactaatataaaatatgaaaataataaattaatataaattttttgacaaaataaataataaaatataggcactactagaaaaatgggtttcagtgacccacattgagtgactctaaaactatttagtgacacttcactgcgcgccactaatgagggtgactggaa

SEQ ID NO: 164675 - DNA, 1094 bp, Cannabis sativa
gtttatactgtttgctgaaagtcttaatgacaattcattgttttccagggaactccaggattctatgcaagctggaacattggaaccagaagttgcatttctcaatgcttctcttgtacaataatacacacttgatctctttcatttagtttcacttattaactttactaaactgacatttctgagctttcttgaattcaacagatcccagatgttttccctctattagcagctgcacataagaccatagttgccaaatctcgggagtcactgacaacgcgcactcttcattcagagcttgtttacaattactcaggatctaagcatgtaaaaacttcatccactcaactatgctggtctattgataacttgcttatggatacctattgtataaccattgagtttcaatgacagattacagaatccttgaaaagatgtggcatctctgaaagctcatcttatgtgcttgctgctcgtttcaatgcttctcctgatgaggtgagaatatgagatttactgtatcaaaccttgaattgctttagaagtatgtaaaatattagccaagcctttataatatttgctatcacactagatgaaaggcgtagagaaacttatcaatgggaagcaaattgacttggaggaattgggagtcagagcagaccaagcccaaattctaaaggtttgtctattgacatttctttttcccttaagctaaaataattagccttcagtgactgataacttgttgtattccagcaatacaagatatctagcgtggaacttagggtgtcctcacttgcagatgctataacctcacgaattgctgcccgagacgcactgtaagaagatgttgagttcacttttcggttattctagttctaaattttctttaggcgccccacttttatttctgtcttaattgaaggacagaaaatggtatttggattgcttgaagttgtactgggaaatgctcatttcgtttactttgaattaatacatatttagttttcagctaggtgtttctgatatgataaacatcatataaagttagtccttctcttgtacccttcttcctatcgtgggaggagagatag

SEQ ID NO: 164676 - DNA, 620 bp, Cannabis sativa
gtcatgacatttggcaaggacacatcataacacaacacaatataagttaggtcatgcatgtgggtcgaaatttctgattaattaattatgggttattaattttatcttttcattggataccttactatgcatggagaaatgtgaatgatttactggagttgatatagatttttcatcaaaagcatttaataagtttatttcgagataaggttttgtggggtcttttaacgtacaattataaagaaatatatatatatggcaattgtaattaacaattgtactacacatgtctctaaaattgcacaaattattattaatttccatcccaacaaataggaaaattattacattttaccatatatatcttttaacttttaccttttggacatatatatagtaacccatttttacctttttgtaaaacaaaataaaatcatcaagaatccaaggatatcaattatcattaacataaaaaaagaaaagacaataccacacttaaatatattaattagggtgaaaataaattggcataaatacctacagtttagagtttttttttttttaagtaaccgataaagattaaaataacaagggtaacaaaagttacacaaaaggtgggg

SEQ ID NO: 164677 - DNA, 2174 bp, Cannabis sativa
atgtatgattttagaaaagaaaaaagtacaacaaaatagtccagctctacaatccacataatctaaaaagtttagaaaatgaaaagatcacatagacaagtattattatctatatattatgttatgtaatattaagtgacaaatatgaagaaggagtgaaaaacactttcaattcttttctttctgatttgatttctgagtcataatccaaaatgtcactacttgacaaatcatatatgactcatataccaaatctaacacaattggttaacaattatatttacttattatttatttattttgaatgacattacactttttttttaacatgaaaatgagtacacttttgaaggaagtaaaataaattttccccctttttttctaaacaattacatagtttttttcttaatattaggaaattatgtagtgtttttttttcctacttttttagacgattttggagattacgtgttagttatagggttcttatacctcattctcttttaattaagttatcggtatatacttcaaaaattcatatcccatcaagaatggtgctgccacatcaaactagtctcccaaatgaccaagtataattactttcgtaaaaggctgtagtgggattcgaacttgacccaaacaaaaaaaaaatgttagtaaaagcatatctctatcactgaactagccaagacaatatttaagtgtattttttcaacaattattttttatatataatttactacatttgttttttttttttttgtgaaaagactacatttgttaattaataaatcttatttatttatttcaaatattattcttattattctcttattatataaatttatatgtttcgattaaatcatgttaccttaaataattcaattattgtctttattattattttaattgtattaattaaattttaattttttattatattaaatatatatttattttactttttgaaaaagaaaatctaaaccatgcatgtataatttattagagatatataataagtgagtttcaaacttgcatacattgtttgagactactcaaaattctaatcaactgcaatgccactaaatattaattaattaattaattaactaactaattaatttattgttaaatttgttgatttggcactaatttaagcacctagatttggaatgttttagggtttacttcatcgaaaagaatcacttgccagccactatttttttttaaaaaaaaatatatatattttttattattaaaaaataattttttattattaaaaaataaagaaaaactattggcctaacacgtgtctatattaattattgctacatcttttgagcaatgtatttactcaaaaatgtcaaatttcaatgttccacaagcaaatgaatcttccaaattttcaacctccaaagatagttgaagattttgaaatttatattatggatgttttcaatttattactttaaccaaaaactaagaataataaaaacaaatattccttccttctaattctaaatgacctaaaaaagtatttcttacaacatttttttattagttgttttgttatttagtcataatttaatttataaataaattaagtaaaagttaaattttcatttattcgcgttaaaattgtctttaaattggttatattaaaaactaaatgttaaaattgagctcagagtcttatttttaccagatctattttatcatttaacaaacagaaggtccaatcggtaaattttacaaaacatagaatctaaaatgatatttatcctaaaaaaaacctctttgccccaaaaaaaaaagagtcaattttattaagtaaaattattgttggaaactttttttttcacaaaaataaattttcactagctttttacttgtttttcattttaatgagattttatatatctttattccaactaaaaaaatttacactaaagatttatttactatgattcaaaaataataaaatatatttataagatattcaagccattctgacttatgctatgagtttattttgtatttttgtaggaatagttattgagatttatggtatgtgtgctcgtttctggtggggtggtgataataattttcgcaaaatgcacttgggtacatggcctcacctttgttggcataaatctaatggtagaatggggttt

SEQ ID NO: 164678 - DNA, 1645 bp, Cannabis sativa
attatatatatctcagaaattgttgcatgcaaccaataatatgccatgcatatatataatgcattaataattataagtagcattattattattacttgaagatacatcattaaaataattactcgagcttgaagaagaagagtttgaagatgatgatgatgatactacagtagtccccatattattattgtaattaatattacaccccataacaagatcaaacattttaggctcaaaaatgttattattattattattctgatgatgatcatcctcaacatctttctttgatgatctttccttataaaatattcgacatagtacccaattattttgatctgtacttatttggttctgactaatctgtacatacatgaaaaaataaaaataaaaagttaatatatgcataataaataattaacattaataatattatatatttatgatatgtatatatacctgttgtggatcaaaagttagagtgtattcatgcatgaaccaatgagttctagctccatgaggaggctttccattatagaaaacaagagtttttctagtcccaacaatatttttcatagttgaagatacaatctttttatctgagcctgtacttttccaataaccacaacttgttctcctattgcttctcttaccattcttgtactttccttctttgttgctaaaaaagtacctatcttgttctaaatcacctaaaaaaaatgttacatatacatgaataaaacgacatgaagatatggcataaaacgacaatcaattaattaatatatttttataatacctgaggctgagggcaaatcccaaggatcataggtggaaaggttaatgatctcaggaacaatgtcagaagaataaggtggaagtgggaaagagaagactttgcatctaaggtattgaaacacaagttcttcatctgttggctgaaatcgaaacccaggtgggagtttgattactccattgttgtttcttacaaagttgtacttgttgttgttgttcatcataatattgttatggtttatattaagattgattactacagttacatataattaaggaaagtaatactataagagcaaatgttgataagtatttatactcatgtaaaggaaatatattaataataatagtgacttggaaagagagatcgactttgtctttgtttggtttacttttaatatatataatatccaatatcaaataatatataataacatataatattgtttggtctacgaggagcgggaataatgttaattgaaaagaaataatgttacacattgtgttgggacgtgttgggtccttttttttttctttgggtctaagttctggcgattttatttttaaacatttttctaaaaaacctcatttatattcaaaataactcctatttattcttctaacacaggacttgaattgaaatcctaaatcatatatagatagagttttatgttagacttcttatttaagcttatattaacttttattaattttaataaaatatgagttgatttgatagttttttattgtgttaaccatattgttagtgattaattgttaatgaatttagcatttatgtgttagtcaaaacagatgtaacgtccccgcttcaagcttctattgggccctt

SEQ ID NO: 164679 - DNA, 2336 bp, Cannabis sativa
  modified_base (241)..(266): a, c, t, g, unknown or other
ttcttcaatacctacaaattttgattgctaaaatatcttgagagtcatatgtaaaaaatatgagtttggttggattaaaaataaatacaaaataaattatgtatatagatctagttgacatgtatataaatgttataaaagtatttttcagcatcttattctgatacatatttggaaataagtccaaaaattgacattttatacaatagaaggtactacccaaaataataataataataannnnnnnnnnnnnnnnnnnnnnnnnnataataataataataatagtgagaatcgtaccaaaccaaatataatataataattaaaaataaaaaaataaataccattatagatttttgttttacaaaaattactattgataatctattttgtaaaatgacaagttataatattctaaaaattaataaactactatttttttaaataaaacttaatataaatatgctaaaaattatcttcaaattaattttatgaaaaaaaattatcaaaaattgaatttacgtcttatttattctaatagtaattataaaatacagaattcaaaataacattaactataaaaaaaaaaatatgatgaacatatttgaaagcaatttcaacaaattgaaatattatacaatataataccaataccaatatatatacatatatatatattggagaatataatgtgactactactactaccaaataataaaaaacaaaaattaattgagcaagggcaatttggacatttaaaaaagaataagaaaattgaaccgaatcaaagatgatgaatatatatttgacaaaataataattataataaaaaagaattatgatgaacataataattccaaagcttgacattttataagatagaaggtagtaggtagtaggtactacttttactacttaccctaaaatgatagaataattttgtttttgataaaaataaaataaaataattgagaaagggtagtttggacatttaaaagacaatgagaatcacaatgatgaacatatttgaaaataattccaaaatttgaaattttatacaataataataataatagttgagcaaggacaattttgccatttaagaagtagtgagaaaatcacaccaaatcaactatgatgaacacatttttgtccaataatagtataaacatatttaaaatcctactcccaaacaaaagatatttgaaaataattttaacaaatagaaaattagcggggtgtactctctcttgtttaagatactatcttcgttaattattttaatacttataaatacttttttttttatttttttatttttgaaggaacaaaactaagaatcacataagataatcatctccaacacctattattttcatttactccatataaaacatgtaaattaatatgtaaaaaaatgtaaattaaataaaaaacatttattattagtggttatttaatattttattaaaactgtataaaaattcaatatgataaataataatgtaaagttttataatagttaataatttatattaattagtgacactatatcaaattttgtataacttttaaaatgtatcaaatttgacacattttttaaaatactattataacataatactactctaattatattctaaaaatgtgcctaatttaaggcattatttcgatataaagattaaaactcctttatggtggaatagccaaactatcaccttggccaaactaaggatactataaaatctcttactccttatgaaaagagtaaagaaatagtcaaagtaacaccttggttgaccaagccaagatactaaaatctcttattactcttaaataaaatgaatgaatttagagtaaaagaaatagccaaactacaatcatcttggttggccaagccaaggatatactaaaatctcttactcttaaattaaagagcttagagtatagaaagagattggaataaataagcaatgcttattttgtaagaaaatatttttattaaagaatttacctcttatatagggtttatatagcattacaagagatacttctccatttacttttcatgtgggtttagtttaggaggaaaatttatttctctaatagaatagtactattttttttttttttaaatagaataattaactttaatagaagcaaagggttctaccattctcaaaccaaaaaaattagtaaaatttgacaaagcagcctaaatagctagcatatgagttgtttcatttagaattctaaagatcaaaaaaataataaaattaggcaaaatatcatgaatatcaaataattgagtaaataagtgcatgtttgacatcataatt

SEQ ID NO: 164680 - DNA, 733 bp, Cannabis sativa
aatttaaaaaataaataaacaaagaaattaaagataagaaatataagtccgaatatgagtaatacttaaaataagctaataatttgatgtgaagaatgatttgttacgtttgagtttggagaactgattctagtctaaaatatcgattttgagacccaaaccaaaattttataagctcccaagttcaatttaatactagaagatttgaaaaccatagatttaggataaacagaaaagctgtatacaaacagcaaaagttcaatttaatactttgtgtgttatatgtttgatatttgttatgttgaaaagggttcaacttcatatcgtttgataagtgacaacagtcaataaatttataaacaaaaaatttaaaaaaatcactacaattatagtagtttactctttttattgctaaggtaatagagttacgtctacttagagctttattatcataaaaagttaattgtcttacaagagaattcaagaaaaaatggcaaaatctagctttgcttcataattaataaagagagaaagtgtgaagagaaagaagctctgaccaaataaagagaaagtaaagtgtgaaaaataagttaggggagaaagtaaagctctccttctataggggagaaaatcaaattaaactacaataaaataacaagaaaatttgtacaaaattcgctcagaaatcctacactagctcgcgagtcaattttgaggtatgaaacttcagaat

SEQ ID NO: 164681 - DNA, 3636 bp, Cannabis sativa
tgcatcgacctttagcataacttgcataaaggttcgtcaatatacacctgaactagatgagcttagaagtagggccctagtttccttgtggctaagatcaaacagtatgttaatttctcaatcagggggtattgaccttcagctaggggtgttcataaaaactaaaaaactagaaccgaccatcaagctgaccaaaccgtaaccgaagttttggttccacatcatcaccaaatttggcgttcagttttgattacagttttttcgatatggtggtcggttttgatttttgaaataaaaaaatggttaaactaaaaaactaccaaaacctccataaactacccaaaactgcccaaaaccaactaaaacaacaaaaaactatccaaatctgtcaaattgaaaaaaccactaaaaattgccaaaaaccgtacggtcggttttatacggttatactttctaaacggttaattactattttggaaaataaaaatcgtaactagccggtcggttataaatttataaaaactaatcataactgatcgattttcacccctatcttcagcctcaactagtcttttgctgatatggtaaattggatgttgaacattgttctccaatcttatcagcacaacacttacaacgaatacggtgactgcagggtagatacctaattcttctccatctagagtttttaagagaatggagagttctgcaagttgcctctttagttcttgaaaagcactctcacatttctctgtccattcaaacttcttgttacctcagaggatgttgatgaaaggaacacatttgtccgttaattttgaaacgaatatgcttagtgcggctatctaaccagttaggctttgtacttctttcacctttgttggcgatttcatatctaggagggcttgaattttctttggattagtttttattcctcgagcattaacaatgaatccaagaaacttacctgagctaacccgaaggaacaatttatgggattgagtttcatgttgtattttttgaggattttgaagcattcatctagatcctctatatgcccttagtcttcctggaattgatgagcatgtcatctacatatacttccatgttacgtccaatctggtccttgaatattttgttgactaacctttggtaggtagctctaacatccttgatgccaaatgacataactttgtagtagtatagaccaacatctgttcaaaaactagtgtgctcttagtcaggtggatgcattcttatctgattataccccgaataggcatccataaaaatcaatattaatggccgactgttgcatccacaagctgatcaattattggaaatacaaaatagtcttttggacacgccttattgatgtgggtgaagtcaatacagactcaccattttttgtttggcttgggtacttatatgagattagccacccatgccaggtagaaggcttcaataatgaatctatttgtgcaaagtctttctacctcttcttttaatgcttgtgctcgttctttgtctaacaaccttcttttttgttggacgggacaaaagtctggatctatgttgagggcatgagacatgacggttggatcgatcctgaccatgttttcatgcgatcaggcaaaaatttggaggtttgctcttagtaattttattaaagctaattttatttcaagcaacaaacatttgccaattttgagttttctggtcgtcatagtgggatcaattttgatttcttctagttcttccactggcctaacatttgtgtttggttccctaaggtaggggtccataactttgtccccgccttgggaaaattcctattgggcaatggttttacccttctctgaactctggtcggaattgtcttcctttttggccttagatagagtaaggttatagcattcgagtgcagtgctttgatttcatttcagatagcccactccattcttcattagaaattttacccatagatgaaatactaaggtgatgactcttaagtcatacagggctggacgacctaacatgacattaaaagaagaaggcacatcgatcactaagaattgggccatcactgttgtgcttgttggagcttatcctactgtaagtggtaggcagatctgttcgagtggtgcaacactttggccggagaatccatatactagttgaatacaaggaaccaggtctttgagctgtagccccatcttttcatatgttattttaaataaaatatttggggaagcttcattatcaaccattgtccgagccaccattttatttgcaatttgtgcttcaacaaccagagggtcattgtgcggataaatgatgtgatcggaatctgcttcgctgaaagatatgtctggttcccatacacatggttgcttaggctttctttcttctaggactagaattgcatttgtttgttcatactgtagggcccgagtgtacttttctctagctttgcccgagtctttagcaaggtgggagcctccaatgataacctgaagatgtccgtccactagtggaggcattaattatttttgagtgttatctggttgggtgaccctttgctcttggtcagtcttgacatattttttcaagtgcgggttatttttcctaattagaaattctatttcctgcttaaatttattgcattcatttgtgtcgtgactgtagtccgcatgaaaatatcagaacttggtagtaatctttttgctcatgtctttcgaaaggataaatcacactctaatggacatggttagaaccatgatgagtagatcaaatcttcaagagttcttatgggatgaagcactcatgactgctacttatattttgaatcgtgttccaagtaaatctgttccaaaacttcttttgagttttggactgagagaaagcctagtttgaattatcttcgtgtatggagttgttccgctgaagtaaggatttgtgatcttaatttgaaaaaagttatatccgagaacagtttgattttttttttcattggatatccaatgcactcaaagggctatcacttttaccctcctactcatggtacataaattgttgaatctcaaactactaaatttcttaaatttgatattgctaaaaatattctttctacatctcttgaaatgggagagtcatctaagagaattattaaacctgtgtctatttcaagagatgataataataacaacctaattcctactcttgttaataatactcctattactgatgaatatattgctccctgatatcgaagatgatgagggtcctattaaagacgagggagctattactgaagaaggccatgttttttatgaggggtcctattattagagaaatttcagttgtggaagatgtcattcaaaataataatcaacaaatagaagctattctataagcaccttctctaagaagatctcaaggacaaaagaagtcaacaaggtgtgatgataattttgtttactttggagaaggagaatatgatattggtcattttgtggatcctgtcacttatagtaaagcacttaatagtctacaagcttcaaaatggataaaagcaatggatggttccgccttgttgaggcctgtagagggttccaaacctgctaacccttctcg

SEQ ID NO: 164682 - DNA, 1413 bp, Cannabis sativa
ttttttttttttttttttggctgcaatagttgggagatcttatgtgtgcgtaatatcaatgataaaaaaaaaatgaaaggttatggaaaccgttacaatgttctctttcattttttataacaatcaattctttttgtttatttatttatttgggtgttttccttttccatgtttcgaaggagtttgatgggcttgttagattttatttctttttaattggtagtttgtaaactctttaggtgagagcaatagaagacaattttgtgatcattgatttttttctagatgaattgctattatattaaaacaaatagtcataatacaataggcattagagaaggagacatatctccaaccaagtacaattagagtccaccaaaagagcatactttgcttatacatgagcaacagtcactactataaaattagcttttcccaacggttaataagggggtcaaatataaaatccgttggaaaaggtaagcagaactttttcccaacagtttaaaatcgaagcaaaaaaatcgttgggaaaaactaatggcaacggtagagaaccgttggcaatactaaatggaattttgtaaacgaaaatagtaaataccaacagttcattactattcccaacagttataaaccgttgggaatacttaatattcccaatatttataaactgtcgggaatacttaaacagttataaagtgttgggaaataatctttttagtatacttgaaaaaagtttcagatttaaaaaaaaaaaaagttgtttaataaaaaaaatttgtatgtgataaaaggaaatactaaaaaaatttgagttttttttttaagataaagaaatttgtacttttttttttattttccttaataaaagaaaattatatttaataaaataaaataccaaaaaaaaagtttcatatttaaaaaataaaatgaatttttttttgcttaataaatttatatttaagaatttataatattgaaaaatttataatttataaattttcagagtataattttacattagattttgttttatttttaataaataaataataaaacaattgataagaaagtaaaaaattatataattttacatcagaatttatatatatatattttttaaaaaaattgttaaatggctttttttttcaaaaaaatttgttaaatggcttattactttatttatttattttttttttttagaaaatgctattatattaaacaagagttaaaatacaataggcattagaggaggaggtatttcccccacccatgaacaattagaatccaccgagagagcatagcgcgccagtaaatgcgcagcattattagcagatcgatatacatgagtgatctgagctccagggaagttggatactaaaatagaaatattgtgcaacaaacaatgaa

SEQ ID NO: 164683 - DNA, 1182 bp, Cannabis sativa
tcctgccgctaatgccctctgccagttgctaagttcgaaactggcaaaaggcattagcggcgggcactaatttcgccgctaataatagtattagcagctatttatttacgatggagactaattctgccgctaataatagtattagcggtggacttttagcgggggacttcttccgttaatagcctattgcggccaaatcaggagttattagcggtggagtagtccgtcactaatgagggtatatgttgtagtgtggcactattttttttgtaaaaaaattacatttttatgtttaaagattttttttaatttttttttacggttttccatagattgtacaacacgaaaacaacaagaaaattatataaaagtaacatgaaaataatatcaaaacaacaacaaaaaataatatacaaataacaaaaaattaataatcaattaacaagagtacaacataaaaagaccgtattttctgtaaataaataaaaaaatcgtaaaaatatttaaaattctatgaaaccgtatttttgtaatttttttgttatttttgtgtctttgtaaaataatcccataattttttcatatattgtgtaatgtctactatagtttatatatgtattttgtagcccatgttaataaaattaaattctaatagtggtcttaatgtggtctaaattttacaaatactaaagctataccaaatttagcacaaatatagcatggtccaaattttacaccacaataaatatcacttttttatttatttttttaccaattattaatgtaattaataacttttttacgtttttatttatatagttgatgtagtttttatatacttttaataaaaatgtaatgtttttgttaacttttttaaaccattctattaaaaaaaaagtttattttacctctagtgcattggagtacaattataagaattaggggctgcacatttagacctgcaaactcgaaaaacccgaagacccgacccgccccgacgccaaaaaaaccggccaactgagaacccgtatagtcgggtcgggttgaacccgaaaataattgtaataggtgtcgggttcgggtcacatattagttaagttcggtggtcgggttagaacccgtaacccgaaaatattaaaaattaaaaactgttttttcttttattaaaaaattaatacattt

SEQ ID NO: 164684 - DNA, 875 bp, Cannabis sativa
aaaaaaaaaacgacacgtcgtacgatctcctgttcaaaaactttatactgaaaacgacacgtcgtacggagtcgtctccaacctccagccgggtcacatttgacccgttttttgcacgcgggtcacggtagacccgacccaaacccgaccataaaactgtttttagacgtccaaaattcatgaaaccaattccaaagtgatctaaatgaataaattaagagatccaagttgatttcaaacatcaaaaacatgtaaaatgtagactccattatcaatgaaaaaacgggtccgaacgaggatttcgaaaataaattccagtcaaaaaatgttatcatgctcgaattcattatataccagtatatgaacgtgatgaaacgattcatgaacaaattatatcaaattttttgaaactggaaaaaatttctttcgcacggttccgacaatgataattggtacatatatatacacacctataatataactttaccgtatgaaattatgaaaaacatataaattagattattctaattaatattaaataataaaatcatgcaatcatacaaagttatatataaatctataaaggcgtagctatatgtatatatatgtactgaaaagtatgaattttgtgtgtatatatatactcgaataaagtgagtatagcttacaaaacatgataaatagattagaatgggatattctaatcaatgttatgcaataaaataaaaaattagttgagtattatatataaatatatatacaaataccatacatatataaatatatatatatgtatatgaatgaatatcaacatgaatatgtataagtatatataaaaataaattgagtattgaatatatataatcgggattata

SEQ ID NO: 164685 - DNA, 1269 bp, Cannabis sativa
aaaatagtgagaacacctcttagtgggagaaatgtaagagagaagaagagagttcctacaaaattgtgagaaacattttgtagagagatagtgaagattactacaattagtgagtgtgagagttttgagtatattcttcaagtatttgtcaaaacttgagagtgtaatattgtgtacccattattattgttataaaggaaaatttaccgtggtttttattttccacgagataatttcttggcacgcatttagtgctctttgattattattcgtaaagtactatttccattggaagatatctaaaaattctgaatatgctttgtgattgcaactgtaactgatctttcacatcaagaaagaatttcaaagactccattgtattttccgcaaatattgatcctaaagggaaattggaatactactggaaggattgatagcgttcgttcccttgacaatatcgatataagaagctgccccaatttgacatcaattcccgtcaacttcagaaaagtgaagcatatctcttttctctctgtgtttctttattacatagatgtgtttatgaagcatgcattctaaattttttttcttactgtatcagttccttttaaatgaaacatatgaattttgatatagttgttttattttgcctaaagtgagggttttaatctataacggggggaggccagtctaagacaaaggtctctttctcttttgatttggagatatatataatgaaggcaaccaattccctatagaagcatgaatgcatcccaagaataactgttagttattcaaggacttggatcagcactacacagcagacattaactctgaaattacaactcactctaaaactcttttacaaagaagaatctctaaaaactgtacctatatttttgtggataacttgaaatgtagagagtttagagatatttatagatgaggagaggagaggacccttgctgagttggagatgcaggcagccaactgtattaaccaactcttttgctgagttggtgctgacatgtacatggattaagtgagtttaatcccaacaattccacctcattaaactgatcactgatccaaaacaataactgtcatcaagggcggagctacatgctaagtacattacaagaaatgtcacttctaccagcagagttcgctactgcgctggtaaaagtaacttttaccagcgcatttcgcaaactgcactgacaaagaggtcaaaattttaccagcgtacatttacagtggctaaaatct

SEQ ID NO: 164686 - DNA, 650 bp, Cannabis sativa
cgatgagatttaccaatctagaccaagttgttgatcattactggcattaaaatttgttcatgataattttacatgattagtgttcgaaatcatcaatgttagccttaaattcttataggtacgtctgttaaggacaatgttgcggtgggaagagcaactacacaccgaagcaagtttcggacaagataagccaagaggaaagtcttacggctcggttgttcttggggaggtggtgattgtttgttggccccacggcgagataatgagactgagtaccggtagcaccgcggccgatgctgctagacgagtcggactcgagggaaaattggctttagttaatggccaattagtgttgcctaataccaagctaaaagatggtgatgtggttgaattcagaatttgatgatgatcacaaaaaatttgtatttgtgaaaataattgggggaataagcaaaaatgaaattgtataaaaaaaatgtatctttattgttctttttttgttctttccccttaattcaaggaataatgtatataaaagaattttcaatattgtacatataatgtcaaaattccacaccaaaaatatttaatgaaaaatgaaaattctttgtgaatgtctttttaaattttgggatatatatttgcaatta

SEQ ID NO: 164687 - DNA, 3371 bp, Cannabis sativa
  modified_base (1793)..(1797): a, c, t, g, unknown or other
atgagtccattgcttctagtttacatcctttcaggaagcggtttcaatttgaaaatgtttggcttcagagccctgttttttattccacggtgcatgactcttggatgaattcttccagggcctcttctcatgagaatgctttagtgagtttcttttttgccaagatgcttgtgtttctgctctgaagtcctggaacaaatcaactaagatgatgttctagtctagaattcaggatactcaaaaagagattgctaggcttcaggtctctgcttctagtagtagagagtctgctcttagggtccagtatctccagtcccagttggatgctcttctttataaggaggaagtttactggaggcaacgatcttgagttaattggcttagagcaggtgataagaatactaaattttttcataggtttgcttctcatagaaagaagaataatactattaaatatttaaaggatgattttggtaatagtactaatgatccctaggctatgtttagtattgtttcttcttttttcaccaatcttttcagctctgagggttgtgatgctgaggcaactaatcagatattggattgtttagggcctcccctagatgtgactgatattgattatttggctagctcttatacagctcaagaagtgaaacaagctgtttttagcctctcaggggataaagctcctggtttggatggtttgaatgcttttttctaccaaaaaaattggcatactctgggagctagttttgttaatgcggttttagattgtttaaataatggggttaatttttcgaatattaatactactattatagctttaattcccacaaaacagcatgccagctctttaaaagattttcggcctattagtctttgtaccactatgtataaagttatttctaaagttttggcgaatcgccttaaattggtcttggacaaaattatctctccttttcaaagtgcctttatttctgggcgtatcatttttgataatatccttattgcccaagaaataattcatgctatcaataataggtaaacgcggctgggctgctcttaagcttgatatggctaaggccttttatcgtgttgaatggcactttttggaaagtttaatgttctattttaactttcctgtcaatttcgttaacttaattatgaaatgtcttactactactaagctttcttttcttctcaatggtgatgttcgtgggtctcttaagccctcgagaggtcttaggcagggagatcctttgtccccttatctttttatcctatgtgctgaaggtttatcctctcttcttagagtgcgacatgaagctcatattcttaatggtatagccatctctagacatgctcctgccatctctcatttattttttgccgatgatagccttttattttgtactgctgataggaactcttgcttagctcttcaggatgtgtttaatatttattctaaggcctttgggcaggccattaatttctctaagtcatctatccttttttctcctaatactgtgcaggatattcgtgctctgttttttcaaaattttaaccttgaggatcgaccttttggttgtaaatatttaggtcttcctcagtgtcttactcgatccaaatatcactctttcacttacctctgtgataaagttgcttctgttcttaggggttggtcatctaagtgcttttctagggctggaaaggaggttcttctgaaagctgtaattcaggctattcctgcttatgctatggcttgttttaggcttcctgttaaaatttgtaannnnnttgaggctgcgatggctagattctggcggggttcttctggggaaactaggaaaattcattggagatcctggaagtttctttgtcagtccaaatttaggggtggtttggggtttaggtctcttgtgcatttcaaccaagccatgcttgctaagcaggcttggcgtattatgcaaaaccctacttccttgcttggtcggatccttaaagctcgatactttccacactcttctattcttgaggctgtccttggtcaaagtccctcgttttcctggagaagcattttatggggtagggacctgatggcttctgggcttatttggaaagtgggtaatgggtatgggattcatactttggatgataattggcttcccaatcatagacataagtttttttacctcaaatgatccacctccttcttctcattccctgtactactttattactgattcaggtacttgggatgttggcaaattgcagtcttgttttgatgaatccatgattcatgatatccttgaggtccctgtttctggaagttatggtcatgataaactgatttgggaaaatgagagttctggatgttttactgtcaaatctgcttatcatttggctttctctaatcaggaccttccatcttcttcttcattttctgattttaagaagttttggacaagaatttggtctttaattgcccctcctaaggttaaactttttgtttggcgtttgttatctaatgcaatccctgtggctcattctttgtttaaaaaatgtgtgatcaattcccctttgtgtcctgtttgtaagatggagaatgagactatcaagcatgctctgctagattgctttaggtccaggaaagcttggcgatattccaggtttgctgcttattatgatgcttttaaacacttgggtattgatgagttttttcttggtcttctacaatctttggacaaaaatgatattggtattttgtttgtttcatttgggctttatggaatcaaagaaataattttgttcataatcagcatactattcctcccaaggaagtgtatgattggagccttaactttttctttaagtttttggatgcacagcaacatcatgtcacaggttccaattttgcatccccctcggcttcagtacaaatatctagttctagggggcttaaaattttcacagatgcagctattgactcagtaaataggaggcatagtattggagtggtggtcttagatgctgataatgcagtcaaggctggtttttctactcctttctctggtttggtgccgcctgctgttgctgaagctaagactatttttcaggcaattcaatgggctcagctgattcgccttcctgtagatgtgctgctgacggattgcaaatcaatagtggataggcttacctcttgtaattggaataatagtgtattggatgatattttgataaatgttaagaacttgttatctttcagtccaaggctagctatttcttttgttcctaggaatagtaatgtacttgctcataaattagctaagctaggtcttggattagataatgagttagtttggaatggttct

SEQ ID NO: 164688 - DNA, 1383 bp, Cannabis sativa
gcctataatagttagggtgtaacactaaaagtttaaaataattgaaacaacaatattgctaagtaatacaatagaacaaaacatcatgaaaaaaaaaatatacaaaacaactaagtgttacaaattcaacacacaaaaataaatctactacaaatataattgatgtatgtttggtttttaatattttttattttataaataatttttaatatatataaatataattagattggatcgattttcaattaaattttgagatcgacgttcaataactgatccaaccgaattagaattcaactttcaacatccaatccaatctaattgtaattgaatatctaattttttttaattgaattgaattagatcggttcggttcaattgaattagattggatgttatctacccctagttctcatactacgtacatctctaaccgtatttttgaattttaagagtattttcaaccatgctctctaaccaaattctttagctaaaatagagtgggctttaaaaataggagctacaaacataccaaaagtggctccttataataaaaaatagataagaagatctctaaatgtagagaattctctacttttttgtaaattattttaatttaattaaaagcataattagtttttcattattttgttaaattagtttatatttaacaaatttaaattataaaatattattcaaaataattaaagactagctaaaaaaaaaaaaaaaatagctctctcttctaatttttttaattattttaataaaatttggctaaaaaatggaatataattaaagatgctgtaatatataaaaaagaggagacatgatctgattatacgatataatatggcgctacagactggaatttcggattcggataagagatttgagtcccacaacttattaaagaaagaaaaaaaatcatttgtataaacgatctctgcacggatgatgttgactatttatatacaacaattttttttttttttcagcgaccttaccacttttattttgctgaaaataatttgtattttgttatttttttattcattttaagccaactccaatagaacttgtttttaagtggagttaagtagcattatcttataactagtaaattggctgcgtttatagcgtgggactatttataaaaattttaaaatatatgtataaatattaattcaacaataaaattatataattaaaaaagtatatatttatttaaaaaataaataaatttacatagacaactttaaaaaaatttaaaaagtatttttgtaatttctcatataaaaaataaagctcataaaaaatattttcaaatgtatattatagtaacgaactactgaaaaataaacaatactcacgcaaaatata

SEQ ID NO: 164689 - DNA, 671 bp, Cannabis sativa
ctgtatgtgaggatccaaataaatatataatttggtttaaataaagaaatgaatacgagaagacactattatcaacatgaatacaatttattttctttaagaagttatatatattattataacattaaatatagctaacaacccaaagaaataaatggtagagagcatttaatattttctatttcataagttatattattatatatatgtttttatttttatgagatgaattagggcggtggtggtggtggcaactgtgtcagaggtgagtatatgaaaactacgaaaactagtatgaaagcaacatggcttaattagtagtaataatatgtatttctaatatatgaagcaatagttgtagtgacttctcaatttcaatttcaagactcactgtcatacccactactaaccacatgccatcattaaactacatatatagatttagttacaaatttatggagggaaagctctacatttatacatatagtcataatatttattgaatatgaggacgtaagtagtaggggtgtgattcgatccaatcttaattgatcgatccaatctcaatcgatttaatagaattggatatccaatcataattggatcggatcggatgcaaatttaaaaatccaattgaatcggatcggatgttggatgagacatccgatcca

SEQ ID NO: 164690 - DNA, 3668 bp, Cannabis sativa
tcaagtaaaaagtatattgctatagaagcttggtcttcgtgtttaatttaaggataggtgaaaaatatataaatatatatagggatatgattttgtcacgtgatgtacttttacggaatgtattccgtggtacattagatagatcttagggtacattaaatgagtgttagaatacgtttctactttttagcctaactacctctagattaatctcagccgtcagatcaaataatttcctcatctgtaatccgtgaaagtacaataacggaacaaaatcatatcccatatatatatatttatatattttgagacaggtcaatgagtgtgaaatattcctgataattattttactctgtgtcagtttttattcccgtaaaaacaattcattattgggacgtgatagggataaaaattaatatttatttattcaaaatgctaattaatattttttgtaaagtaattatttagttttaatattttgtgtgttgaatttattaattttaggtaccaaatggaactgggttcattcttggaatagcacagctggtactatatgcaatatacaaaaatgcaaaaccatccataaatataaatgttgtatcagattcagatgctcttttggaacaaggatggcatacacagagcctcattacctcttcctcccccactaattaaattaactacatacatatatgtatatttacttatatatatatatatatatatatgagattaattttcatgagaggtctgcagcaaattacacaacttaatatttggcttgtttaaattttatttgagaaaaaagaaaagggaagataagttgcatttagattaaacacagttttggtaattaatcaccttatttatttctttatatatttaattcattatatatattgtgcatgttgcggttgtaaattgtttttaatttcatacacttggtttaaatatatggtttacgtacgtttgttacataaatatatatatattgtataaatgataataataatattggatgatgcttcatgcttatgtgcaatcacaaatatgtttctacatacatgtattttttttagtatgtgttaccttacttttatactctatatttagttaattatattatattccttatgattttttctttcttgaaatattcctttcatgtattgatacatataagcaattttcattaatttattagtttcgtaagtttctttgtactgatattttagtaaaccttatatattgctatttttcttagagaacaattgaaaaccaaatcaagtttttcttattgttgatttagaaatctcgattagttagacttctaagtcacatccatttgctaaattgacgataatgaaaaagtaattaagtagtaagagagacacatgaaatttatagtagttcactccttaaatcaggacattaatagaactttgtatacttcgagtttttatttttcacgagatagtattattaaaaaaggttaagtatcagaagctctaatttctagagagagaaactttgacattatgggtagtttcctcaaaagttaaaaatgagctaatagagctctccttttataggtgaaggagcccactaagttttcctaacatcgtttttaacgatgtaactttaaatcatgttgagatacttgcaatacatgagcaagtagagaatgtgtgtgattgagattattaattgagtactgaattacactcaataaaaaagtgtcaataattctctatgaagataatattgctagcatcactcaactaaaatgaatatacactaaaagagatagaattaaactcatttcacaaaattcttctttacacacgatcttcaagaaagtggtgatatctcaactgatttttaacatatttaatcaagcaaaaatcatacatacttattcacaaaatcaattgcggacaatatcaatatttaagaagatgatatataagatcataattttttagttagaataagatctccttgaatgtctagatgaggggaagttaattcacaatgcactctttcaatgaggaatatttttttaaaaaaaaaacaataaaaaatacggttgtatggaattttaaatatttttacagtgtttaagattttatttacataaaaatatggtcttttgatatatttttatattgtacccttgttattttgttgttgattttttgttatttttgtatattattttttatgttgttttgatgttattttgttattgtttttctgtaactttatgtggttttcttattattttcttatgtctttataaaataccgtaaaaaattttaaaaaaacctttaaatgtaaaagtgtaaaatttgtagtaaaaataacattttatgtcatttttcatttttaataaacataaaattgttattaaagaaaacaatattgtcattattttttaaaaaatatcatgggccaccgaaatacaacgtccaactcttgggcctgaatttcatattcaacaaaacgttgggccctagacttcatattcaccaaaacgatgggcctagacttcatatttatgtctcatgagtcatgagctgatattgtagccctaacagtgtccactaccaaactatgtaaatcttttttcttttcttttttggaaaaaaaaaaaactatgcaaatctattttggatcatatcttaatcttattcttagcgtttataattgaacaaaaaaatcaaaccttcatgatcaaatcaatcaaatcaaataaatgtatgaagaagatgccaaagaacgtattattattattattattattattattattattaataagccagttcaattattattaataagccagttcatgatttatttctgaaaatcattttccaccatgcattagtgcatggctgttcttgagaagattttatttttattttttcatatttaaaaatccttacagcttctaattatctaagtttcttctggttgttataattagatattgacggaccaatcacacctaacctagttgtatggtgtgttccaatttatgccatgtttattattttttttaaggtataatttgtgagtttatttggtttttctttttgtacacttttttttgtaaatgtgttattggccattgaagaataagattattatatatattatttgtgaaatataggatattttatactattgtgatattcctaagtgtaacatctactaataaaacagattattgttatttaagcacattaaggtgtctaatgtgtcactttataaataattaataattctttatatgaatatgaattactaaattaaaatatataggatctaattttctctcaaatatataggatttaatattaaatataatatttttatataatgaacaacaaaacaaccaaccaattaattaaaactatgataaatcatctttaaaataaaataaacacagagtgttaaatctagaaataacaataatgattcatacacattaatttgtttcttttagttcatatataataacgtaaaattatatatataggttttcccttctcccccatgagttttggtatcacatgtagtgcattttgtgtctatattaataaaatattctaacttatacacaagtaaaagcactcacagcatttaatccaaactgtgca

SEQ ID NO: 164691 - DNA, 1172 bp, Cannabis sativa
  modified_base (1139)..(1144): a, c, t, g, unknown or other
atatatatatatagcaagtaacacacttcggatagtttaacattaaaatagtggtcaagtatttaaatggaacaaatatacaattcggataatttagcagctacattaattttttttaaaaaaaaaaatgtatataactattttatctgaccaaaaaaaccataaaatttgagtaatttaacggaaattaaccctatgtcatataactattatgttttttatgaatttagagaatatccggggtcttatatgaatcaaaatagactaacacaaacacaattatgtatttttttttcaatgtatttgtatatctgtgaccgaatcaaatacaaatgtatcaaatatttgatgtatacagatttacataaaggtcaaagaaaccaatgtggaccatttcttattgatggccttaatggtaagactttaacatgaaaagtggggctaacatattgaatattattatgtttgccaattgccaattggcattaagtattaaccacttcaccctcttcatcttcattcatggcctcacttctcctccctttctcactatatagagatattaatgttagatattagcaacaaaattacttgaattatacaatttgtaatatttaaccacgcaacttaatttttttcagcaaaattactaaaatctcacttctattgtactatttactcttttgtccagatatctcacttaaatgccatggtgacatcctacaatatactctaatgtacacgtgacagatttttaatagttcacgtaattttaattttaaattttataaaaaataatttaaaaattatataaataaaataataattaaataaataaattttattttttcttttctttttttttttgttttgttttctttttctttgcttcttcgtctctctctgaatgaagcctgacgtctcaaaaccaaaaagttgttccagccagcgacgacctctaaaagtgttctagctagcgacgacccctaataccaaaaagctcgaacccctctttctctctttctcgccatatctctctcaggcaccctctcactctctctcgatctctccttctttcccgccttgtgtcatcacgacccaagtctaatgagttgactgttgggaatattttactaggnnnnnnatttactaacaagtatgttcaattaaca

SEQ ID NO: 164692 - DNA, 916 bp, Cannabis sativa
ttttacaattgtgttccttaacaaataatagaaaaatgtaatattgtaattaaaaaaattgtattaaaattagctaccaagccataatctcatgaatgatgcaaatattatttttgacaaatttttaacattttatggtcaattattctttttaaatatttttacaaaatcttatttttttttttaatttcacagttttttttatgtttttaattacaatttttttttgcagtgttttataaaaataacatgaaaattatgtaaaaataagatttttttttttcataaatataggaaaaaaaattagagtttactttaatatgacataaataaataagagtaatgcaaggaaaatatataggaataaaaaataatcaaagtttgaaatatgggaaatcaaacaaaagaccataaataaaagttgataaaacttttaatagcaaatatcgttggagaagacacagtcactaacactggaaatgttaccgttcctggaaaagtcaccaacgatgtcatcatcgtcggaagagtcactggagttagatgtctcaaatataaattaaaataaaatcgattctataacataatgaataaaaacaaataacacagaataactcaaaccggtaataattaaaatagaaccggttctataattcaatgaataaaaataaaagaaatttgtggcataaataccttatgttttcgattttatatacttaaataccatatcatttttttggcagattaaataccaaatgttagtttccatccatttccgttactactgttttgttaaatgctcactatgattattaaagtgacacatgtcaatatataacaagtccaacctcttttttaattaaaatttatataatctaatttaaaagggaaaaaaacaaaaaaatacaaaaaagga

SEQ ID NO: 164693 - DNA, 2133 bp, Cannabis sativa
tcaaattgtaaagttctaaatccatggtccttttgaacaatctgatttagatgaatatctaaggcttgacttctcctttctcacctccctttgcctttaggaatctcctatttttcttttgagaaaatatattgtttctctataagcatgttagacttagttataacattttactataaaatgttactataataaaaatattcccatgtagaacaaaaaaagtgggacttgaaattgtacctatgttcatttctggtgatcccgagagagataccgtcaagcaagttgctgaatatgtcaaaggtgctttttctttccatatatatatatgaatgttcactgtttattcttatctaattagttaatgtttttgtcatataatttcttattttcttccactaccagagttccatccaaagctaatagggttaacaagagatccggagtgttgctcgtgcatatggagtctactatatgaagacagcagaggaggatttggttatcttgaattgatcattccataatcatgtatgcctcctccttcattccattttcttcaatgaaattttttttgttgaattccttaccaacttgcttatttgcctgctcatgattatgtaattgtattttcctaattatctcttttaaccaaatgacattcctaccataatcgtgatgggttcataagtccttgatcatataaataaggctgcaaaattttacatacatagtattgttctctttatattctaaaagttgacactgcctatttctattgccgcttcgatcttctttctttctttctttctttccatttttttgatttctcttgtgtcctctaatatgtgtatgcgtgtacattttttgtagatacttgatgagtcctaacatgcagtttatgaaagaataacgatgatgattcacttaatgatggtataataaaggagataaagaactacaagaagtagaatccagttttgttcttaacgacagacagaaagtgcctttgggaattattcaattttttaaaattgaattacataacacattttaacattttttgtattatgtatttactattacataaaatcataattattttaaattttgataatggagacaaggaaaattgtaaaaattacatgaaaatttgtaattttcccttacctacatttatgctctattttataaccgacgcaataggtgaagaaaagtatttcaacaatttatgtgtcttttttgaatcgacggtataagtcttttcgtgacagtttggaaataccacaaaaaaatttgcgtcatttctaaaccgacgtgtagaagataaaaaaaagagtgcatattttgtgtcgatttttaaataaagataatttttttttgcgtcattttaaaaatgaccctaataaaaaactatttacgactacggtatatacgtcagttttctaaaccgacataaattctttaaatgacacttaaaaactggcaggaattatctttttgtagtagtgtttctgtaaagtctttttttttttggtaagttagatgccaaaatattttttactttatggtaagaattatttgcattcataaccgattttcttaccttgtttattcggcttttattgctcttttctatgttaggaaagatgcatttttcagctaaacaattcttgtatggaaacttcttgtaagataagcaattctcttatgaaaagttggtttttaaaggaaactttgattattgcctttttccttgttaagttcgattttgtcttgattatatcagatcatattcgctgtttatagcaggtatcaagacccaatacaagatcagactcgtttatggcaagttttcttttctggtctgatttgctgcgtcagattccgattctgatgctgcagatcgagtttttcttaggaaagttttgtacagctgtagattcgatcttgtggctgtctctagggtttctacgttctataaagagaacctagagagtagccattcgaatcaactcttctagtatttatttttttgcttttttcttatttgtgtgaagagagcttttgttatgtgagaacctagttgttcatctaggttctagtgttttatatatatcagttcttactctatcc

SEQ ID NO: 164694 - DNA, 1370 bp, Cannabis sativa
tccatgatataatcctccaaaacgaagtttgttctagaacctctgtggtttgtccatgcactgttgataaaagttgtgacatatgttgagagaatgatacccttctgacgaaatttcaatggaaagaatagcgtcagctcctctgcatatggacgctgcatctatatgctgcatataaaagttaggggaaacagcttgacaaccaaatactataagccattcctacagtgtcaacatcttccaaaagaacgattgaccataatcacagttttcgaatcccaaagtcgatggttgggaatgagtctagaacatcactttcagaaagtatccaacaatcgttcatctagtgcagccaggggatcaaacgtcgaagaagggctctattttttcttcatctctgggtagtctttaaaccaagtaggggtatttctcttcctcttaccaaactcgacccctctaggtggtgcttctaaagccgaaatgtcaccctgtgactagttgtcacctatagagataatagctgtatcgatagaggtagctggagcatcctcatagggatcatacccatcaagaaagacctcatcatctccacccataacagatggtgagagtgatgcagctactgatggccctggtgctacatctaccgttagcgtacaatgcataaagctcaatatagttttgagctgctccataatgaggttttgaccacccttcagctctatatgtctatcctaatatgcctcctttagttcgacatgacaagcgtaaagacactttcgctcaacctcgatcatgtctaacctctccattaattctctatactcgacaccaccaaggcctgaagatgatgcagtgggctgagggtctgaagtagtgacctgataaaatatatactaaaagaatacaataagcatacggtaatataacaaattatttagataattaccgacatatgtcgataacatgtcgacatactatcgacaatatcttaaaaaataaaaaatcaaataattatcgataaccaatcgacaacatgtaataccatcgaaaaaacctttaaaaataaaaaaccaaataaatgtcaacaacttatcgacaacatgtcgacataccattgagcaaaaaaacaatgtcaataaacaatcgacaacatatcgacatacaatcgacaatatctttaaaagtaaaaacacaaacaaatgtcgacgacctatcaacaaactattgatatcatatcgacaatatgtggaaaaaaaaacacaataaattaataggtaaatagtgctataagtacctaaagttttgagtttgtaagcggcataaacccaatgattttttttagtggcataagtactcaatgtttgtaa

SEQ ID NO: 164695 - DNA, 1963 bp, Cannabis sativa
  modified_base (453)..(458): a, c, t, g, unknown or other
ggattaaatcaggggcgtacatgtatcccgttatttaccctaatagagtggggattaatggaatcacgagtttgttgagcttaggtattttcaacgccattttttgaggttgggaactaatctccagcaaacctaagttttttgagacttttgctataattttcccattattttttagtatatttagctatagcgttaattatgaactatctatttttattgtgttacattaaaaaattaatgataaagttattatttttttgtacttgtaataaaaatattaaattttccatcaagtttgagcacaatgctaaaaattaatgtaaatatatcacaaagtaatttttccaaatatagtataatttttacatctcccattggagatgttcttcaaaacatgaaaacttatgtataattaaaaaaaacttaaaattctaatcgaagttaataaannnnnntacatattaataacgaaaatattaaggggcacaataaggtaccaagcaccacaaaaggtatacaataccgttattagtgcattataatatcagctcccaacaattttaatttaataaatgatttggaaaaatactaaccaattattaggtaccacatcggtatagtattgagcaccttacagggtcacataacaataatagtactaaaaattatttatcaaaaaaaatatttcaacgatcattcataacaaaaaaacaaaataattaaaaaaacaaaaaaataaataaattttgcatcaaattttgtaattgtgcgttggagcataatgctataaattgatgcaatatatcacaaagtcttttttatgtctaaatatagtacaatttttacatcttcaattggagatgttcttgcaaatcaacttatatataattaagaaagatcaaaattctaaccgtagttagtaaagatatgtattaataatagaaatattaagagacacattaaggttgtcgataagaataatagccaagtgacttggagtctaataaatactaattaatcattggtagtgaggttagaataataaataaataaataaatggtaaggaggttagaataataaataaataataagaacacatgatttatagaggttcgaccaccttgtatatgggtaatgacctactctcctttagttgtattacttgtgagataatactgggcaaataaccaaggaagataaagtgatttctagctacgactctcaaagtgtttacaaaggatatctttcaacaaagtgctcttagatatgtaaatacaagtatcactcttagtttttcgggcccctcccgttatgaatgccttcactatttatagggggagaggtgttacatttggctatgtaaaaaggagtaaatgattataaatatccctatattttagcttgtagttacaatttgttgaaccttctttatacttggatagatttactggatccaagtttgtaggatttagttatagatatttaaagaagcttgttgaagataagataaaggatcacattatctctgtcaagtatccctagaagtgcaagatctggctgacatgttggtcattcggtcaggtctcttgacacttgtctcctttatgagattggcttgtagaatcatctttgcagggtgtttctcccatcttatctgtccgacaggtggatgactcagccagatgcttcatgggatatctgcaacctatggttgctactctttatacaaacctggcaggcatatttttgcccagaggttctctgctaggtcaaagagatagctggatcatgccacgtggaaggaccccttccgctgtgcaaactttgggaaaatattttccccttaaattcctcgtacaaacatctatacgaatggggacttttgatacctgtaggggtgctggcaggcatgtgggcttcacgtgcttagtaccttgaccattaattgtcagctctcat

SEQ ID NO: 164696 - DNA, 663 bp, Cannabis sativa
aaaaaaaaaaaaggaagaagaataacactcaagaacacacactagacttgactaaagtttatggacatttgtcctaaaagtcatttcattcctcacatatatatttagagaaagtccaaaaatatttttagggcccgtttggtacgcaggactggactagactagatagactaatttgtccagtccagggcatttttgaagtcggaataactaatccaactaatgtcatttgtctagattattggtgggtgggataaataatcccatacatgtgagattttttttttatcattttttttttaattttgattttgttaatatattttaaatttaataagaatttaaatgaaagaattattacacatttatttatacattttttttatcaaaaacgtattcattgtaatgagtgaaaatgtataattttgaaacatcatacataagctttcaaaatttaaaataatattcattaaacaatagttacttaaattgattctaagaaaaataatatgataataaaattacatattatttttaaattactagaaaatctgtatcaatattttaaaaaactaatatttgtattaaataagtgtttaacataaataattttatattattcaagtatttttattttaatattttaattagttattaaataaa

SEQ ID NO: 164697 - DNA, 732 bp, Cannabis sativa
  modified_base (667)..(687): a, c, t, g, unknown or other
tcataagttatttagttgaaaatggtgttttttataaatagtttggttaacctatttttatttaatatcaatcttcatattatctattaatataaatttcatttactttaaagagaaaggtatatattaattttaaaattaataagggaactttccctcgtagattcatatataatcaaaatttcatatatattttacttcgagagacagacacacttgttttggtgcggggttatagctcgaataaaaaaataaataatttgtggtgtaaatatttaaattttacttttcagttacagataaatatttaagtttaattttttaggtaataatatttaagttataattttaaatttttggtaattgtctagctattaagtgtcaagtcaataaccacgtagataatgatcaattaacagttaacagtcagatacctacagaagtttcaaaaatataacttaagtattattatattaaaaaattaaacttaagtatttacaccgcaaattactctaaaatatatattttaaaaaattgaacattttctttttaaataaataatttaacaacaaaataataaaaagcttccacaaaaaaattataattttatttaaataaataattttacacttactatgggactttaaaagttcttatgataaatatnnnnnnnnnnnnnnnnnnnnntttatatggtatttttttgtttttaggtctttttatggtatttga

SEQ ID NO: 164698 - DNA, 1721 bp, Cannabis sativa
gattactcgttcaatgtccacctcatgatagaactgaaagatgtagtggttatggctaagctctttaacataaacacctcatcctggttgccaaagggaagccattttgttttgcatcacctgaagatctatgttatgtttcgtgagaaaacgtccaaccaaacaccatcgatcatcaaactcggacaactcagggtcttcatcgtcatataccaacctgcccttgggagcctcttccatccgaacatcattttactctttctccataacaataagatcagtaaaaaaaacacaaggaccaacaagcaaaataatcttctcagacaaaaatacctactcatcacaccatgtcaaatgacaagactccttttccaatttcttttatttttaattagtcacgaatcataaaataatgaaataaagatatgtttgattaattgaggtgatatttggtttggtgtaatgaaaaaataatagtaatggtaatactaataaaataagtacaataatagtaattaatgataatatttggtttgttgttggaatgagtactataaccaaaattatgattataattattgtgcttaatttggtgtgaaaatgtaatggaataaaaatatatatttactaaaatatctattacttttgtttttataattataaaatatttaagttttattttattataatatcatttgtaatagagtataatcgtaatgacaagtattttactttatacaatgtaaattatgtaataactatcacaatataatgaattactaaattttaaaatggaaaacaaagaaatagacatataattaattttcattcctataaactaaacatccccttaattacactaagaaacaaataataatttatttaacattgaaattcttacaccaaaaatctgatttgcacaatttattacagatttacccctacacgcctacatcaacatttttacttatcctctttcttttattacaattatacaacttacacatcatttccatgcacagacacgtgtgccatccccatcatacatcaatcaacttccactttcttccctctcttttttccttttcttttcatttgatttttgattttctttcagttttttttgtttggaaaatcaatagcctccattgttgaagcataactacccattattcatcacggttttttccctctcatttttgttcttccaaaattttttatctcccactcaacccacgattcctcacgtcttttccctctcagtttattcttatttccaatttctttataaaatggccatcactcgttcatcctcatctccttccccaattttgaaaaaaaattcgaaaatgggcttgaaatctctagctaacaaagcaaagggtaaacgttcgattgttgaagagaaggattctgattttgctcctcctttaaccaagcgtgggaggccacatgctaagaagaaatcgaagctcagtgtggaggagcaaatggttgaagaaatttctggtaaaaaagctagtgttgctgccgaagttcgaacagaggttggttttcagtttcatttttgtttccccctttttgaacattttagtgtatttccaaattttgcgtttttatgttcattctactttgtgaaattttagggtttcctttttaaaatttcgtttgatgttgtttaattttttaagtctttattttggttttgagcaatttatttt

SEQ ID NO: 164699 - DNA, 3125 bp, Cannabis sativa
ttggcatattcaagacattgtttattaaatatatatatgtttggaaacaaaaaccttcctttgttgatgaggttcatgtattggcatttacaactcttgatcattggagaaaagctcaagataaaacttatttatcatctacgcttcttagaaatgtagataatcaaattgagctctgggttctactgactacagaaaaaatcaagatcaatatcaatccagccttgttcgagaaggaaaactcatatgggtttggtattgtggctcgtgaccatcttgctcgccccattcacatcaaggcaagtaccatggaggcctttacccaacaaaagttgttgaagcaatgggtatcaaagaagctcttagttggaccagttctaagcagtggaaaggtgttgagattgagactgatagtatgctcgctgttcaacatattcgttctacccaacaattgtcttctgtctttagtttgattgttaacgattgtagaactcttttgtcttctctttctaatgttcaattacgttttgttagacgatcagtaaattgaatttctcactatgttgttaggcacgctcgatatttatctgatcatagcattcttaggcataatattccctatgatatttagactattatgtattcagaatgctaatttaatgaagttgcaatttcacgtaaaaaaaacttagaaccaaattaaatttcacgtgaggcgacccacttaatttgcatgtggcttcgccggtgatgacatgccatgtgctattgtaacaatccatatgtttgagtggccttttgtcttgtactcgagttgttagactttatctttagtttctaaacttttgtttaatttcttgtccatttacaagccttacacaagccataacatagctgggactacatatgaatatatatatatactaggcaccgaaaacgtgtcataggcacgtaatccctgttaaaatttgtaggttgtaattatatttgttattttcactaattatgtttaaataattattaaaaaaaaaggagtgctaccgtcaaccccatagtcaacccagagtcgaccatagacataggggggctaggccagtgcctagggcccaccccttttgggggtccaaaataaaaaaaaaaatattaggcttttatttaagtaaaattaagtgtattgtgaacaacaaatattcatagcttagttggttaaggtgtatgacatattatacaatgtcatgggttcaaatcccataatactctttttcaatattttttttatatatatattttggagggccccaaaatcaaatttacctcaggcccatatattctcagagccagccctaagtcaacctccacgcttaaaggcacatgctggaatatttttttcacgatggtgttcgttatgcttacaacatcatccttgtaaattgttgaaaaatttcgaatagtttacagtgttaaaaatacgtttgaagttttttgaacacgagtcgtaaactggaatattaggaactctgttttcggcactgtaaactattcaaaaaattttaaaaatttataaggatgatactgtaactattacgaatatcgctatgaaaaaaatattctgacatgtgatttcgaacgtagaggttgactaaggaggttgtaattaacactcctcttaaaaaaataatgtttaaataaaaatatagtgtagtataagttcatttattgaagctaatatcatcattcttgtataaatgtaagcccatgtgatttgttatatatgtaaaaaaaatttacaccaagttttgtaattatatattggagcataatgctaaaagttgatgcaaatgtatcacaagtcattttttttgccaaatgcaatacaatttttacatatcccattaaagatgttcttccaactttcatataatactaacaaaaaattgaattctaatcgaaattaataaaaatatgtatataataataacaaaaatattaaagatacattaaggtacgaagcactacaaaaaataccatcattttatattaatttgatgttatcaattattaaagcactaaaaatatctaatttaataataaaaaaatatgtagcaatattgcatattacaagagtgtaggcatccgataacatcattttatttttatcaattatatttaaataaagataaataaaatatctaattaaattagcaaattaaatgtaaaaaaaaaattaaaattctaattacaattactaaaaatatgtacatattaataataaaaatattaagatagcatatcgttattggtcacaaattttaatttagtaaataatttagaaaaatgctaactaattattggttaccacgtcagtatggtattgagcatcttaaaatttcacatagctatgatagacaaaaaaatcatttaccaaaaaaataaaacaaaaattattcataaaaaataattaaaaaaattactaatcaattattgggtaccacactcatatagcagtacattaagagtaccaatagcaagtacaaaaaagcattgtaaaaaaataaaattaaaaaaaacataaaagattaaaaaaataataaatagtaattaaatattataaaaaattactaactaattagtaattatttacaaaaaataatagtaaatagtaaaaaaattattcatacaaaagaaaaaaacacaaaagacaaaaaaatataaactaattaattatcgagtatcataccgatatgacatttagtacattaagagtaccaatagtaagtaaaaaaaaccatatactaaaaaatagaattaaaataattttaaaaatatacgaaaaaaatggtactatatcgacatagcattaagcacatttttgatatgacattaaacacattaaaagtataccaataacaagtataaacaattatttatcgaaaaataaaattaaaataaaagaaaatataattaaaaaaagataattataaaaaaatattaaaatataaaaaacaaactttaaattaaaaaaaatcacaaaagaacaagtcatattcatccttgttatagatataaaaataatattataataatataataatataatattaataataatattaataaaaacttta

SEQ ID NO: 164700 - DNA, 647 bp, Cannabis sativa
tcaacatgtttataactttataattataagaaagaataacaaaaaaacaaattaaatcagagagagacagagacataataatcattaattagatcataattttttgctttataattgatatataagaattcttttctagtattcatgtacatataaatgtgacatttgaaataaaataattataacttcagtttgaaaataactaaaattttattagtcataataatacgtgcattttcaaggtaaaggaatcttaaaatttcttcaactagttatgataaattttgtaaaataaagaaatgttatttttttttttttaaaaatttttgttcaagtatggaggatactaaaatgtaaagagtttgaaacagtatttttattgatttatttattcgttttttttctttgaataaaaagacaatatataatacaattacttaatgaaataattacataaaatattaatttttgtaatttttttttttaaatttttacgttcaattttttttatggtattttgtaaaaatataaaaaagctacatgaaagtaacaagaaaataaaatcaaaacaacataaaaaatacaccaaaagaccgtattttatgtaagtaaaatttaaaaaactataacatccccgcttcaagcct

SEQ ID NO: 164701 - DNA, 1704 bp, Cannabis sativa
taacaatatctttatattgtgaataatgttatctcattacataacttaccctcaacagatccaatccatcgttgtccaagttaggaacaaccttggtcaaactttgagcgctccactggggatattcatgccagttcattagcttgcttactcctggccacatttcctcgttcggagttcctaataacctgtatgaaaatcaaataaaaagacaagcaagtaaaaaataaacgacaaggtataaataataacatcaaactattacataaagccaatactcaagggagagtacaacgaacttgaatatgtgtaggagttgctgaagctctgaatcacctgggaagagtgcttgtgtggtgactagctcagctataaggtaataaaaggagagatgagtttaaagacataaaatgtggaggaaaaaaaatgagagaagggaacagaagagctaatcctaaccaaatatgcaaccaatagaccacatatccactccagttgagtaatgagtggcccccagaaggacttcaggagctctgtaccagagagtcaatatctgcaacaacaatccaaaagtcttttatcatcaaggacataattaatgagtagaaatagtgaataataataataatatacctcgtgagtatacttcttaagtggaacagtgaaggctcgagctaacccaagatctgcaattttaagcatcagtgtcttcggatccatgaggatattgtgtggcttaagatccctgcaaagacaaatgtgagtacactcaaagttctgaaaagagaataatgaaagatatgaagaaagagatggattttgacctgtgtaagatcccgtgaccatggcagtaggctacacctttgcaaagctggaacatcagagtctgcaaaagcacaagttcatttctactgaatgaaaccacacaatacatcaaaacaatagggaaatgattattactttgacggtatcgagagggactttctccggagtttgacgaaatgaacgaatgaatttcttcagatcagtctccagatactcaaacaccaaatacagaactgttttcccttccttattaaacccttgtttcacatccagtaacctaaattcaattcaaacaactgaaaatcaaaaaccttatttcttaaaagaagaaaagaaaaaaagaagtttacctgacgacatgagtatccctggagagcattcgcaagatggagatctcacggagagtagtgggaggaacaccttcttcgtcctcatggagacgggttttcttgagagcgacgatctttccagtatccttctctcgagctctataaacctttccataagttccttctccaaccttctccagcttctcgaaagcttccatggccgatagagtgggtgttgcctccggtgattccatcctcagattcttggaacagtataccgatcgatagaaacgcaagagagagagagagactctttcacttcttacagcaaatgaaattgggaatttgggagggatttttgaaattcaaatatgggtcagagagcctctcctacttttgttttcccaaaaagcccctcagctatacctttaatttcaattgggcctagctcttagcgattggaggcccaacattggcccattcactctcattcaacatcttattttgtgattcaaaaattgtgttttttaaaaatgtgttttggaaacaa

SEQ ID NO: 164702 - DNA, 2209 bp, Cannabis sativa
gattctttgaccttatggctactattatgaacttaaaaaatgagctagtggagctctccttttgtaggtgaaggtggtcctatttaggttatttttgaccgtagattatgatctaacagtgaaaattaacttttgatgttgattgtcaattttcccaattcgagttgcgctggcgggatctgcttcgggtaagttgtagtttaaacttctaactcccttggaggtgaaatttggagactatagcttcctattgaaattgaagtgtgagacacgacttgatctagcttcaaaatgcaagttgaatcgcgtcaatcaaatcaatattgagtgagttatggctattttattgaaggttgttttggatccaacgcccaagatgacatcccaatgcctaggttggcatccagctccagcttgacatcggacaatgggtgagtggaaaaacgcattgggaatgtgtttttcgatgcttaactgatattttgacatcacttagtccatttctgtgttttggcgaagctggtcaccagttcttgaagatgttgttctgcagaactggatgactcaaaattgtccagtttttgagtaaatcaccttgtcaaaaaactaaaaaatatgaagttgtgaatttaactcttctaacttcatggctctcagttattatgaaaaactagacacacagttgagacgaaatctgaactggataagcagaatacagcgcaccaggccatttgtcaacatgagcactgggtgcttatttttgagcttctacgatgtcgttttggcacttccaaggttcttgattttgaggacaaggtctcctgtcctatttttgacaatttcaaagataaagcttgaagcagaattgacatttggggtgatcaaaatcagcgcactaggttgattgtcaacttgggcaccgggcctagtgccaggtgaacctgggcgctgggctcagttttgatgctcttaggattgtggttttctccctaaatttgcttgtatattcattatttctgatgacgaaaaaaatgctcggaccactttttaaaaaaacttgattggaaatggcctaggttgacaatatgtcaacctaggcgttaagcccagggtgaacatgggccccgggtctagtttcaagcctcctgtaagtttcgcttggtccttagaaatagttgaatcttaatatgctgaaaaatagtgaatatgcccggaagacttctcgaaaaaactccttggaattggcctaggttgacaaaatgtcaacctgggcactggtcccttgctttggcacctaggatgtgttatttcttccttgcagaaagaacttgtatccctgtttttaatgatgaagaagagatgcacgagttggattttcattctgatgcttggaagtggcccaggttgatagattgttaacctaggcaccagggtgtccgagtgctcaaaaatgaaagttcactgaatctgattctgatacctcaaatatgttcatggtatgtgtagttcatgtcctaatgaaaattttgacccatttgtactaagatattcctagaaactgaaaccctagttggtgttccaacttgggcgctgatgaaaccctaggtgcctaggttgattttcgaggtgctaatccatgtattttcagttcccagggcctgggcttggttgctccatatcttcatggtacaaaatattgaaagatagttagttggaaatgacttatcaaaattcgaacacccattccggagttcccagagtcaacccgggtgcagggctgggaaccccttccaggtcgaccgctatggctcgaaactactcaactctgagatgttatttttcttgccacgtgtcaaacattgatgtccatcatcaccagggaaagttttcgagttaacatttccttccaagtcaacttcacacttatgtggggttgacttgatgacgtgaactgagcctgtttctctcgaaactaccatatgggcatcaattttgacaatcttggacgattgtttctgttcttcaagcattcccaatagaattaggaattttaattcgcttatgcttgcacttgggattttttttgaaaattaattgttaagctaagaaaaagaggaaaaacttatcttttttcacttatcttttatatttttctttgaaaacttaaaattttcatgtatttctcatagcattaagattaattggattt

SEQ ID NO: 164703 - DNA, 2832 bp, Cannabis sativa
atatattttacattgtgatttttccttcaagctatggtataaactagtcaaatgagtttagcctgcgatggggtattcctgctcaattatggagaatcgcaaggataaaaaggttctttgggtggctctaccttggtggttatagctcaaaagaaagaaagactcttttcgaaggtcagaacagtgatgttaacagtcattgagcgaagatcaggatatgggtcacccttcgactgcataatgtgaaggatttcaaaaagatttcattctctagtttgaagagtggaatattattttgtaattattgatttctgttatgcctatttgctatctctttacactctctacactttctctaatctcaatcattctacactctcccctgacaaaaataaaaatttagggtgtgttctttaaaaaattgatttttaaatttttaaacatagaaattgaaatacatgttcaattttgttttttatttttgaaaacataaaaatgtgtttagtaatcatttttgttttcttctttaaaaataaaattcattaggtaattattatttttatttaaaaaaaaacacttatttttattttttgtttttatttgaggatagaaaaagtaaattgagtgaatattgtctaagaaaaaagtacaaaatatgattaaaaaaattatttaaaaaaattttgaaagaaacttattttggttttcaaaatttttttgattcttattttaaaaaattaaaaatgaaaacaattctacaaaacatgttttctttgatattttcattttttattgaaaaaaaaaaaaataaaaaactgtttaaataactgttaccaaatgctagagtaaacccgttgtaatgtctagttgttgaggctcttgcctatggtgggttgtaaattgtcaattgattaatgaaaaattcttttcaataaaaaaaactgttaccaaatgcacccttagtaacgcaaaaaaaaaaacagatgtttctcaaaaatattatccctattttataaaacaaaagaaagtgataatatcaaaaaaaacaaaagaatgtgatacccaaatggagccaaagaaattggcaattctgatactcgatacacgagtaaccctgtctgcacctcaattactttatgcaaatggcaaaacatgtagagatgtaatgatagatgaaatgtatacaaacacgcacccaataagaatgggaaaggaaaaataccaagttatgtgcacttccactcaaagtagcagcaaactccagaaatgagattaactccctctggagaatgtcaaccccgtaactctttgcctgattgtcaatgatatgagaagtagaataaacttcattcttggtcagagactcgttacatgtgcaagactttgcagaagcatcctcagaagttggtccgaaataaaaaaaactctcggaaaagataagttcccatattccttcttcccgaaatacatctaatgataaaggaaatgtaacaaggaccttcctgaatgcaactagaatacaatgctgcagagttttaataaagaccctgaaaatatttggaaaaaataataataataataagcctgggagtgagagacgaacccaggaatcagacagaaaaagttgaaagtgaacaaaacactatcttcaaaaacaaatgcatgtatccacaccaacaaaacatacatattcctacagaaaaacagtggagaataaaaattataaacaaaaggggactttcaccttaaatggatgggaagttcattttggtttgagcaagccttaaggtatgggaacactgtaagaagaaccctcattacccatttaattgaaagttcaccgtataatgaagatacaggagttgatgttcgaccagatgatatttggacatgatgagatccactatctcccggcacaaaaaggaaagaacagaatactctgctcaatttaacaacataatcactccaaagttgaggataagaaccagcaatttcgacagaaggttctgccatcagatttttcgaaagatccttacttccaaaattggaaaggtccatttgaataccactgtttcctgacaaatccttacctcggagactgtactcttggagcatgaaagcaggtgagcaaaagctatttgcaaatttttgaactctcccattttcacacaagaattgcaagttgctgatattggtgaagctaaatgttcgttaaggacaacaataattagaatttaacagacaacatacaaaagtttgagcaacagaaattgttgatccctttcgctgaaaaaggaaataaataaagagttaagaaatgaaaaatatagttcaaatgccgacaagcttgcaataatagatagcttacattcctatttattttttaaaagaaacatgtaacatcaatcaggaaacgctttttacagaaacactgccacaccctaatgaaattaaaaaaataaaattccttaaacgattttacattgtgttacaaaaaatgctgccacttttaaacaggtacatttctccctttattatatcaaaagaaaaaaaaaaaaaggaaaaagacatgcatcacttcctcaaaataccctaatacttaaaaaattagtaattataatggcttgacattctccaaagtaatcaaaatttggtggacaatggctagctaactaaaagcaatggtagaaaggaagaaaagaaatacttaacaataaggaaacgaaaacatgattcataataatgagagtgttctcacttagatctatattctctaccatagacaaagaatgcgatcatcccaaacagaaacttatttaaaaaaaaaaaaaa

SEQ ID NO: 164704 - DNA, 761 bp, Cannabis sativa
atgttaaagtgtgtaatcagttagaagttggttaagtgtctgttgctttctgttatgattcggttgttacagtttgttagtttgttaagtcttacagctgtatcttttcctttcattcagttagagattgcttctggtgtttgttgtatataatggttgtgttcagcctaatcaaagcaactctttcattcctctttgtcctctgtttcattctctttacttttctttgtttcctttctcctttttgatatgttgatcatgtctaagaagtttaacaaaccaccacctgcaatatatagatagaatagaccaacaagtaagcacacttgatatgcaagtgagtagcatgaattactcttatataatctgatgtataattctaactaatttttcgcagctacaagtatttgtgttggtgaccggtgaaactaatcttttaaccacacttaaagttctttatttagcccgctgtttatttagtattttgtcaaaccatctccaatacaatatttaaaaaatgataattacaaaatgtacaattttttataaatttttaagtttaattttttttttttatattttcatagtgttctaaaaaaataatactaaaataacgaaaaaattacataaataacatacaaataacagaaaatcaacaacaaattaacaagagtataatataaaaatacatccaaagattgtcagagtttacttgcatttggagaagtgctatgttcttttcagagcattggttaaagtaa

SEQ ID NO: 164705 - DNA, 4539 bp, Cannabis sativa
agtagagaaacctttctgtcgacagaggcttggtcaaaacatcagttgcttgatctagagaaggaacatatcgaacagaaatatctttgtttagaatttgatccctaacaaaatgaagatctatctctatgtgcttagaacgggcgtgaaaaacaggattcacagctaaagtcgtggcactttggttatcaacccaaataactggtatttgatctatagaaacctgaagctcctgcaacagtgatcgaagccatttgagttcagcagcagcatttgccaatgctctgaactcactttcagtactagatcgtgctacgacctattgtttcttggcagaccaacttatcaaattgtctccaaggaacactaaataccctccagttgagcgtcggtcatctaaacaactggcccagtcagcatccgaatacacattaagagtcatagcagaggatggtttgagccataatccatccttgacagtgccttttaagtatcgaagtaacttcttgcatgcctcccaatgagtggaagtagaagcatgaaggaactggctgagtttgttaatgataagtgctacttcaggacgagtgagagacaagtattgcagggcacctagggtgcttctgtaaagcttgatgtcatgaaacggttcaccttctgttaaggacaatttgacactcatgctggtaggattaggactagcttttgcaccctccatatgtagttttactaacaagtctgtgatgtatttggtttgagacaaatacatcccagtatgatcacgataaaactcaactcctaagaaatagtgaaccgagcctaagtctttcaaagagaaagacttattcagattagcaataagtcgtgagataagagttgcatttggtcctgtgattaatatgtcatcgacatataccaacaaaatcacaatagtatgacctgtcccatagacaaataaagagctatcagctcgagagccctgaaatccccaagagacgagtgtttgtctcaacttgtcattccaagctcgtggagcttgtttaaggccgtagatggctttttgtagcaaacaaacatgtgttggtttatctggatcttcgaaccctggaggctgagacatatatacaatttcattcaatggcccatttagaaaagcatttgtgacatccaactgagacacattccaattgtttgtgacagctagagataacactgttcatattgttgtaggtttaacaactggactaaatgtctcttcaaaatcaattccagcctcttgcaagtaaccctttgcaaccaatcttgacttatacctgtttaatgagccatctttgttgagtttgaccctgtgaatccatttgcaaccaatgacattcatggagggattatagggagcaagggtccaggttttggcctttttaagagcacaaagctcactgtccatggcaccatgccatttaggatttgcaagagcatcttttaaggatcttggttcagagggtagaagggattcgggtaatggatgtttggttgctatgtaggactttggtttggaaatgccattttgaagtctggtgcgcatgctatgagttcaggtagggactgggacagatacagattggtcaggaacaggtatagcattttaggattggtgatttgttgtttgtggttgatgagatggtgcattggttggacgggatgaatctgtgtggggagtattgatagggacatttgctgaagtgggaataggagggtcagatgctgcagggtggggttggtacacatctgtttggccattttgggaatgaggtgggacagtgggctcattttcattggttgcagtaggattgagaccaataggagttgtgttaggacagtgagtcatattaggagaagtaaaaaactgagcagatggaaagatagagggagaagttacctgtgtatttggtgcctttgagaaagctggaaaaacttgtgcattgaacacaacatgcctggcaatgaacaaccggccttgtgaattttcacacagaaatcctttatgtgaggaggagtagccaaggaatatacattgttgagttcgaaaatccattttatatctgttatatggtctgtggtgtggataacatgcacacccgaatggctggagtatagagtagtcaggtttttggcccagtaatgtctcgataggagtgctgtattgaagaacaggtgttggtaacctgttaatgagaaaaacagcagtgtggaaagcatgccaccagtagctaaagtctaagccagactgagcaagaatggtgagtcccatttcagtaatatgcctgtgtttgcgttcagcacgcccattttgttcactagtcttgggacatggatgttgaaagtggattccttggtcacttagaaaccttgaaaaaggtctgtattctcctccccagtcagcctgaactttcttgataggtagattgaattgtttctctaccatagctttgaatttgacaaaggtgtccagggcctgagacttttgtgtgagtgataaatccaggtgtatctactatagtcatcaacaaagtgaatgtagtagatgtatccatcattggatttgatatgagatggtccccatagatctgtatgtataagctcaaggggttgtagggctcttgattcagtgctataaaatggttgcttgtggcttttgccaagttggtaggcatggcaaaatgaaagttgttgtgtgttgcctttgtggggaatattggtaaggatcttctttaggacagtatgggatggatggccaagtttgtgatgccagatattgatgtcaagattggtactagactggaaaatagtaggactgtaggaaggtgaatgaaaagaattatctttattgataagagttgaattacaattgatgtcattggttacattggggaattgtaaatgactggtacaactcattacagtgggataatgaccactagacacacaacatggagacccttccttgtccgaattcttggagcattcttctagcacatagagaccatctttaagagttcccttgagcaataccttccctgtttgcttgtccttgacaaagcagcatgatttgtgaaattcaagaaacacaaaattatcattagttagttgagatacactaactaaattcttggtaattttagggagatgaagaacagaatttagtttgatggaattagaattgtggccagataaagaagctaaaccaatatttgaaatgaaaagcttcttaccgtctccaacagcaagtccttcaaatcctgggtaggcagtggctgagtcaagattggcaatgtcattagtaacatgatttgtagcccccgtgtctacaaaccagccagagtcatccccgaagtcaggaatgaaagatgtagcataagcttgaggatcatactcagcctcatattcagtcatgaaggctctgggagttgagttctgagaattcgtagaagctcctggtttgggggtaacccaagttttgtcgaacctgtaatgacacacaggtgtcgtgtggccatatcgaagacaaagctgacaaaggggtcagccagagggattttgactcctgtatggtggtttggcaccattcttgaagaactgagggggacgataggcattgtttcttgaaccagtaaaagctatgttggcttgaagtttcatggcctgatcagtaagtgagttgtggtgttcaagacgaatctcatgagagagtaacaacgcctgaacttcttcaaaggtgagagtgtcactgcgggtagtgatccttgagacgacaggatcgtactccggtccaagaccgttgagtagttgtaggatgagatcttgatccaaaatcggagatccagccactgcaagagagtcggcaatggcctggactttgtcgacatagtccgagatggattgtccgccttttcgaattgtgaaaaactgattcttgagttgaagcaggcgtgctttggattgactcgagaacttctgttcaagagcacgccagactgcatgagaggatgagaaacttgcaacagatgcaagaacaccttcggtcatggacgatcgaagccatggcagaaggagttgatcctttcgtttccactgatgatattctggatttggttctccggtgagaagatgttggaggggaggatttccagcaagtaagatctcatccagatcttgtccgatgacggtagggatcacctgagatttccatgagagaaaattagtacgatcaagctttacagtcaaacagaggttaaagaattagagaagggattccagttggattgcaattggtttggcctggcaggaactgaagttgtggtggcctgaacaggatcggaggaggtagactccattgatgacgctagtcgaaggtgactgataccatgtagagtttcagagtatgaaactttcagaaaacagagcaaagaaaacgagagagagaaatagagcaatacaaagcataaaccagaacttgtctttgttattattattgaaagtatt

SEQ ID NO: 164706 - DNA, 3348 bp, Cannabis sativa
  modified_base (3292)..(3298): a, c, t, g, unknown or other
ttactaactctaacagaaagaccaacttagtctcctttacaagctgtgttgttttttctcttctacaatattcatgcaggtaattgttgtggtattttaacacgtaagtatacgtatggttttaacaagtaatattcaggtaagtgagatcgttcccacgaggactgtagctaagtaccaatcaattaaattcttgtttctatttggcaatcgaatatataaattttgaaactaaataaactaagtacaaataaataaaacatacaaataagatgtttaacaatagatgcgaaattaggaatatgatttctattgtatctatatattatggtttaacatgattcaattcctattaccaaattctatgcaatagcaggtttgcttaagtaatatatagtattctcgaatatataaatctcaattacatgcaaattttctactctcgtgataaattaaatatgtaaaaggtattaacacataaaccctataagctatccaaaccatatatataggtattctcgtcttgacactcacttctcagatttcgcatcaaaatcataaatatttaattggtgatcagaaaattaaaaataattaagtatgaatgaaacagaatacatagaaattagagaaaaattagatcacattataaactataaatcaattaataatgtcaaacaatatccttctaaaccctaataaatagttagctactcatattcatggtagcaatttcacagatattacttcagaatagaataagaagaaaatagagaagaaaagaatgttgaaaaccccgttgaaaaagccttcgcgattgattttactctccgattttcatacttctgaattgcttgctaattaagaatttttgagttttttgagctctgaaaatgtactaaaaacactaataataatgtgtttttataggctaacaaagttacctaaaagatactaaaaagatttcaaatttaaacttaaaaaaaaaataaaagtcacaactctacttgaaaagctagctatcttttcttttgctattttttttatcctttttttttttccagaaatttcctactatgatgactgatagtatttggccacaactttctcgatattgctcggaattggacaattcaaaatgctgcagaaagttgaaagggagatctagaactttaattttttaacttttcctaaaatttgatcagatcatagtcgaatttatgcttaaagtttcagtttttttttttttgcacaattttctctaatttatagattttgttttgagatttgaccaatttatacattcgtagtgtcgaaacctaaaactgaagaaaacaagcataaaaatattctaaaaagtgacaatgaagaagaaaattaactctaaaaataacataaataataagctaacagtatcctaacagtaattaattcaaaacttctctataatttgattacaagttgtcttatgaatatctgtatttaatgaaatgttctttgaaagggaagatgtgaaatgaatatccataatctatgttttagtccacttctgacttgttctttgagatggctaacatactagcacgtaccatcactgtcttctgcatatctgaaacaatgtctgcattttcatctttcttgaatttgtaatccttcaagattggacaatcattcttcaggtgagatggtttgttgcagatgaaacatctcctttgaaacttggatttcgatttacctttccctgtgttgttctagtccttgttctccttctaggacccttttcctcgaatcaataattcatctccaacaccttcatcttacttcttttcttttctcttcaattcctttgacattataatgcatttcaaacttcctctaatatcaatgaatccttaccatatcatgttatccacaaagtgttcataattatctgtgggaagagaattcagcacaaggatggtctgatcctcatccctcaacattaattctaatgtttgcctagccgaggatcaccttattgaaatcatcaagatgattttcaatttcttttccttacatcatcctaaaagaggtttctacttaataaacaacctgtttgccaacgattttgtcgtgtaaagactttccagtttcaaccatatccctgcagttgagtcttccttcgacacttgaataactcagtcaccaagacttagaattatagcactatgttctttctcgagaatctttattttctctttctgggtgagaccttcaggcatacccttctctccccaaaaaagctattacataccttgttgaactagcaataatctcattttcatatgccacaaatcaaaatcgttctttcctgtaaacttttcaagatcaaactttgcatttctcattttcttgtttgatcaccaaaatcctgaacttacgagccaaaacaagattcctcttggaactccaagctctgataccacctgttgcaatgtgagctcgatcccacatgccaggaatgactccaagaacaatccgagaacactcacaactcacagaacataagcacatacacaaggcaaaagctttttgataaaattatttcttaattgtactgagtatttacaatgatgaatcaactactttatagttaagaagttagaggtatttatagactaaatacctctactaacagaatacttctatacttgagttaagactccagttgagattgagagattaatagatttaactgctaaacctgttaacaaataactacttaaataattgaccaaagatatatatgaatacgtatatagaacctaggcatacagatttaataatactaacaaagattggcaatttaaatagattttgtgtaatgttgtctacacttttctagaatggcgcttagcatcctttaccaacaaagaatatgaataggcaaagtatctaactttcaccaacgcgatctctgcaagtatagcttaccaaaagtgacctatgcaaacaccattttgaaatgctcgggcagaaactccaatatttcttgtagtgttagaattgaaaatgagttgtgtgaattggatttagtgagccaaattacttttaacaacattcaaagaatatatatatagtaattaaataagaaagtattttcttcatatattatataataaacgtaagcgaaaagcaaattaagaaatgaaaataccaaagatcaaacaagaacattagaacatgcaatgttaaacatacataggaaatatttataaggttggtttttgccccctcaactttgacatgtacnnnnnnntgccccctgaacttttaaggttgttgaaaatatcccctgaactattgaga

SEQ ID NO: 164707 - DNA, 573 bp, Cannabis sativa
caaaaaatcatacattgatgtgctgtccctaaatgagcattctgtgttgcttgttgagtttgtttgagaatttgattgtaaagctgtgtgatttagtcattggtgctaatatataaggatctcagtaaacaatcttatggtcattggtgctttagcacaatgtttttgtgccgaagttgaacttcagcaggatatttcctagtaatatagtcaccatgagtgaagtgaggctagttttgatgagcttagtttaccattactgttagagttgttgttttatgataaatatggtcactctatgtcaaagtaggatggcagaaatcactgaacaacctttcagacctcgtgagaagttaatcgagaagtaaaagtactttcaaaatccacaagtacacacaccttaaaggatcaatggataagatcatgtctggcaattccagtcgcagtcttgctttggcaagtacattgttgtatcttatcgtaagttgtgtaatttatttgtaacgccctaatgctaaggcaggctacagtactttgtcaattatagtgttgtctttgctaatcaaagaattt

SEQ ID NO: 164708 - DNA, 2365 bp, Cannabis sativa
ttgttttagcaggggctttcatctttttcgatgagaaaccacttattatatatgaagcgttggaattcagttgatgatttcaccatggaagatgttacaatattgctgaattgggttcaaattggaagtttagatatcaagtactggggtgaatgacttatgtttaagattgtgggacaagtgtggaagccaattcaggtggatagcatcacaaaaatgagagacaagttgcattaccctcgaatttttctagaggtttgtattgcttaggaattttcaaaattaattcattttacgaatctattgaataaagaaataacacttattgtggcttcctattgtgtgtaagtattgttcttgtatggggcatgagacagaagtttgtaggtcagccttgatggttaagaatatcagtaccagcccagtgccagttgtaataagctagaatctgaagaattcgattgttaggatatttgtgcttatatatttgagtctaacattttcctaataaccaactcttcttctttgattgaatcttctagtggagtcttgctctgctaggtcaaaaacgtttttatgtttttatgtgttgcaggtttcatggtgatgaacacttcaagaattgaagttagatttggacttgtgtagcttgaagggagttcagacttaatgttgaagggatttcggcaaaaaagaagtaagggaatcttggcttgttgtgtctaaagggacttagatattttatcttgattgtgtgtgaagattttagggtaaaacacttgtatgaatcatttcagttcactatttgttcagatgtattctaaactggtttttgtaattgtttgtgattcatagtgaaagttattttacctagttttggggaacccaaacaccactcggctgaaatgtgttttcggtgtaaggggaagcttgtatattgtggtgttcattgatttacttgttgcatattatttgttgttgaatactgcataacgtccccacttcacgcttccattgggccttccacaacggactaatgactcttatacactggtaagtcactcttgactgcttcctggaatgacgactgaccctttaaaccaacacgagtgtttccagcgtgatttgttctcactcgcacgcttcttgagaaaacttttcaggaggtcaccatcttgaagttactccaggtcaagcacgtgtaattgtggagttttttcatgatgagctattagaaaacaagatgcaacttgtggatataggtagtaccaatcaatccacttaagtcctcttttaactgtgtagttctatacctacacaatctcataatcatcacacttgaccttctccaggcgatgtggaactggacaacttacccggtatttctccttacggatcacgagactactgactatcacaaatacttttacataatctagtagctatcctttaggatcagactttcggttgcaatgaaatgattctaattacttctaaaagacaaagcttgtgagcacatgaagttttttataagtcaaatatggaaggagatgattacaactcttttttctcaaaatgttttgctcaacatggagatggatatgtttctcaaatggccaatcaaacaaactgtgtgtataaaataactattaacaatttgagtgatgaagtcgctttaagtataaattgtgagaatttattatctatgacttaaataaatcaccttgagataaaaaaaagttatcattacaaagaatttttattatcttttgggtaatgaaaatggtaaatttattaagagcattagtactataaggtatcagtggtatttagcactacttagatgtagcacattgtataattgcttagcgatattctataaaagttattatactaaattatatgagacctgatacttaaatgtaccaatggcaataagatatgctgaagagtgctagacaatattgtggacattgtcccacataataaatggtaaaatattgagccatatatataggaataatatggactacttcacttatcaccaattgattttaagatagaatctcatgattctcaacatggtataagagtcatatatctcttgcaggcatgtgatcctatcagatagtattcaagacttgtgaacaaaaaactatcagtgaggttattaaatagtttgtggtgaaataaatttgtagttaagatgaaaaaaaatagtgtgatgtgtaaaatctcataaagctctcatgaccactcaaaattatttttattatagggattatttcacaaatacaaaaaaataattaaaaatgttataaaaatatagttgtacgaaattttaaatattttacgatttttatga

SEQ ID NO: 164709 - DNA, 1493 bp, Cannabis sativa
tcatgagcagttgtatttgaattagtctcaacaaaaggtaactgtcaatttatattcctataaatagaagcagattgcatagaaaggaagacgacaaatttgagagaaaattactattattaaaattcagagattgtattttgtactcaatagatattcctaataaaaaagatagactcgtgaaatatgtagattttaactacaaaaccaaacaaaaatatttggtgttatcttatcatttattacttatatatatatatatttatgtagagaatttattgcgtaaaggctattttattttagttaacaaaaatctgcgttaacaatttggtactttcattgagagtattggtgataaaactaaaaaaaaatcccttaaaaatagaaatttgtccatatttaatggctgataacaatcaaatcggtagaaatcgccttaaagaaacaactccatcgccttggaaaatagccaatgggatctcaaaaatcccataccactgaaacaccacgttcaaggaggaacaatggtggtggtgatcaaattcgtgaaagaaggaatgaagatcccaataattctgccaaatacgtgcctaggagtggggatgcttattacccaaccaggtatgtaccatttgtagagttggagaataggcaacttcaacaacgtttagctgaatctaactgacaaaacgttgagtgagagagagagaggctgcagcggccagggcggcacaaggaacaattcctcataatcaacctgatcctgcaataagaagaccacgagaacgacctcgaagttctagaaccaggagacagaaaacaaactaaggaaattcccaaaacacccaggaagaacctagggatacaagggatgtcccaatggataatcaaacaaataatcaagagcaacgacgagatacggtttgatttaaaaaaaaaaaatagccttaacccgcaccgcccgccccgcaaacactcatagtccaacccaacctaatattatttcttcctttatttttttttttacatttttaagtattttttaacaaaaatacgtattattatctttttttgttattttttttttttaaaaaaaaacattattttaacattattgctatgggaaaacaacgcaattttttttacaacaatacgaagtttttttttttttttttttttctgttatctcataacaacattgtttttactaggcaagcctaattttcatgttgatcctacaagaaagcaatgtttttctttagaaaaaacaatttaaaacatgtaaaaaattagaattcataaaaatattaataaaaaatgtgtaaatatatatatatatataaaatgtatctatttttaagtgtaatgtataaatttctctcatttttgtcagaaaaaaaaatgtatatatatacacgtaatcttctttaagggcccgtttggtacgcaggattggactggattggattgaaaatgattggactggactggac

SEQ ID NO: 164710 - DNA, 1029 bp, Cannabis sativa
gttcattttagggtgttttgtaaaaagataatttcaaatgagcttaacaaatctttttatagtcttaggccattttgaaatgtgaaaaaaaaaactctcttttaagtaaattgctctcggttgttcaattatttgataatcagagtcattctttgataaatgattgagtcaaacttaatagaatttgatcaatcattttctctgtcgttaaggcaaagaactgaatttagacggttttgcgaaattgattaaaactaaaaatatgtgcaaattattcaaactagtatgtaggagaatgcattatagccaaaacaagagctaataagagtttgttgttgtatattattattattttaatattcccacacattatattttaaatctaattataatcacaatataattctgtaattactagctgagtaattatatagttactcctaaagaactaaagaaaaaaaaggtaaaaacaatgatggtaatcataggaaaaaaaaaaaggcaaagaactaaaaagtaaatgaaatgtgaaattatgagttgtaaattaaaacaagggttgagatttactcttcattttactctcaaggcttaaagtagttgttattatcaattaaggataactgttaacaagttacatgtattatagtaactagttactaaatacttaattttattctcatagatatcataacacagctagatcacatttcacaaactcatgtgcgattctaaatcttgaatatcattaacatatatattctaaaatattttacatataaaacacaaaatatttagagtaatttgcgatgtaaaatttaactctaggttgtagttataaatacttaagattaattttaaacggtaataacacataagttatatttttggaactttcacggttaaatattaaattattatccacatgtcactttaaagttattatctaacgtggacccagtgtacacgtgacacaatataattggtccacgtaaatatatatatattttttaaaaattaaaatttaaa

SEQ ID NO: 164711 - DNA, 659 bp, Cannabis sativa
gagagagagagagagagagagagagagagggagagagagagggggggggggctttgagagttaggtttagatgtgttttgtgcgactgtgttaggtttaggttaagagagagaggttttgaaagatatatattaggtttaggtgaagaaagagcgagatctaaaattggcgtgttttatttaatgatcatcctcgacaggttaaagccgtcggggatactcctttaaaataaaaacataccaattcgtaagtcatgcttgtaagtcgtcggggatacttcatgtgtgtttaaaaccgtcgagaatacctaatattttccaataattttaaatagtcacataatttttttagtaatagtcccccaacaaaaataatttgaagaccgacggggaatagtgatttttagagtagtatagatatagttatatataaggttggataggataatagggcagaatacacctatacctactcgcatcaggtatttacatgttctcatacccttacttgacctatcctaataaactctaattcaatgggtaatacctttcccatacaggtaggcccaaccaaaaatttttgttgtgactaaaagtaaaaaaattgtaattaattatgaagtatcattcttatgatgtgactaaaaagtctgtagcaaa

SEQ ID NO: 164712 - DNA, 1677 bp, Cannabis sativa
acccacccgcattgaaacccaaaaatccagtcactcaaacatgtgagttcaggtttctaattctatgcatctgaaactcggtaaaattcacccaatgtgcacatctaacctttatattactgacacacatttttaagttaataatgttttaattgaataaaactatttttcttaaaaaaaataaaaaataaataaaatcatgtgatttggaatctaatcttgtaactcattgatcttgaagatcttatagtgaaatcgagccatttttgaggcgagctcgaaagagaaagtacccatcggaatattttggggaacctctataaaatttggtgcaatctctcctatttcttgcttttactaattgcttatatctgtgtgtatagatctagggttctgtttggtattctaggaaaggactaagctagtttttttttgggttgatagcagtcttcgagtttcttggtagaaactcgaagctctgctaaggtttcgattggtatgtgtgagtgtgtaaatgacctaggtctagagggttatgagagttattgggtttgatcaaaacgatattgcgttttgggagagtcatctgtcatatgactcattgaatagggagtcaactttgttttgactcagggtgaaaggtcaattttgaccttggataaaacttgatttatttctattgtgtgtaggttaaattggtaaaaattcctacaaataaaatttgcatttttcatttaaaaaacttactttggcatatagattatcatgaagattgaatattcatgggaaataatacatctacatttcctaggggacggcttggttatttaattatagcataaattaatttaggttattttacaaaaaaaaacattggtaaatatatacttggaatatatatgtgtattattatataatattttaaaattgattttattcttaattgatggtcagagtttgagattcttgtcttcaaatattagaaggaatagggaaagaatgttatggaattaagaaagactaatgtcgaaatagttttaggaaacaaaagaataaaagtactctaatcacaattaattaataataaacttaattaataaatatatgcaacttgtgcatatatagacttataaaattatagagtgcaatagcaactagggatggaatgattgcatgatatatttaagctcaagacccattaaacttaattaaaatataataatcacagcaagtgttaaaaaatacatattaatttagaaagataaaatagagataggaaaaacatgtgcatgatggtgtttaatcacttcacatgcaatagatctttctatatctgtatatatttccttaaaaaatgtatatatagtttcctacacaaccaataatgcagctcttttttttttattattattattgatcaattaaaaaatatcaatcctatgtagatctgttgggactaatttggattttaagtgagaacattctcatcaatttggcaaggaatgcaacaattaactatagctgagaacaatttaggttaaattttgtcaacaaataatttactttattcttcttttaaggtacgagttttgtaagatgtatattattagtgttacaagttaagattgggtttcaattattttactttaattaatattataaaaaattactaatcaa

SEQ ID NO: 164713 - DNA, 1453 bp, Cannabis sativa
attaattcagtaatagttatattttcgaaacttctataggtacctggccaaattaatggacacatggaaatttctaattgatctaggtcattaaatttttatttttatttaaaattaatttaaatataccaataaaaaatgacatgtaaataatgacttaatatttaatagtcttgtagctacagaagtattagaaatataatttaagtattattaccatcaaaattaaatttaagtatttatttacaatcgagaattaaacttaaatatttatactgtaaattactcaaaaataaataacattgaatcttataagaataataaaaaatagttttcttatttttacatttaaaagtagttttttttttacatttatacgaaaatacatgtagcaagataaattgcaacctaaatttacatcgcaactcacacagcaattaccagagcaacccaaaccgtaaaaataaaaaaaaaaagtaaaagatagtataaaaagtgattaaaaaaaactaaagctattatttattttttttaattgtttcccaaaaaaattttcctaccgatagaaaatttatgttaagtcctatcataatcttattatataaatatatatataatatatatatatataatatatatatacataaggaagaggtttcaatggttacatcaaatatatgaccatcatggttatatttatttttagtcattagatcactattgaatagttataattaatttgaaattaaaataaataaataacttgtaatctcatagtaacctgaaattttattttcttataaaattttaattaaaatttattatatttaaaattaaattactattaattaatttttttacaatttgttaattactaaataagaatcttttagaaattaacttttttggacttaaattattaaaatatttataataaaaccccttataatttaaaaatattacacatataaccttaattaataaaaaatagtaaaaataacctctaattaaatgtaattctatactcaatcttatcatcaatactttaagtgctaaataagtgtgccaatccaagattagttcaagtgatttaattattttttctaaaaaaaattaaaatctaatagcaattataaaattaaaaataattttttttggggcacactcaacacatctgtacttcattccaccctttgttatgtaattcttctttcttagagaggaagtcactttatccttcattctttgcagttctaaattaatatattgtatatgtataaattaatcgaagtggaatcataaaaaaattgcaaaagtttaaaaattattaattgttattggttattaatcttgaatatttataattgaaaggtttgaaagttactaactgttatcggttattaatcttgaatacgtgttattaaaaaaatttgaaagttaataattgttattg

SEQ ID NO: 164714 - DNA, 963 bp, Cannabis sativa
agacttaaaaattaatctaaataccgagataaaaaaaaaaaaaaaaacctactaaaataacccataattattacagaaatttcttatattttatatagatgttttttatgcaataaaaaaaacaactaagcgcgcgcaattatgtgttaagtttttatcctctatgattaaattaagaaaaccaattctaaaatatatgggatattattacatttgatttgtagtacttagtttactcatgtttttttttttttttttccaagcaaaattacattgtatccatattttagagtagtaatctcttttaagtatgtttgcgacatgtaattgtgacaatttgcagatgaaatagtggcaccgactgcttcacattattacctgtattagaaggcatatatgcatatcactcactatttattgagtctttttttccatatatcaaatttttgactgaattctcaaccaatactaattaccgattttttttttttttttggtgaaaaaatcatagggctccctggagttaaacttcctttggaagaggatggaagctaaagtccttattcattagcttaccattgttctagttttatctttgtggacctgtttggcaagactgatttgtttttcttagttgttgtgaagtgctgtctacagtgcgatagggtgcaatggctgactcctaattaaatgagttatttgaagattcagttcaggttagggtgaacgacatcacctgggatctccacctaggcgaagtcgactcccctaacgaaccatataagattattctaggaaaactatacagtcacacaagactaggaaagaaggcaatacaagtccttgaagaatgtatgggccaccatttctggctggagttggaaagaacgtgatgatgggttgcttcagttttccttcaaaactagttttgatgctgaaaatgtccttcttttgagaccatgg

SEQ ID NO: 164715 - DNA, 992 bp, Cannabis sativa
gattgtggcttacatgatcttgagttatatggctacccgtacacttgggagcgaggtagaggtacggcgaattgggtggaggttcgtattgatcgtgcgttggtgactcaatcttggttagacttctttcctttggccaaactttttaatttagaggtgtctacttcggatcatactcctttaaatttggttttgcttaatgaagtggtggttgctaagagccatgtctttcggtttgaaaactcttggttgaaagagcctttattttttgaaattgtcaaaagctgttgggatagtgctgaaccgagaggtataatggataaaataaagtgttgtggtgatgtgctttggcgttggggaaaagactattctgggaactttcctaagagaataaaagagtgcaagttagaagtccaaaaatggaagaggggccgtgatggcgtgtccattgagaacttcaaaactgcttcagctagtttgaataacgtgttgctgcaacgtgagattttttggaagcagagaagcaagcaactttggttgcgtgaaggggatagtaattctaagtactttcatgcctcggctactgctagaagacgccgaaattcgattcaaaaacttaaagattcgactggtgtttgggtggactggaaaggtaggcttctttcggtcatggtggaatatttttcagctttgtttactgcttcagccgtgtctgatcaggaggtaattcaatgtgttccttcggctgtcaccagagaacacaacaatcggttgttggaaccggtttcagatgatgaggttcgtcgtgctcttttccaaatgcatctggacaaatccccgggtcctgatgggatgacaccgcgtttttatcaaaaatgttggagcactgtaggtaatgatatcatcaatcttgttaagaatttctttgttgttggttcttttccaagagagttaaatcatactaatattgtgcttattcctaagaaaaaaca

SEQ ID NO: 164716 - DNA, 1058 bp, Cannabis sativa
  modified_base (892)..(898): a, c, t, g, unknown or other
cccatcactgacgtgactctagcaacccatctccagccaacgtctgaccccacgcaccggaccaatcaaatcccaaggtgccagtgaattcaacccccaagcggcgacatccctttcaccgccgttagcctgggatcgcaagccaaagtttaaaggttcaaagtttgaatggattttttggccacttccggtgtccgtttgacaagttttcttcaccatcaaacttagctcatcgagaaaaataatctacataagccattttgcccaactcactactttttctagtgatgtttttgtagctccgcccctttcaagtgaattttcggtgatatcatgtactttttcacataacagttggtatgagtgtgatgtactcgttgaggtgatcattttgatatactacccttattttcggtgacgtttcaggtacaccaatttttactgccaccgatagttgatgtgcactgcttaggtgaagtttcggagctctaaactttaaatatagtcatattatatgtcgttggacttgatttggaatgtagaatgcaatgatgacaattatttagccattttatggtatatgtgagagtgatatctaagattggactaaacaattggaggtcggaacttgagagcttaagacctccttttggacaaagtttaacaacttgggagaggtagggactcaacttgattattagacttgatttttatatgtgttgaataacattagacatatttcaatttttataatttgcaaattgtttgaaaaaataaaattttaatctgcacattttttttgactattctggggcactgagtgtcaaatatattttgtacaaatattaatgcaggttatgattttttggtttattcaaaatacagctgttannnnnnngaattttttagaaaataaaaaggaatatgttgatcatgatttgtgcatattattgtttcacggcctagtctccatgtcatcataggtaaattagttgtgcactcacctgtagataaaagacctaaaatttgtacatggagtgaattgaatctgagcccca

SEQ ID NO: 164717 - DNA, 2586 bp, Cannabis sativa
aaatttcacacatacatcgcaggctttgttagcatctttttaaaaacttttaataatattatttctacccctaatgtttttttattcttttaaagtattaaattagagtaaaattttcatacaaaataccactataatatgggaatcccttatttataaaattcttttacaacacgttacaaaaccgctattataaaagtaagattacatttccaaacaaaagaaaagggttgattttgcttcccggagccaagacaccacaattgatatgtacattgctgggagacctctaactcatggtcgaacacaaattctaaattctttacctgcaccacgaagcacccgtaagtcacaaggactcaacaagaaaagctactaaatcaaaagtgatataaaacacaagtagtcacaatgcgacataataatcgtactcataattcattacatgttcaacatgaatataaaatttaacatctatacaaacacattatgagaaaatgataacaacccttactcaccaactttattatcataattaacagatattcactcattaggtgatcacacaactaactaattgccttataaaacaatcctattctaatgcttcataaagcatccttaccactcgttatccacgagctacttatgttactatcattgcccgataaagcaaccgataagtaagaaacctattcgcggtttttaaaggagtaattactcatttcattaacagtaatgatcgtatctttattcactcattaactgtaatgactgtatcttttcctcaatcataatcgactcacaaacaataataatcgttccgcatcattacctcgatcataatctagtcacaaatgataataatcgttcctcattattacctcgatcataatcgagtcacaaacgataataatcctcctcaatattacctcgatcataatcgagtcacagacaataataatcgtttcttaccaacacatttagcagtgcataaagcttttcttacctcaaaccaatgtctggtgtgcgggctgatctgggtggaaccatgctcgacaatcccaagtcctatgtcacgataatgaaactcgattaacaacttatccaattcccgaaacaaaccctaattcataaccggactaattctaactctccactgattcaaaataggctaaacaattcccaaatacccaaaaccaggtcctgaaaaataccccaagccaaaaatcaggttcgggaaaaaactagaatttccccctgctggccaaccgattaaccggttcaccatcaccctgaaaaaccgattaatcgatttctggcaggcatggaaaatgctggtttttcaccccgaaaccaaactcgagctacaccaaacctgctcaaaccttccagaacagattaataatataaagtcaatatactcaaacacccaaaactcataaatacctcaaattaaacaaaacaacatgcttgaatcaaaactaggttcaaaaatcaattttttctcaatacatgtttaaacagccaaagtaattatcaattcacaacaaactaaccttaaattaggtccaaagataggttttaagctccagtttatcccacaacctcgaaacctaaagaaaccctaacaacacttaacttaaaaccttaaaaactgaaagaaaatagattggaaaattacctcaaagcttaaggaatccttaaactaagttaaattctgctaaaacttgaagaattggtgaagaattttcccccttgcagctgctggtcctaggtttcgaagagaagaaaaaagagaagagagtttaacctatttgatttgctattttcttccttaatgattttcaaacttaatttatttaactaataggtatatacatcaaatataattcctaactcagcccactactacaatataaatcaaataaaacaaactagggtaagttgactaattcacccttaattaaatgcttaggttaaaattagtcctaggggtattttagtcattttctaactttctgatttaacctacatctcaacttttaaacttagtctggtataattccaataaatcgtaacttttatcatcgtgacatttctaaccactacgccgagtttttacagccgccaaatctaaaaatatttattctaaaaatagtatccacaatacccccatagtctgataaaatctccgctttttttattcatttacccatatttccctaattaactcgtaattagtttaagtaagattataatcctactctaatgcccacttaatcacatatttaataaaatatgtccaattaaatatcattatatttattgggatattacaactatcccctccttataaaaatttcgtcctcgaaatttatttaaacaactcgggttacagttgctgcaactacgactttaacttccaagtcacctttcaatcttgttgttcttccacaacactgtaactagcaatatagtctttctttcgcaacactttctcttttctctttaaaaatctgtaccgactgttccttatacgacaagtctgtttgaaattcaatattctcgttgttgggttttatg

SEQ ID NO: 164718 - DNA, 1158 bp, Cannabis sativa
gcagcccaaaaagtgagtagaatcatggtagctcgtaatatactgtgcttgtcatcctagtaggaaattgcactatacactatggctaccgttttcagttttgtttctgggtcacacttaaggttttaaaaggtaggagaaaaggtataagacagggaaggaaagttttcaaagtaaggcagctgaatttcttttgaggcaaaagtaaaagttaataatagtttagtctagaaattgtaagaacctccaataaataataaaagtttatcaaaatgattaatgctcatatcagtttccagtcttgctttgttcatagtcttcatttaaatattaggaggttcccatacgtgcttcagtgcttgcttgcttactactatgggttttacttggttttcttagacccttgttgattgggatttaaaagcttgagtttttaatattatcataataaaacttctaaccaactttcagtcataaatctgaatatcatgtttgacaagaaacatcaaaagtgaaatggcagtagtattttaataaaaaatgttacacttcatcaaaaaaaataaaaaagtttcagttccagttacagtttaacaaaaaaaaaattacagttaaagctctctttaagcatttccggtattatttattgttttgcatttattttaccacagccaaaaaaaaaaaatattagatatttataaatcatttatgtaaaatatgtttctttgtggccatcaggctatgtaagtacgacgtcgtcacctggcaaaattatgcgctgaagtctcagaaaattagttccaagggatacataatcttgtgctgagttaattttcaaaatcttttattggatgccagaagctgaaataaaaaaaaaatatcaaaattgaaaatgaaaaaaaaagtaaatagaggagtttttcttcgggataagttgaggaatacttcttatttgtatccattaatcaaaaataccttcatattttattttactaaaatctacccactcttatgagtgggttgcctaatatatccttaccttctagtacatgatttacattaaattaagggatataatagggacatgtgggtatatcttaaaagaatatagaaatgaaggtaaaaattaaatcaaataaagtgaagtgggtatacaat

SEQ ID NO: 164719 - DNA, 1822 bp, Cannabis sativa
ggacttctccttattttgttggttttttattttctagtactttagtctttaagaacttgtaactttgtaacccataatgtgataaaatgggtctttacccacaattagtatagttatttatctctctcttccattccagcaaacatcttttgttataaccacaaggtctaatttttatctatcaatgcacgtttcttttcaaaaaaaaaaaaagttggagttggagtttaataataggtttgattctgcatcctctaacatctccttttttttattattttttttaattttataatgatttaagatattggaagtttgttgtctaattttcttaaagcatttttagtttatgttcgctttatacaagaattagtagttcgtgtactcaagatggatgacgaactaatttggatggattttttccaatattttctctataatgtataaaactttaattattttcaatgaatgttgaatgtctggaaaaaaaatatataaatataatataatttaaattttttattcttagtaagaaataattgtgttaaagtttaaaataataaaataaaggatattagcaaaaaagtacctaaattttataattagtgacacttaaccacataaatcgattttttagtagtaaacccttcgaacctcacttttgttaattatttactcattccattcaaaatgtcttgttaagtgctactgtggacatgccacagtgtacacgtgacaacttttagtggcggatattggcgacaaaactacttaaactctatgattagtgacacttagccatataaattgatttttggtggtaaaaccctccaaacctcacttcggttagctattttccatttcctttcgaaaggctcttttgattgctctacgactgaaactatcagatctccccttccctcgttctttcttcttctgtgacgaacccaccagaccacgacaaacccagggacgaattggtgaaccctgggaacccctccaactacggtggtatcgacaaagagttgcaggagagggagaatcatacccggagacgttgaggcaagatagagaaacttcaaagaagggttgaatttcaaggcttagagaaaggttgaagggttgggtttgtaaggttgggaagtcagttttggtgctcgttcgggtttaagatggtcggaggtgacttgccagagttgtgcaagaaggagaacgaaaaagagagggagtgcgggtggaaattaaggttatagggagaaaaatataaaagaaagagaaaaaaaatgaaaaatgaaaaaaaaatatatattttttaattatttttataatttttaaaaatatttaatgaattaaaattatgtggaccactaaaaatttgtcatgtatatacttgtgtatactatggcatgtctaccatgtcacttaatagcgtctttcagacggaaggggtaaatagctaacaaaaataaggtttagagggttttaccaccaaaaaacaagtttatgcagttaagtgtcactaatcatatagttcatgtaattttgctgctaatattctccactaaaaatttgtcacgtgtacactgtgccatatccaatgtagtacttaatagggccttttgaataaaaggggtaagagtagtcccatttgcttctctactctatactttaagatacatcactaaaattctactttctttattttataccacacttttacattcaccatacatcaatttctttatatttttttctacatcattaaatttgttataaaataatataaaataatataaattaatataaagtagatgagaagaaa

SEQ ID NO: 164720 - DNA, 1929 bp, Cannabis sativa
gagagagagagagagagagcaaagtaaaaggatcgattcgatccaagagaaagagagagaaaataagattgaagagagatttacatacataagatgaaaaagatgagctaccagataatcaatgtgtcttggagctctgaaacttgatgtaattgctgatcactatagtggattgtgattgaactttctctgaggtagctcaccaaggacgtagccccaaatttctagtggtgaaccttataaaattgctttgtgtttgttctttattaccctcacatctttacttaatttgttattcatcttgttggtgcatgtctctctaaaccagctcaagaacaaagtcatttttctcttaaaccttcactcttgattaatttttttgccctaatttgttttgtccttcaaaaatttgttcagacaagagatctgtaaagcaaagtcaaagataaaaaaaataataaaactatacgtgtcaaacttgtgcccattaattcagatcgaagaaaggtcaaaattgaccttgtgtattaatgtgtgtgagagttgtgtagggaaataagtgtaaattcctatagtggtatcagagctgtggtttgagcaacaagaataactcacaaggaggaagagaaggtgatcaagattgaaggaagttgatccactaaaaggaaatctcgatcaagaagagtttgaataaacaaactgagaattctcttaaaagaaatttgttatcttttctaaattaactaacatgagaaatataaaaagtgaatattgacaggtgtgatggatttggagactacagaatttggaggagaaagatcaagtcattactggcacaacaaaagctgcttagagtgctagatgatccaattgaatggcctagatagaactattaaagttcaacaagaagagttgcttaaaacaacaattggaataatcattttcaatctatctgatgcaattattagacaagttgacaaggaagaaacccgtgctaaaatctggaagaaattagatgagcgattttagaagaaatctctaactaataagattgaattcaagatgtcacattcaaagactcttgaatagaatctagatgagttcttgaaattacatattgaattggctaactctagagagaatgaagctcttagtgatgaaaaccaagcaattataatccttaactctctaccaaaatcatatagagaagttaagaatgcaataaaatatggcagaatagagatcactttagaggaagtcatctttgccttgaaatctaaggatctagaaataaagacaaagaaacacaatggatctcatggtgaactaaacctaagtaaggggaaatcatatcatagaaaaccatggcacaaaaagggaagaagctcaagtagaagctctagcaaggatcagtacttaagaaaactaaagtttcaatcaagaagtccaaaagaccctaatggttgctacagttgtggaaaacctggacatctaagaagggactgctatttttggaagaaaagcaacaaatacaaatcagatgcacaggacaataattcacagaaattagacagttacaagcatatagatcatcaagaagaaaactctagtggtggttaggactgtaaagaaattttcgtaaaccgcaacccgaataacccgcctaaaccaaaccaaaaaacccgataaaaaatataaaccaaaataacccgaaaaaaattctaaaccgcccaatcagttaattggacgggttaaaaatagacccaacctacccaattaaaccgaccaaacatatttaatctgactttttacttttttttttttaagttcagtttttaactttaactttttattattattataacataaacataataatataatatatatactgtttcaaaaaaaaattatatatatatttaaaaaaaa

SEQ ID NO: 164721 - DNA, 1688 bp, Cannabis sativa
tcaaaggttcggtcttccttgacttactaatacaactgacaccaccttgcaagtttattgttatattgatgttgattggatgtcttccgcaatgatagccacagtacgagtgcttactgcatcttccttggtatgaatcttctttcatgatcatccttaaaacagatagtcatgtctcagtctagtatcgaatttgagtattgtgctcttatgaatggtgcttctaaaatttcttggattgagtccttcctcttcatttagctcgcaccatgcaccatgacaatgttagcaccattcacttggcttttaatcctgttctccactctcgcactaaatattttgaaatagattatcattttgtacgtaaatggtttaatcgccatatgctctcgtttatactccatctttcgatcaagtcactgactgattaacgatgccctttgcatacaactcccttttaggaattgcgcgccaaactcaccgtccatcctagcctgatgagtttgcagggaattttaattaaaccatcaaaaattaaataatttatattgtatttccttcccctgctttatctttttttctttctttctttgtcttgcacacgtaccagtgtggcccctctttctttcacgtatatagccattgtactgtgcaaactactctaaggaatacaacaatatttgccaattcctatttacatcttctaagaccttacttatatatccatgttcaccatgcgaaagtgatttacttggagctcagactttagtagaaattgttaagtagttagttaaagttagttattttggttacttagttattatgttagttaagtttttctctaactaacttcttgaactatacttgtatataaagagctatgctcttctaaatcaatacaatgaattcttttcttttactattcgatattcaacatggtatctgaccaatttttttcgcttcctccattatagcttgctgcttctatactctatttttctgttcgtttctttcttctgccatggcttagtctctgtaaaactcgatgataacaacttcctattatggccttctcaagttctttctgccatcagaggtcatcgtctccaacaattcatctctgattctcatcaactctccacttgattacacttgtgtcaaaaaaagtacatcacagatctattgtgcaaagccaagatggataatgcaaattccttgtcaacacctatgactggaggagaaaaactgtgtacatatgacagtgaccccattgttgaccctatgcaatatagaagcattgttagagcattgcaatatgctatgataactaggtcagaaattgcatatgttgtgaacaaggtctctcagtatatgtataatcctctcgagtctcatttaaaggtggtgaaaaagatacttcggtatctaaaagggacttttgactatggcctcctattaaaaccctatcctgcattgactctcacagggttttgtgatgcagattgggcctcagatcttgatgataggaggtccacatctagtttttgcatctacttaggctcaaatgtgatatctttgagttctaagaaacaaaaaatagtatcaagatctagcacagaggctgaatatcgaagccttgccaatgccactaccgaggttgtttcgttacagtcattacttgcagaaat

SEQ ID NO: 164722 - DNA, 634 bp, Cannabis sativa
tttgtttgaaactttcattgtttcgaaactcagcgtatttagtttgtttaagttttcttattttggtattgtcggtttgcatatttttgaaattctgtattttaatattaccagtttattatttaattaattatttaattaaatgtggaataataaaactgtgagtgaaacaattttttgtagctacagaaggcaactttgtaacttcagaataaaccagaaaaacaaacagtgtagaaaagtaaaaacacataagctttttgtacgtggtttcaacaatccttccagattgttactaatccacaaggtcacgcccatagataaaattcattaaatagatctcaaaactacaaagtaaggacttatgtataaatagactcactcttattgtatgtcgcaagcttgatgtattccaccttctaattgaatcttgttgaaacttcaagtactcgaactcccttcaatctccttgaagagtgattgcttcttcccgaggcaagacttaataaacaatctctcaaaagcttgtagaattttcttctgaaggtagcactgttgttcttcttcttttgcagacttgaatacagactcaagacaatacaaaatacatataaacagagtaagagatgaacac

SEQ ID NO: 164723 - DNA, 526 bp, Cannabis sativa
cagacgtaaaccacctatgttctttggacaacatagcttctcccaagctacagaccctaccccacacattaagcttttacttgtccacaaaaaacttctgtagatggcttcaagttctttaataatctgcttgggaaggaacattaattgacaccagtaaatatgaattgatagcagaacaaattttattagtaccaacctacctagccaaattccttgtgctccatgtcataattcttgatgtcatcctctacactaagctgctacaatcggatgcagcaatcttctgggcacatatgggcacaccaaggtacttgaaggggtcatgttgtcttatggagccagacatatctaacacccttctaacttcatgctcactcattccactatagtacactactaacttagagttactagccagcaaccctgaagttgcagagaacagttttagagcttgcatcatcaaaaacatgcttttgaagtcccctttacaaaacattaacacatcatctgcaaaactcaaatg

SEQ ID NO: 164724 - DNA, 2250 bp, Cannabis sativa
tagcatgtggtcttgataattagagcaagtattgtactactactattcatgttatacgtaagtagagtgggataccaagaccataagagtgtagcgggtaagcgttaaactgccaaactaagttaccacccctgggtagatgacttaccattgggggcaagtgactatctaagccactttgggggtagttacatatctcacctctgggggtacttacctaccctataggggtggttgctcaaacataccctggggtagttactcaatctcatctccatacatagaacataccccatggagggtgaaaaatttacatattcctcattaattaattagtctcaggtaatctcgtgacaagtgtcatcatactcgccacatcactcttgtcaagatttaaaacttttggtgtgtttacttatgacatcagagaataaaaataaataataaaattcattaccttgttttcttatctaattttgttaaagaatgaggatgaaatatgtggatctcacactaatttaagaatgagaattaagattagcagtccccaaggttggtaggattgccactccctttcttttttaaaattatgaaatattatttttactctcttttaattaatttttttttaaaaaaaaaatatcccccaaaaaaaaaaacataaacaaagagtattttgtaagttaaaatagtttactccgattctaaaataatgtaaacatatcaatgggaatacttcttattctaattcttattcgtagtagtcaattttcttaaaaaatttgtcttgctagatgatcttcgtttattgtttgatatgactcactacgatactgttagatattttagctaaaggttgaaaatgttagcttgcagatactcgataggtgtagagtatgaatattatacatatacatttatcatgcatataacttttaaactttatttgttatatagtataaatcatattgtgcatgaaagtaaatgctataatcttttctttatttatttattaccattaaatattagatattttactttatttattttttcaataattttatttattttttatttcaattaaattatgatttcaacatcttaaacggtatgtgttttttttttaaaaaaaaaaaattgtacaaagtcctttaataaattacattttacacattttatgtaaaaaaaaataaaataaaatgttgtacaaaatatactaatagtaaagctaatgataaaatcaatataatagtactgtttatttatttgatgatgaagcatacattttaaattttaattattataacaacaacataacccattcggccccccaccaaggttgtatacacattttcctccatttttaaaggatttttcaagacataacttattgcatctatattcattataactgcattcaccgaagcaattcgacggtagatttattgcatgtccaggctctgttttacagttaaccataatgttaatataaacatgataaataatattagatataaaaatgtgtacatttaaaaaaaataatgaaatactatgagaaaagtaataaagtactatgaaaaaaattagtgggagtatcacttttactctaccaataaaaatgtttttgtattttattagcacgtaaaaaagattatgcataatttttgtatataaaatgatacataatagttattgaagtatatatatatataaattttgaataatttatagtattaaaattaaggtttaatcaaagagttgtgctcgtgtatattttattttatcataagctctaagaaacaacatacgtacaactgactatttgaacctgtattttgacactattaattattcataattttttaaaaactaataagtgtctattataactacaatatattatttcaaaatataataaagaaaaaacaatttacaaaatttctctaactataggaaaaaaatgacgcccctacaaatgaagctctcatatttattatattattaaattaaaaataaatacatataatattttttttttgtatataattttaataaactaacaaattgaaaaagattgaaagctcaccgaagaccaacaacaatgcaatgcacataaaacttatgataataatggtgttagaagaagtcatcttcattttttactcaatgatagataattatattgatatgatatattttattatatgtgctcttaaaaacttgtgaaagtcatactgtaatgtataatgt

SEQ ID NO: 164725 - DNA, 862 bp, Cannabis sativa
ttacataaatgtgttgttgtctctgacgaaaccagaatttacagaacaggaccagtttattgtttataaaataaaaatagtacaatttaatttatattattatgtaaaataattatacttgctaatacttatttaaataaatataatataagtattaaaaaataattatattaacaaacagtgtgcttaataattaattatattaaatttataagtgtaattacacaatattcatttttagaaaattaatattattagattatgtaattactaactcatttgttaaacatgaaaataagaatttatatacaattattatttgacattcaaatacattatattttgaaatatagtgtaattactctttttgtataataattacaatacctaattattacactgttgcatctaaatacactcaccctagtaaattttgctcgacattccttcataaatacagactcatctataatggaactaaatgttgtggaaatatctttctcaatacaaacagaagcaatcatttaaaaagttattttttaattttgtttcaaacactcttcataattttcatgattgagaatgcacatttgtggacataggaagagttcgaacaagcttaagtaacctgtcaataataaaataatacataattactttttttttttttttgttttcaccaagcgttgactctaaaattagaaagaaaaaaaagtctagaaaagatttatttgtttgggcaagtgagtagtgtaatattgttagtgcgatgagaattataagattcatggggttagaaagaaagtgaatacatttaggaataagttgagaaatacatattttttgtatttattaatcaaaa

SEQ ID NO: 164726 - DNA, 1732 bp, Cannabis sativa
agcatttaattttcctgcacaaacaatactcatttcgatcctcagctcgatctcatatagataaaccaaccgtcatttggtttctctccttctcacacccaaaaaccatcattgcgtatcatctccgaatccagaccgtctccctaagcattacagagatggctcagacaccggttccttcttcgaggcgacccttctcctccaggtactctcttctgtggtttctttatttgattgcttatttttatgtttcctcccttcgactatccatatcactaattctttcttcttctacccctattttcttcctatcttcaccaacgatggcttcttcctccagcaaccccaaccctatcactgctcttgatgatgaggacagccttgtccatgatttcgaccacatttccattcactctcctactgatgcaaactcgttttgcttgtttttcaaactgttatctcccaaatcggctaagccctcttggattgagaaagccatgtccgatgcttggacccttcgatttccttgccaaatctctgagtatcattcagggttattccttgcctcctttcaatgtgatggagatagacgtcgtgttcttgaagaacagccatggcactttgacaagtttttgatggtattcacccacctagatgtctccccccactcctactcctaagtcgattaggtatgtttctttctggattcaagttcatagaattctttttggtcgaaaaaacccccaactggcccagttcattgctgacgagattggcaatcttcttgaaatttttcctctctctttaatggaaaactttggtccttaccttcgaatccatgtcctccttgacatcactaagcctctacgcagaggtatgaccattcgcttccgtggaatctcggaaccatgatgggtcagttttaagtacgagagtctcccgaattttcgctatttctgtggccgtgttgatcatacctataataagtgttccaagtacctgcttcgttgtgacaatttccctcatcctcctcttttggaatataaggatatccttcgtgcatccccttcctccccttataaaaagaacccgtttgaactgtctaactctaccccttttgagaagtttttccctcgtatccatcccagaactgatgctcaagatttgcagcaagctgttgatcaattcctccatgtggactctccccaatccagtcctaatgctcatgtctcggtccagtttcctcagcctgtcatatctacctctcctttgcctgtctcacaatccaattttagccctgtaatgccatccatatcaatttctatccccgctcctattatggctgactctgtttccacccatacaacaaaaggaaaaggaaaagcccttgcgatgtctactcctactcatccctctctgtccaaagctaggaaaggaattgttatcaatgaaccttgcccccctccactcactgccacttcccctgttatcaggccgacctttacgcgtctaaaggcccaagttagaggctctgtgcgtagcatccttaagcgcgctagagctattgcttctgatgatgctgtggtcccctccatgtctgatgatgagccaatgcagccccgccgagaataatgagtctctacagttggaatgctcgaggtttagggagccctcgagcattccgtaatctctccctgcttgtcaaacagcatcagcccttggtgttgtttgt

SEQ ID NO: 164727 - DNA, 1221 bp, Cannabis sativa
  modified_base (1170)..(1194): a, c, t, g, unknown or other
ctctttagcagcctacaacagaatctatgacctccagttccagtccaccattgtagtccagaccacgttgacactgtagcctatcacttttgttgatctcatctgatcatcatttctcatgtacatgcagtcccttcatcctcattcagccctttccctgtgaaaaaattggtaatagatttgaatcaagcttttccatggtggtctatcaatattcaatgttctcttgctttttcacttcttttttaacatttttcagaaagatataagtgttcatgtatcatccttagatgtttataaaacaattgattgtgaaatgtgaatgttatttttttggggtttaacttttacatgatatatcatttgctgtaaactttgggctttgaatgtgtttgatctcaattttcaatttgtttagttttaatttttaaacgttttatatatcttggatcatgtgaagtggacctgcatttgtgttattgttttgagttggtcgttctggtttagtatttatctagttctattatatacagataaatgttatggcttgtatatttactctaatttttgtattacattatttgctcacaattatggaactaattcacatatatgttgaatatgtagtttatgcacttgctttagggaatagttggtcgagcaagcacttgttgatctccggtaggtatctcattttttctaatttccttgcttctaattatacaataaaacccttattcaatatggtatatagttcagaatatggtatttattgttctattgcagtgatgcttatggtagagggttaatataaataaatagttttgagtataagactatcattgtgataattgaagttaagcttacatggattggtatagggcttagcttgaaatccagaaaatcgaaaaaacttttcaaactaacctaccgaacaccgctaaaactgaaaccgttaaaactgaaacccgaaaaccaaaaaaaccgtcgacggttaaaaccgccattaaacggccgttttattattttagtaacaaaccaaccgaaaaaaaactaaaacccaccgtaagtaaataatattattttattaagtttatatgtaatattatcaatattttataaatagaaaagtttactttactacctatagggctcgtttggaacgtcgtnnnnnnnnnnnnnnnnnnnnnnnnnattatattgaattgtattttatgcaat

SEQ ID NO: 164728 - DNA, 1349 bp, Cannabis sativa
  modified_base (1298)..(1301): a, c, t, g, unknown or other
ctctacattccaatgttcaatattcctaaagtcaaggccaccataatttttagattgacacacagatgtccaaacaatttggcttgaacttgaaggatcaaacgtacatatctctacaagaaagcactacaaatactattaatcttcccaagcacatatttaggcgaaatcataatttgaacccaacaagtataaaatgctaaaaaaaaataaaatttatcaaggtatacccgccaacataagaaataagtcttgtactccaaagatgaattctagcaactattttttcaataataatcacaatcagctttggaaatccaagatgcacaaatggaaatgcccaaatatctaaaaggaaggttactttgagaaatatccgagctatcaataataaattgaatatccaaatgagacatacctgtgcccatgttcttatatatggcttaattctctaccatttattctatgtgggacaatgtccataatactaatgaaaaggattaggaaaattcaaagccaagagcatctccttgagagagccccactccaccgtatcatatgcttttaagatccatcttaatcatacaaggaggcgaattatgcttccgaccatactgtttgactaaatcttgacggacgaggatgttatgcccaatgtatcgcccatgaataaacctaccttgattatttgcaataatacttggaagaacattcttaagtgagcacacaaaactttaattattatgcccttctttaatcacaccatagaaaaccttcttcctttgagtcaatttagatcccaaaagcttctcgtagaaatcaataaaagttttgatcacatcagtattattatccatagccagatcctattttcatcatggatggcataacatttctaaggtgccttataggaaaggttgtaggggtcgcaaaaggtattaaattatagaaggttttgtaaaatagaagagtaaaaaatatcaatgaacaaaaaggttgacgattatgatgggaaataacttgcaagtctatatttagttatcttgtctaaatgagaacattagccatcaatatatatctagcatcagatgctaacttaggctcataactaacttaactgccagctagagatgagacgtatatagctgttagtatcatctggcacacttgtaacttatgttaaaaactccacaatataaagtgtcttcagttctttttgaaaacactttataattgtcatgaaaactaatttaatttttgaatcaattgagggaatattttgtgacagtcagtagtcnnnngatccgtaaggggaaacaccgggtaagctgtgcaatcccacaccgcct

SEQ ID NO: 164729 - DNA, 828 bp, Cannabis sativa
  modified_base (800)..(801): a, c, t, g, unknown or other
taatgaaactaattgatatcttaatttttttttaaacaattgatatcttaaagttaaacatcatataaaaaaaaaaaaaaaagttaaacaccataaacaactatattataaaattttctatttaagtaacattatgttgcattgttgttcaatatactttgaagtttttttttcttaatatttacaattactttcaaaatctatttgagaatcaaaagcaacgtcatcttcacaaaggaagattatcgtaatcaaaagctacactttagtttctttcatattttatcaagagataaaacaacaaaactttaaatcaaacaaaattttatattattgattgacttttggttacttaatcaattagtaacttttaaaattatcgttttaatttaatgttaaagtatgtgtttttatttatttatttatttagtttttgagaaaaagtatgtatttttattgttaaagatacaatttcgttactttttatttatttagtaatctttgttttaattaaaaataaaataagttaaaacaaaatacaagaaattaattagaaaatagtttattaattaaattagtatagatatttttttggtaatctaactcattttatgatatttaagataccattttgtttctcattttttttttctttagaaacctctaaaaatagttcaataaaatgaatatatttataatactatatgatagtttttaaatatgaaaaacaatataatttttagtaacttattagaattgattgatgaaattctgtattttaatattcccagtttaattanntaattaagtgattaattaaatgcggaa

SEQ ID NO: 164730 - DNA, 856 bp, Cannabis sativa
ttgttagttaattgatagtgtatatggctatggagaagcttgtttcaagttggtctaatgagaaaattacattgccggaatcatacataatcccgccggaaacaaggcccggagaccaatcttttccggtaacaagctcgattccggtgattgatcttcatgaaaatattaatcaacatgataccattgttcacaacatcatcaaagcttctcaagactatggaatttttcaggtggtgtaataatataatgttacattaattttctttaatataatataatgttacattatattatagtatactatgttttgtaacattaatatttgatgtaaataataatgtatgatgtaggtgattaatcatggtgtttgtgaagagttaatggatgagacaatgaaagttatgaaagagttacatgagatgtcacctattgacaaagcaagagaatgttgtaaggaccctttgaagagatgtagactttacacaagtagtaacaatttctcaaatgaaaaaattcactattggagagatgcctttcttcatccttgtcaccctcttgaggaacacatacaattttggccacaaaatccaatccaatataggtacgtatatcaatgttgactctgagatatattgggcttaagaattttattttattgtgaccttatttaaaatgtatgtggtatttttaaaaatttgtaaaaaaatatgtgtattttcaaaaaaaaaaatattttttttaagatcctgggttaggtgggcccctaagcataaacttagggggttattttacaaatacacaaaaacaacaaaagaattacaaaaatacgatttcatggaattttaaacatttt

SEQ ID NO: 164731 - DNA, 2352 bp, Cannabis sativa
  modified_base (1714)..(1722): a, c, t, g, unknown or other
ttggtgattaatcaatgtttattagactctgtgtcagttgccaatttttcaagtcagcattttggtactttcattgagagccttcataatctcacgaagatctcatctctcttctcttgataatcaccatggtcctgacaaggagaaacgtgtccattgatccccaagattcgatggctgtggatcccaatgtccgagttccatccactattgacaacccagccagtattgcccagccaccaaaggcaaacccatttgcaagttttgaccagaagttctagttaataccaggtaagatccaataaataccaggaaaattctggtcaataatggacaacatgcctaaagtaccaccggggttcctttaataagagctacccttaggtatacactagagaaaccaagcctagagttggccaacctagtgccaacgatccccatgtagactaggggatgattctgagctagccatgctaagagatgccatagggcaagtccaagtgcttccaaataaggccgcctcttgattagccgaatgatgaacaaatcttgcctaaaagggcatacagcaggactgaccagttctaagacctgcctagagatgaaagaaggagggaaaatatcccacctaggcaagatcgaggtaggtctcacagtggggaatcttaacccaacctcaatgaggatggtgccactagccatcctattgatgggcgcactacccaaagaactcataataatactgggcacaataacgacactcctccctggatggattgaacacattttgactcggggcccaaggatttaatgtttcatagaatgggccccatgataggagaagatcttcagaataatttgaaccaaagaataaataattgggacggatacatcctgccccaaaatgatcaaccaagggcacatgaaaggccaattcctgctgacccatacgaccaacctcttgtcaacccaagagagggattggctggataaaggacggcaagagttgatcatgtagtgctcaacttaatagcatagtacaaggcttatgatccgacccaaagctctcttatctggaagttgataaggctcaaggatggcctttctcttcgcccattaatgtgttatccctaccaatcaagttcaagatgccaactttgaaaatgtatactgcgaaagaagatcccttggcccatatcaaatactttagatccaaatggatttgcaaggggtgatagacgatgtttactgcaggatttttccagtgaccttgtctgacactgcacaacatttgtatttcaagctgtccctaaggagatttgattcctgggacactttcaccactgagttttgcacacaattttcatcctctaaataaatacctcaccaattggaggacttggttgaaataaaataaagtttgggaaaacctttgaaagattatatctaaaggttcatgactgaagccacaaaggtcaaaggtctaacggaagaagggcgatgtacaaccattttagggggtatcctacctctgagtgaccttttattcgatcgaatagagaatctgatgttgccccgtttaggcgagagtcaaggtcattcctatttcacgagcttctaccattgtttcatactttgtaagacctactcttaggagccactattggggtgatcgttagtaaaaataaaagacttacaataatacttatctttnnnnnnnnnacgacgttaaattgctaatgaatgaacatctattagggatgaatctcattaaaataagaactatgtataaccaacaacagagatcaaatgtccttatatttaaagctcattatttaaaataatgtattgttatctaactatttattttaatctattttaataataaaattacttaatttaagttggtttaaaaattaattaaaaaaatcaattttcgactttaaattaattttcaaggttaattttgaaaaatctatatttataaaatattatatatataatttcaaaataaataaaatataataaaataaatacttgaaaatatttattttaagttgttccaaaataattaaattttcaacttaaataatttttaaaaatttaattaaataataaattaagtgtcttgaactaatcaccttaaaaaatattcaattttaagttgatctaaaattaacaatattttcaacttaaaaatatttttaaataatatttgaataactaatttcctagaaaaatctacttaattagtaatttcaaaaaaaaatattttaatttcagttgatccaaaattaatttgaaaagttaattttcaacttaaatatattttctaagaaaattcaaataatt

SEQ ID NO: 164732 - DNA, 550 bp, Cannabis sativa
ctcttaaaaaggtaggcacttggacattagtgtcatcctccttagaaatggctatcattgaaacaaatggattcataaatagagagattaaaatctaggctggtagctaaagggtgcctacttagtattgactatgaggagactttctcaccagttgtcaatcctgctactgtgagaatcatacttactattgttgtgtctttcaaatgggtggtcaagcaattagatgtatgtaatacctttcttaataggacattagatgagaatgtctatatgacacaaccatagggctttatggatgaatctaaacctactcatgtttgtcaattacacaaagctctatatgatcttaaacaagctctaagagcctgggatcgaaatttaaaggatactcagttacaatggggattcattacttcaaaatctgacaactcattgcttacttaaggcacaagaccaactctaatcatattgttggtctatgttgacactacaagaaatgtcactttgatgtactggcaaaagttggtattgcgctggtaaaatagaa

SEQ ID NO: 164733 - DNA, 659 bp, Cannabis sativa
tgggacaatataaaaaaaattggctaaaacactcaaatagattttaaaaggtattatgcaaaaagttggagaggtgatgacttgtagaaaaacaaaaagtgggtgataagagacaccttggttggttggttttttatttttattttaatttttctctcaaattcttaaacagttcttattattttatgtatataaagaacattgttacaatagaattaaaagcatcctacataatattattaggaagcatttttggaataaataatggaattttattaataacaattaattaaattaatagtctacaatttaattaagatatatctccggttgaaaacacaaccaagatatctaattaggatagtcttgtgtatgtgttatctctagttgtctcactttcctttctcagttcggtttgttagttcaagattgtcgcgtgttgctttcttctctgaataatattaatatacgttttgttaaacaatccgcaaacaaagtagctcattgtcttgcaagaagccactacaaaaaatcttacttttagtcataataaaacttatgactaaaaataaaaaagttgtaattaattataaattatgattcctgtattgtggctaaaaggtccgtggctaaagggattagtcacaaaaattacaatt

SEQ ID NO: 164734 - DNA, 1290 bp, Cannabis sativa
catgtggaaagaatgatgacatcccacagttgagtgtcccgagtcataacaaatcgacctaggaggggtccctagctctacgcccaagctggcttcgaaaactccaaaatagaattttagatttcgataactcatttccaactaactatctttcagtattttgtaccatgatgacatggagcaataaaatccaggtcctaggagctaatattacatgaacctgcaccccagaagttaacctgggctcctagggttttacccaatgcccaagttgacatcctcaactagggtttcagttttcgggaccgtcttagagaaactgggtcatattttttattgggacatgaactagacataccacaaacatatttgaggcatcaaaatcaaattcggagaaagatcatttttgagcacccggagcacccggtgcctcggcacccagtccctaggttgacaatttgtcaatttaagcaacttctacgtatcagatcaacgatccaaatttttcatcatcattctcttcatcaaaatagggaaataggtactttcatggaagaaactgaacttcttgggtgccagaagtaaggcccaatgccaaggttgacattttgttaacttgggtcgattttaatgatgttttccaagaactcttctaagaatcttctctatttttcagcagagattaagatttaactatttttgggagccaaacgaaacttccaaacaacagaagggggacccagcacctaggttgatacctggcattgggcctagcacccacgttgacatattgtcaacctaggttgtttccaaccaagttcttgaaaaagtgttacaggcattttttcgtcataaaaagtaatgaagttcaagcaaactcagggagaaacccacattctcaagaccctagaaacagagcccaatgccttggttaacaagcaacctagttcgctggtttcgatcactcaaatgtcaaatctaatttgaccattgaatccaaaatggtcaaaaatagtgtaggagaccttgtcctcaagttctataaccttggaagtatcaaaacaacatcttggaagctccaaaatcagtacccaacaagcaggttgacaaatggcctagtgctatgagcttatccgattctgatttcgttttgaccgtccgtctaattttttacaataacatccaacttcgcgtttctcatttccaacatgggaaaatcactcaaaatgaagagttttgagtctctcatttctgcaaaacaacaacatctctaagaattggtgaccagct

SEQ ID NO: 164735 - DNA, 1319 bp, Cannabis sativa
taccatcagctacaacaagagtttttggaccattgtaggttgtggatgtgtcgagagtttcaagattgttgttgatgtgattggttgccccagtatctgcaaaccatgagagatcatcaccaaaatcaggtaacacaacaggttgatgagttgaggagtcaggacatcacactcagtcagatatgcgcgaggtgcagatacatttggtttgggagtaacccagtttttatcaaatctgtagtgacacacaacagctgtgtgcccatatttcatgcaaacttgacaaatcaatcgagaacttgaataaaatccacgaccaaagcctcttgcttgagttcttgattgactttcattgggagatctttcccatgagtttggaaaggtctgaaattgtcatttcttgaatttttcagggcaagattggcttgcattttcagagtaagatctgagactgagttgtggtgatcaagacgactctcgtgtgccattagcaaggcttggacttctctaagggtgagttcatcacttctggatgtgatccctgaaccacaggatcgtactcagggcctaacccatttaacaattgcagaatgagatcttgaattccaacagcggagcaagcaatggtgatggaattagaaagcatttgaatcttttctacatagtctgaaattgatagtgatcctttcttgatgtgagaaaattgacctttaagttgaagaagtcatgcacgagactgactggtgaacctctgttccagagctctccaaacataataggaacttgtataatttgccacagaggccagaacaccttcggtcatggatgagcgtagccatgaaagaagcaactgatcacgtttcttccattgctgatattgaacatttggttcaccagtgacaagatgttgaggagagggaactccaatgaaaagaatgtcgtcaagatcatgtccgatgacggtgggaacaacatgagatttccaagcaaggaaatttgttcgatcaagcttgacagtaagggaggcagagagagagagagagagtttgagaaaagattccaatttgttggagcaagacgtggagggggagcagcggtagccgtggtctgtgtaggattgaactgaacgccgaaggtgtttctagtgcaagccattagagacagtcgtcaatggcgattgataccatgtagaaactcatcaaggcaaaaaccacaatagaaagaaacaaaaaagaattgcagagcaaagaaaacgattgccaagaaaagcttaatgataactctatggtatagagttattttttatgcttttaaactaa

SEQ ID NO: 164736 - DNA, 942 bp, Cannabis sativa
ctatggcacattcgaataagaacttatatacccaaatcaaaaatgaaaacaataaatgagtaccttggcttggaggaagaggtgcagtgatgggtttcccaggaggattggttttattaaattgagaagtgagttgggcttttttacaaataagtagagtggactctgtatagagtaaagaaaagaaactgaataggcatggtaatgaaatctacaaaagcagtggtactgtaagagagaaaagagagtggtaatagcttacttatgggtacatcaatggatgaattttcttcctctaagtggagaagctccttgcttgtcttttccatcgccctagaatgcaaattcgaaggtggtagccggtaggagaaggggtttaacttaaaaccctctcaaaaccctcctacggattttttttttcttaccctcaaacttcaatctctgccaatatcagtattttgtgtgctaataaaattttgtttagtagacttcatcaaaaaataaaaattaaaaattagtaatcccaatcccatcaaattagggttttttgtttctaaatttatagctataccacgttgtcttttttctccagccaggatagccgacgttctttgggcataggtgcaatttcgttagggatgtattttgttattgcgatttaatttttgttactgcgatcagtcttgtcttcctgacatagttttaagtgttttagtattgtttttgtgacatgattttgttttgttttgcttcgttgttggtttctctttgtttttcgatggttcgctatcaaatcgttgttagtgatttgaaataacaagttctttgttactaaaaaaaattataaatacatacttttaaaatttcatatttattatttaacgacacatttgtattttttttatattgaatatttaactatattattagttaatttttaaa

SEQ ID NO: 164737 - DNA, 1632 bp, Cannabis sativa
aattcatatataattgttgcctcatatctaaatacattttgtattttaaaatataatataattactaaacgatataattactattctaaactatataaattacacaattacttctaaaaacacccttaatctcgttttatacacattttggtacttgatcgtctcactacaaatgaaaacaaaaatggtaagatttatattacgatactaaatcatgtaaatattattcaaatatatattataaattattagtaatgtacacatgtcaattaaaaactattaaaatagaagagtgtaaaagaaggtaagaaaaagaatgaatttatcactattattattttattgtagtcttatacttggtaataatactacttctcatccaagtttatcttgtactacttaatgcacattttgttttttgttattaagtaaagataataagattaatacacatagctttgcatgccaatataatgtgtactttaaaattcagaggccatttattttaccgccaaaaaccatccaaaaccgctaaattgaaaaatcactaaaaactgccaaaaatcatacggtcagttttatactcttataatttataaacggttggttacggttttcgtaaaataaaaaccgtaaccgaccgatcggttataaaattataaaaaccgactataaccgaccaatttttacccctaaagtttgcaactaatatatagtatttttttaccaaatagtttggccaaattgctgaaataggaatactttaaagttcagatgtagaaatgaatatgtaataatttgggagaagtaattagtaatacaaataactctgaatttcactctgtaatcaattttgtattttgcatgtataattcatatatcattggtaggtaattttttttttcttaaaaaaagagattactgatattaatgtatactaatataaaatcttcatatgattaagtacatcatcatgagtgtattttataatactacagcataacataatttaacattaaaatacaaaaggattacatgttgtccaataatgacttttcacaaactttggtcctgtacttagtcttatatttatatgtttatattgattaagacaataatgtaacaataacaaagtagaaaataatataaaatgtaatagttaattgaaattttaagagaaaaaggagattattataacataacaagaagaaacttcaaaaaaatgtgtggggttagtaaaaagtggccacctatttggctatgtttcagttcaaaataaagctgagtgagttacctactaatagtactagactgaaaaaggttcaaaataaaggtcaatattttcattttatcattattattattattattattattattaattttctccccaagcacaagcaaagctgaaaaggtcaagttcttttctttttctttttctggttaaatagatggggatttgtttttccatacataaaaagtaaaacaccctctgttacttattataatttgaaattcaaagttttggagttaataaataaaaaaaagagcaatttgcggcgaaacccctttatgttttgatttttatacacttaacccccttatctttatttttggtggcaaaaccccctt

SEQ ID NO: 164738 - DNA, 1684 bp, Cannabis sativa
cataaattttattaaattacatatgatatatgtgaaaattaatatttttgtaatttttgctcggtaacaatgaaaatgtgacagtttggccagtagtgtcacatgagtttggtttagaactttttatttagcggaaaattgtgtttgatatttagaatatcaagtttaggtggtgttacagtgtttaactaagttttgtcttttagtgagttagtagattattcctaagtattattttgaatattaacttaacttaaacaaaagggttttaggttatccattttatcaaaactaaggaaaatcaagtctttctctttctaaacctatatatatctctcttgtgacctctcatgaacaaaaatcagaccagaatcaacctaatttcaaggtttccagcaagaaatgaagaagttttggaatagcaaaccaaagataaagccctagaatccttctttttgattttttcgaagttttggatttgttcaagcatgcaattttgagggttaggttctgtccgaaccctagatgtttatggttttagttctgggttaattctaagttgtttgatgcttgttgggttggttcttgatggctggttaaggggttgcataagttttcaacttggctcatcaacggtgattttcatatttttgggttatagttgttgttgttgcttgatttgtgtttgttggacttaagttaggtgttctggaaagttttatgaagtttgtgttagttttgagttgaaatgagatgtttagaaattctgcaacacaaaatgaccgttttctcataaatggcctaccatttttgctcgcattagtacagtataatgttaaggggtatgacacacgttatcaacactagtacgggacgagtacggagcttatgtggtgtaacatgcagttgtactagagctacgaatcaaccctaccaacactagtatgggacgagtcgtacttctgttaagaacgttcttgattcatctgttaagccttgtgggtatgtgtacgtatgaggacctagttacaagtcggtaatatgtttatatgttttatgcttttcttactgagtttgtcgactcatagttatgtttgcatgtgtaggtaaaggaaagccaaaggctgagcatcagtgagtctagagcttgtgggtgattgtacatatcggaataattaagtctggagtgttcagtttcaggacaacatgagctcatattttgtagtcgttggacgacacattttgtgaaaaagaatattttgaatacttttgtaagcttttaatgggatcccgagtttatgtaaacatatgcatttattatgtttttcgagaaattctttaattagcaaaggcgtgcacaataattaaaaaattattgtagcgtgcctagtcaagtagggcattacaactatgaaatcctcatgttcatctttgtcaaatttcttttcgataaactggtttacgttgattgacaaatacttgtgttcatcgtgctcatttacaatattcttagatctattgataaaatactgcgtcaatacaaacaataaaaaaacaacatgaatacataagcgtttttatgtaattttttttcacttttttggttaaatatgaaataattcctaaaatgataagataatcgaggagtgttgccgtcaacctcttattacaatctcttagtcaa

SEQ ID NO: 164739 - DNA, 629 bp, Cannabis sativa
aaaaaaacaagtacagaaagaaagagagaaagagaaaatagattaataaattatagataacagaagagaagggtgttcattcaacaatggtagtagtagtagtagtagtattaggtgatgagagagaagtaggtaaaaaagtaaaaataaaggtgagaagtttagggaaggttaaatggagtggcagagttgcagagaggaaggggtttgtctggtaatggtaatggggtacgtgggttgcagagagtcatgtgaagagacagtcctgttgcgtcagaacttggaagacgatgacagattaataagagaaccaaaggaaagagaaggagttagagagagaaagagtgaagagagagagagagaataagaaagaataatgctttttacttgtacgaccgccgtgcactttgaaaaatgttggccggtcagtttcaacaatattcctctgtttgtaactttattttgcttactctgttccctacactccccttcctccacgtcttcatttggattttttcttttaaaaaaaaaaaagaaatgatatttattattgggtgattttacgatacatccctttaaaagggatgtactgatgcacccttgaattgtttcggcatccagaagaattt

SEQ ID NO: 164740 - DNA, 2969 bp, Cannabis sativa
tttttttttttttgaacaaattataaaatagttttaaatgacctagaaacaactttatttatatccaaatataatattattgttatcaaaattaacataaataaaagaaaagatcaaagtaacattaaaaatataataaatacatgtaatttatatatttaatcatataagaaataataaactttggtgagagagagattattttatttattgtacgtacatacctaagtaatgaataggtaaattttgcatttgaaaatctacatgaaataatctgaataattaaaaatgattagacatgacatcgacttacagtaaaaaggcaaatgcatagaactttattattatttcctactcattaatcaattcatgtatctatgaataatatagtgtatatgtatatgtgtacatataaataaagtttgtacgtagtgatattatatatagtcttgtttgtttggccattcaaatcggctgttttgattcatattaaagacatgatagtaagtagatgagtcactctttagttaagagaatatcacacatgcaaatgaagctgtatatatacaattacatataataattaatgattatgttaattaattaattaataataataataacaatatgatatagaaataatatatgtatataaattataaattttgaaaatttgattgcatttattttatcaaaataataataataattattataataataatgttcttccacgaaataataataataataacaaataataataatacattagtaaattctataaaaatagctatagccggattaaaaatttaaaatcttgaaagacattactcctaaatgatggatcatggtgatgagagttgatgttggcaataatcatgacattcaggctaaccttcgactatggagtattagtacacatgttaaagatgctaagataagtggtgaaacatgacgagttcattggttcatccttcgaaaaatatctcaatatctgtttaatgcatgattctggcatgatgttgaactctggacaatttcttatgttataattatttgaagatgggagaggaggtggcaatggacgtgatggaggcgaaggcagatgctgttgcgaattagcgcaataagtttggctattcacaaaccaataataaggcaatggaagagcactattagttgtggctgcatttgtgatcacggaacaacaagatgaacttattggacgtttcaaaatattaaaaacaccattgtttgcttgtttccaaataagtcattgtttaagtcggccgcaatttggattgtgctgatcttcttccccaactcttctccgaataagtaacatatagataattagtattccattgtctcgttctacggatcatcaaatcagccacagattagagacctggggctttatcaccaaccgtttccatgagatctctgaaatcatcatggcttagccaaggaatccatggttgaaatttaagatcaatcgtttccccgaagcaataatcatacaagagccctttaaaatagcctgtcgcgcattaaggatcctaataattaagcacaggcataatgcattgcatgcaagaaaagatgtttcactaaacattattataacttgtatgtataattaattgtaatcatgcatcaaaagttaaactaataaacaaaacgaaattaaagactagtactagttaaattaattatatctaacaaaattcaaagatgatgatgaccccattaatcctagaaattaattataagggaactttgtgtgtgtatatatatagatgacttcctggttaacatttacatcaatccaaatcttactctttgcagattttctcagttataattaaagtttcctagttttctctctacttaattaactactcatcattaatggctttcacaactctttcctacaccaaaattatgatgatacttattttgatcatgctagaaaatacttacgttaaaacacaaaagattgtaccagcagtcttcgtatttggagactcggttgtagatgttggtaacaacaacaatttaccaactctcatcaaatcaaatttccctccgtacggaagggattttacagatcacaaatcaactggccgattttctaatggaaaattggccattgattatttaagtatgtaattatatcttattttattgaaatatatttatattctcactagtcattaattaactaattatattttaatttttgtactcaatcttaattataattaatatataatatggcagttgatgctctcttcttcgagtcctatccacaagcttatctaagcacacatggaagtagcaatgaacttttaattggagcaaattttgctgcttcgggatatgatgattctacagctaatttatacgtaattaattataatgtgaacttattaattaaatggttattttatcttataatgtcgtaataattaagacctaataattagattgattattaatgaataaatgtgttttaacgatgtgtagtttagcatatcattatcaaagcagctacaatattttggagaatatcaatcaagaattgttggaatggtagggcaagcaaatgcttcgtccatattttcaggtggactttatatagtgagtgcagggactagtgacctaattcaaaattattatattagtcccattcttcaagttacctatccaaatattcacaactatttcaacactcttctcacaaattatgagcaattcattgaggtacgtacatttaaatatttatttatactatatattgttagaacagagtatttcagagagaaaaggaagtgttttattgattgtaatgttctatatttacaagaggaatgttacacttatttataggcaagggatttggcatacaagccaactaattcttgtaacagaacaaataacagaaaaaacagaaagacagtaaa

SEQ ID NO: 164741 - DNA, 996 bp, Cannabis sativa
acatccaggggtacaagctcaattggatctacttaaaagcctagtacagagcctgaacagaccaaaattcaccgatatagaactcgatcaaaggtaaggttctccattctctcccaagatcaattccttggaaatcccgaccaagtttaacatgcctacttggaaaatgtatacgggaaaagacgacccctatctcacatcaaatattttgagatacaaaacaacctacaagggttgaaaggggttgttaggtgaagaattttcctagccaccctagcaaagtctgcgcaacaatggtatttcaaattgtcacttagaaaattttcctctttaaatgcctttgcatcaaaattctacacccaattctcttcctccctctagttgcccactcacttcaaagacctagtgaaagtgaaataaatattaatcgaaccgatgaaagactatattcaacagttcatggcagaatctaccaaggtcaaagcattgacgactagcagtggtcttaggtgggactgagcctaaaataagactctagtcagatgtcaaaagactaactatgggatcaatgggagaattcttagttcggtctgatgaattcataaaacttgaagaggctgaatggagagttggtagcgtacacctcaataatatcgatacgagtaagatccctgaagcccccatttataacaacctaaattcccaaccacaaggaataacaataataataatggtggtaaattgtcgaacaatggaaacgacgacagtaatggaaactaaaagaagggaaaattcaacagtgccaaccaacaaaattctcatgagagagcacattggtacactgcattctctatcctcactgatgcaaaggaaatttttttatggcaacctaatcgttagtgccatatagaagaccacctctagtaaaaaaatatataaataagagggatactgttaggctatttttagcctaagttttgggtcacattttatagt

SEQ ID NO: 164742 - DNA, 1864 bp, Cannabis sativa
tctcaatttgcctatgggaattgacccaactaaactggaatttgatcatcaaaaaatgttcgggtttctcactggtgacaatgatatggaactctccgacactgtgcacatgtctcaacttatctatcatcatactgctcttatgaggtttgccctatccaatttgtttccttgctccaatccagtaaatgtttcaaatgaacttgctttctttttgtataaagtttctacgggtgcaaaaattgatttggttgacatgatttgggagcaaattgtctctcttcgaaagggcaaaaaacctaggcttaatcttatttttccttgatttgtaagattttgtctatttaagaggagttgattcttgagaatgaatctattgaaatgcctgctgttggtaccacttttaaagtcccaaaaaaacctcctcaaggaaaatttgctaagaaaaaggctcgatctgcttcccctggtgctactaatgaacctactgtagcatctccctccacttctgctccaacagaattggtagaattcaacatgcgtttgggaagaatggagacaagtcaagccatacttctcgggatgatagacaacatcatgaaatttttctgatccaatgatgatgcttaagtggtccttttttatctttatgatttttatctatgtttttgttgaactattatgactttttctaattttggttgttatctttatgatttttatctatgtttttgttgaactattatgactttttctaattttggttgttgtctttggctccttaatagacaaaaggggggagtagtatttatatttttggattgttggttacaactcttgacccttgttttatggggagttgttttgtttgtggtctgtgaacttttctatttaaaaagttatttgtttgatgtgttagtatgctttcatgtagggagagtattttctatattcttttgtttttatttctaacacttgatgtaggttttcttcttataaaatgttttgtcaatcaaagtgccaaagggggagattgttaattctatttttggcatctttaatgtgaaaaaaatattttataatttcttatttaaattcgactgaggtatttaaattagtttttatattttgtgtatttgacttttatattaattaattaatttttgtaaggaaagttgcctacttttcgatttatggaaaataatttataaatggtaagtttggtgactcatcctctctttatctatccaactgtgttaatctgatattgtgtgagtttcttattatgattgatcagatttcttgaggagaaaaccgaagcaaaactttccttttctataaaataaaagtcgcacttactgctcacgattctgtaggtacagaaacgaaaattcctcggctgattgaagatctattttagggaattttctagtgagctagggtcttgttcagaccgtgtgtgagctgtcaataaggtgtatattgattataaatacaccttatagcagataggtcatgtatctcttttacatatttgtatttcactcatatctttagaaaagagagtctttattttgtatagaagagagtgtttgtctcttactctgtttatatatattttgtattatcttgagtctgtctccaaaagaagaagaacaacagtgctacctctgggagaaggttttacaagctttcgggagattgttttttaagtgttccctcgggaggaagcaagcactcttcaaagagattgaagggtgttcgagtacttgatgtttcaacaagattcgattagaaggtggaatacatcaagcttgcgacatataataagagggagtctatttatgcataagtcaattacttt

SEQ ID NO: 164743 - DNA, 963 bp, Cannabis sativa
ttcaaactttttttctatgttctctgcgaattgttattatttttgggtttagtgtgatttgttaagaattttaatttcaaacaaatattaaggctttcgttttcagtgatctttgttatttttgaatatttaacgttttgaattcttttagaatcttaagtctttgtttttagaaaaaatgcctctgtttgattttgaatgtgaaatactttttaaatcaaaactcacaattttcaaaacgatattcgaggagaatagtttagttcgagcagatgtctctgctcattacaagcattttatagatgagattattgagagcaagctttgttgtttatgagatgcaactttacccgagctgcattatctaattaaatactttttggcgagacttttctttttatattccgttattattcctaaagctcataagtctaggctgccacaaaccattcagttcaattcgagactgaatgctttgagttaaaagtcactttcattgcccctatgtagggcttttttaaccacgtgtgacattaaacaaggaaatgactttgtatccagatccgtaaaatgcgacgagaaaaatttctttcctcttgatgcttcaacataaaatttgaatgtaatacaagtaattcttctcgtgttggagcttggagtgtagaacatattcgagtccgctaaaatattaaagatggatatgaaatttggccttttgagttcttcttaatcccaatttttatataatatttttaatttaaaattaaggtggtaaaatttaaaaaaataaaatattaatttttttgaaataaaaaaatattaatacaatacaaggctcaaaaactcaaaatagaaaacctgatgcatatttgtttaaaattaaattttggctaattagtaatttttccccccgaactattgggattgttaaatttaaggacttttgtctaattttagttaaaa

SEQ ID NO: 164744 - DNA, 1256 bp, Cannabis sativa
gccttaagtccatcaacaaaaagaaaaattttcaacatcggtagtcttttaaaattgagatttcccttaccaataacattttatgctagaccattactaaatgttacctcaccacactgcaaagacctgatgttgataagaaaactgtcaaaacaccacacttatgaagcagtatttttataaaaaaaaatcaacaagacattttttttttttcaatccacatttgttttggtgaaaaatgttttgttttcaatttattcagttttccaaaataatttgacctaataaacatattttgtaatgtgaaatatttaggttgaatgtgacctttaataccacaaaaataacaaatgggaataaattttctcacttgatttcttaccctttttaagctcctgattcgcttgttgttgcaagtgacaaagtttctgttgcaggtggcaaagttgcagcaacaataaatttccctgaaaaattgaaaatactcaaaaactcactagttttacaaatctaaataaactaggggcttgagatccattataaactaaatctacattttgtactttctcaaaaatagaagaattagggttaagcaactgaatatttttcttaagattatttagttctttcttcaaaatattaatttcatcaattttcaagcataaaccagcctcataattcttaattttcgattcaagattaataatttcttgagattgagttttattcattttggttattaatctttattcaaaacaaatctgtatctatttttcatacataacattgtaagattcaaccaaagaatcttcattcaattcaaattctatagcatcgtcagaacatttattatccaaaacagtgttgttcatgcaaataaggtttttctttttctaaaaaaaatgaggcatgagaggttgaaaaaactaattcatcatcaccactttcataaacattgtcactttaagtagcattcaagtcattttattctttttcaaagtattaggcacattaaaattctatgtgaccaaaaccatcacattctctacattgaataactctttcattgttatgcatacattttttgaagatgaataactttctgagaaagaaaaattctttttgtgttccattgctctcatgtattggaaaaaacttcttattaattgttgaccaaggttttcggcaactagttaaataatatataagaaaagttgtaggaagtttaatgcatgagatttttacgtggttggggc

SEQ ID NO: 164745 - DNA, 915 bp, Cannabis sativa
aaaaaaaaaaaaaaaaatagcccccctcaacttatattctgaatccaccattgattacactaccatacactcaacatctttatggagcttcgtattcacaaagtactcaagtgacacaaacaaactttattcaagtattcttacactttcaacccaaaaaacaataaataattacatgaaacactaatatttatgaaaaaaattatatttttacctttaaagttctttttaatatattgttaaagtattctataaaaaaacaacaagattgtaaaatattgaaaaactcttttttgtaattttttattatttttgtatgtttttagaattatctcaaaaaaaaaaaaaaaatctaacacaagttacaggcagcccaaataagggctagttaggcctgtccagggcctcaattgttttatcctttcttttatatatatattggtgggttttttttttcgaaaaacgtagtaggatttaattttataagacataaataaataatccaaacaaaatataggattaaaaaataattaaagtttaaaatatggaaaaaaaaaaaagaaacaataaataaatttaataaaatttgtaataataagtttcgctagaaaaatcgccagtaccagaaaaattactggaaaagttattgtcaccgaaaaaatcattgtcgctagaaaagtcaccaaaaaagtaattgaaaaaatcaccagaattagatgtctcatatataaataaaaataaaaccaattttataacctaatgaataaaaacaaataacacaaaataacttaaaccaaatataattgaaatataacattttctataagataatgaataaaaacaaataacacaaaataactcaaaccagttaattaaaatagaaccggtttttataacagtgttataatgaataaa

SEQ ID NO: 164746 - DNA, 1515 bp, Cannabis sativa
gcaatcttactgataagattccttgcagtattaatttggccaagtgcaagcttgtaatggtctttgttgtagaggacatgaagaagatcaccataaaaaggatggatgtcatccagcctagggaactcatcaatgatagcagaaagcttttcataaaaatttgtttgcgtatacttcactttacgcatataaaactgacggagacgattgatggcatatcccttgtggacaacagtgggcgtctggcgttgggtacgagaaaggataatgtcaatgaagaccttcccagttggcaccacagtaatcttcttgaagttatactgcaccatttctgctgtctaatctgaaattaaaaaaacagaacataagagttgaaccaataaaaaaataaagaacattgatcaccaatgctttatcttcttctgaaaacaataagaagcgtgcaatatgaacattctacacataaatttagacacaaaaatcaagggaacagaacatagaaaacccaaaacaaatagattaagtgtgatggtgatggtaatggtaaataaaatagcttgaaagtgacaacccattccctattattctaaaagagaagaaagatatcatctctggtaacagctgtaactcttttcatagaaaaactcgtatttcaacagcaaaacaatgaagcatttgttaaatttcatttataccaaatttatgaaatcttagttatcatataaacaaaaccaaactcaaccaacttccacaagtaaccatccaaatacatcagtacccataaacaagcaattaaaaatgtgagcttacagactttaacaaaacaaaaaaaaaaaaaaaaaaatcaaatagatggaattatacaaagctatgctcatacgcacacacatcttcatatacacttttttgaaattaagaatacatcatattcagacgaagataaacagtaccattcgaaatacaaagtatatttctgaaacgaactaagcaatattatatcatggcattgggataattgagaaaccagtactaaccattactgttcaacaaataaataaaagaaaacagaaatcgaataagagaaaccagtactaaccattactgttcaacaaataaataaaagaaaacagaaatcgaataagagaaaccacataattatgagtcgggaaaaagaaatctctatataattacaacgaaatatagactcgtcgtttcatgtccactccttagattcctcaaatcaagccaaaaaaaatttatatatagcaaaaaacaatcagaaatgaagaaaagatacaacgaatcaaagagccattgttccgaaacaaatcctcattatcagcgacccagattcatacctgcgaatgaagtgaagattgtttatcaaaccaatctgatcagaattcctcttctccgatttagagagagatttgagtaacttggagaacaagttatggtaaccctgagaaagagaaagggtttgagaaagactataaaccctaaccgtttggtacg

SEQ ID NO: 164747 - DNA, 6184 bp, Cannabis sativa
  modified_base (1221)..(1223): a, c, t, g, unknown or other
taaaataatttccaacagctagatgcattggtttcaagaatgtagctaagtggaacaaagcagcaatgttcaagtatgtttggactattgtaaccaaagaggataattttaggttaattgtagtgtatttttaatttagttttactcttgtttcgagcaattttacgcttttcatctttttttcttttgcagatttaaaatagaagaagaatagaaaatatcgaaggaataagatgaaaaaagaaaaaaacgatcaaataaaagataattgtgcgcaaaatagcggtcatgcctatgcatggaaatcccatgcctaggcccgtgtcaaggcaagcctggagctgcatggaatcagaacacgggtcgtgacatagaaagcagaataggttttctgtgtgggttatcttttttttatcccttattggctataaaagaagtggacttcaattattttcaacaagcaattcaaaaggaaatttagaagcaatcaaggagtatgaattttggagattaaattcaatatgggaggcttttttaagagggttttcatcattcttttcttctctattttcttcttttattcttaaataaatatctatgaaattgctacgatgaacatgagtagctaaatagttcattagggtttagatggagattgtttgacattaattttttgttttgatatgatttaatttctcctcaatttctatgtattctattttattcgtacttaatttctttcaattgcctgaccatcaattaattgtttatgattttgatataaaatctaaggagtgtcaattatgctatagtgagatagaaccaaattttgatataggatgagagtacctatatggcttggatagcttatagggtttttgtgtttaatgccttttacatgtttaatttatcacgagagtaaaaaatttgcatgtatttaaggtttatatatttgagaagactataaattaccttagtaaacccgctgttgtatagaattcggtaatagaaatagaatcatgttaaaccataatcaatagatgcaattgaaatcgaaagtactaacttttaatcatcgttaattttcttattgatttatttgcttcttattttcattgtatctttattgttttctaaatttaattttctcttaattttgacatagccaaaaagaagtaaatgtttaattttaaagtacttaactacaatccttgtgggatnnncctcactctttgtgagtctattacttgttaactatatgtatacttgcatgtccaaaataccacaataagtgtttggcgccgttgccggggattgttaggtaatattattaaaaactaaattttgttctaatttagtttttttcttttcaattttagtactaattctgtttgtttcaaatttctctcttttctctggaacaactagtttatgagacgtcaaggagaaactatcagattgcctattaatcctgaaattgagaatacttgcagacagaataaaagaaggaaaagattggaaaaagctaccatagagattgaacaagaagtagttatggttgacaacgtcaacgtcgacaacaatggtaaaagtggaggtgctgttaagaccaagttaatggccgtaaccaaaatgacaagggccagatcctatataaggccacctttggttcatgcccaaaattttgagatcaagccgaccatactgcagatggtccaatcctcagtctagtttgggaggctgccaacagaagacccaaacttgcatctccctaacttcgaagagctttgtcaaacatttaagatgaattgagttagtgatgacgccattagactgaggttgttcccattatcattaacagagtgggccaagagttggttggtatcgttgccacccaattctatcaacacctaggaggaattggctctaaaattcctttccaagttctttcttcctgcaaagattggcaagttgagatctgaaatcaacaacttcacccaacatgacaaacaatctctgtaccaagcttgggagaggttcaaggacatattgagaaagtggccgaaccatgggattgaaaagtggatgcaagtgcacaacttctacaaatggattggttggaaacacccgaacactcatagatgcctaactggtggggcttttatgaggaaaagtgcaaatgaggcttttgaactacttgaagagatggccatgactaaccaacaatggtcaacaagccaatctaaaaaagttgcaggtatgcatgaagttcatgctataacaaagttgacagcccaagtggaggccttaactaagttggtcactgctcaggcaaagcaagctcaagttatttgtgagctatgtagaggacctcatacttatgatacttgcctggtagatgtagtcagtttgccaatggagcaagcccaagccattgggaactatcagaacaacaatcatggtttcaaccaagggggtcgtcggcaaaatttttaagggcagtctccaaaccagcagcagcaagggttctacccagagagaaatcagtctcatcaaagttaatagaatcaaaaaaagcaaggatctagtggagggtctaatcctaagacatatatgttactacaatttatgacagagattaaatcttccattaatgtctcggaaactcaaatggggcagttggttactcaaaatactaacaagtctcaaggtaacttgtctagcactactgaagtcaatccaaaagagaactgtaaggtaattaccttgagaaatggtaagagctatgccgggcaaggccaagactagtcagaggatgaatataatgatcaacaagaattagcaccaacacaaggtaagaagaagactactcacggtcttcaacaaaaagaaacttcacctcctattagaattgatcatcacataaaaatttcctatcctcaaagcctgcgtaagaataacataaataagaagtttagtaaattccttaaagtatttaaaaagccgcatatcaacatttcctttgcggaggccttgaaacaaatgccaagctacgtcaaattcacgaaggagattctatccaagaatagaaagatggaagaatctgagacagtagctctaacaaagtagtgtagtacaattctttaaaagaaactccctcctacactgaaatatcctggaagttttaccataccttgcactattgggaggcttgaaaatatccatgtattttgtgatctgggggctagcatcaaccttatgcctttgtcagtatttgagatgctacaactcagagaggcaaaaccaacaagtgtaacactacagctagctaatcgctctttagcccatccaagtggagtaatcgaagatgtccttgtcaaggcggacaagtttatatttcctgctgattttatagtccttgacatggaagaagacaacaatgttcctatcatattgggaagacctttcttggcaacagggaaagcactaactgatgttcaaaagggagagttaaatcttagagttcaaggagatgatgtagtatttaatgtactcaaggcgatgagttatcctaaagctagtgataattgtttttcgattgatacggtagacaaattggtggagtacaaagaataaagtgaagacccttttaatctaacttgtgtaagaggaggtggttgaacaagatggtaaaaaagtgatggaatatgctatgtggcttgactcttatgggccattaaacaaaaaatattatgaagagctaggagtcattccaacaaagtcagttccatctatcgagaagtcaccagaacttgaattaaaagttttgcgagatcacttgaggtatgagtatttgggagaaaataagacacttctagtcattgtgtcagcttccctttctactacggagatagaaaagttgttgagggttataaggaaacacatgagagccattggattacattggcaaatatcaaggggatcagcccctaaactatgatgcataaaatcttgatgaggaaggggcaaagccaaccattgatgctcaataaagattgaatccaccgatgaaggaggtcatcaaaaaggaagttctaaagtggttacatgctagggtggcctatcctatttcagatagtaaataggtgagtcttgtccaagtggtgccaaagaaaagaggaatgtggtagtgaagaatgaaaagaatgagttaatacaaactagaatgtaattgtgtatagaatttgtatacagtacaaaaaactcaacaaaagcaaccagaaaagatcacttccctctcccattcattgactagatgcttgacaaattggaaggccaagagtaatacagttttcttgatgggtattcaggttatcataccattgcaccagaagacaaagagaagacgatattcacatgtccatatggcacttttgctttatggggaatgtgatttgggttgtgcaatgctccaataacattctaaaggtgtatgatggcaatattttctgatctaattgagaagtgcatcgaggtgttcatggataacttttctatattcgattcgtcttttgatcaatgtctaagaaatttggaactggtattaaccagatgtgaagattccaatttggtgctcaagtgggaaaaatgtcacttcatggtaaaagaggggatagtgttagggcacaaaatttctaaaagcggtattgaaatggataaaaccaagatattgacgattaagaacttaccccctccagtatcagttaagggagttcgaagcttcttggggcatgctggattttataaaaaatttatcaaagacttcttcaagatttccaaactcttatttaatatacttgctaatggagtgccttttgagtgtgggaaggactgccttgaagcctttcaaattctcaaggagaagttaatttcaacgtcgattgtcactactccagattgggagctaactttcaaaatcatgtgtgaggccagtgattatgctattggtgcagtattaggacaaagggtagacaaggtatttcagactacctaccatgcaagcaaaatcttgaatgatggccaactaaattatgctactgccataatgtttgcatgtgacaaattccaaccatacttgattggaagtaaagtgatagtgtacaccaaccattcagtaatcaagtatttgatgactaaaaaggatgccaaaccgagactgattcgatgggttcttcttctataggaatttgatttagaaatcaaagacaagaagggcacacaaaatttggtagcagatcatctatcaaggttggagctcgaagggagcaagaatacaaaagaggtatagattaatgaagactttcctgatgagcagctgtttcttttggagtcaacagtaccttggtttgtggattatgtgaacttcttagccgccaacattacacctctagatttgacgaggcaacaattaaagaaattctattcggaagtcaaacattattactaggaagagcctatcctctataagcattgtgccgatcagattatcaaaagatgtgtgccagaagaggagatgttctctatattaactcattgccattgcttacagtgtggaggacattttggtggaaaccgaactgctgcaaaggtattcgaaagtgggtttttaaggcctactctatttaaagatgctcatcaatttatcaaggcatatgatcgttgtctgaaaactggaaatatctgaagaagaatgagatgcctttgacaggtatattggaagttgaattgtttaacgtgtggggtattgacttcatgggtcccttttccatcgtcatacaacaattcttacatattgatagttgtggattatgtatcaaaatcggtagaagtggaagcaacacactcaaatgactgtaaagcattgctgaatttcctttagaaaatatttttactcggtttggaactcctagagaaattattaatgatgaagggagcattttttgcaacaattagtttgtagccttacttgcaaggtacaaggttcgttatagaattgcatgaccttatcatcctcaaagcaatggccaagctaaagtttccaatcgggaaattaaattaaggctaattaggatttttgccccctaaactttgacatgtaccaagtcatgccccctgaacttttaag

SEQ ID NO: 164748 - DNA, 825 bp, Cannabis sativa
ttttttttttgctatgtaggtgatggagatagctagcgacacgatcgagagatatgagtctgtgcaattaataaattgataaaaaaatgttacaaataaaatgccctgacatgaacaaagcacgggaagtttcagtgcacataatcgtattacttaggtaagatttcagtgtctctgaaaaaattagagattgttgtaaatttgagatgttagatatgtttatgtgaaactgaaaaaattcgtgtggcatcgatctggttataattaccaatttttttttttaatttttttttttgcttcagtttatgatcgaagcaaaaaataattagcgtcagtacactaattttttgcttcagttatgaaccgaagcaaaaaaattttttttgcttcagtttatagccgaagtaaaaaaattttttttgcttcagtttatagccgaagtaaataatcaattagctccggttcataactgaagcaaaaaagatcactatttgcgtctacgattatagcgttgggtatacaaaaattcctaaaaatcgaagcaaaaaaccatttttgtagtaatgaatcttttctctcaaacactatagaattgttcttgctcatgtattgagaatccaattagaaccttatatacattttatcctactagcccacactagtccttgtgtatggtggagtatctggaaaatcaaggggtgagtttgacatcaccgttctaagaatacaaaatacgaaaagacttgaggataccctgataggcttcgagagataaactatcttttcaactattttatttttagatttaatatatatacatatggt

SEQ ID NO: 164749 - DNA, 2007 bp, Cannabis sativa
taatataaatttttaattttttcacagtttggagaaaaacaagaataaattccaaaaattgatttattaccattacttgaactgtggatagaatggttgatgacaatgattcacgtaggcttggacgattgatgttgaaaggcctaagaatcttttttctctagcttatttttttaagctagcttgtacttagatttattaacttgttaatacttggacgaattttacaataattgtgtaataaataattgtaatttattcctttcaaaaaaaaattgtaatttatataattgcttctatgaattaaaactaggtatattaactaatcataaaattaatttaaataatatttaacttaccttttagaaaaataaatatttaatttaaatttaaataaataatataatatataaattaataaataaataattcaaataaatggaattaactaaaaaaataattattacagatttggcgtcggttgttaggggtttatggcgtcagttatatactataaactgaagccatatgtaccctatggcgtcagttactataaaataatcgacactgttgggcaccattcagcgtcggttattttagatcctacagcatcacctggatcagcatcggtagcaaatttttgtaaaactgacactgaaaagcctttaaaacaacctctaaagcctagatttgtaatagtgctaggcgaagacttctaactttctacttttaaacatatgatcttataccacatgtttgcacctgatttatagaatattattataagtacacaagtaatgagtagcacaaatataaatctctttaactttcagtgtaggggccaagagaacctacaacaagaaactcacttcctcaagactacaccctaccactgttgctaaacatacctggaaaagagctgccattctcaacgaatcctacttgaagcgagtgattcttagcacacccgtgtagatttacaactatcctaagctggatgtctcgtggtttaggatgtaatagggcattccgaaacatctcattctggtgaattaaataaagccttccctgctttttattatggaaactcatttgcatgctagtgctattgaaaagtttaaattgaaattaggtttctagatgtgctaaggattgatctcgttggaggcctctttttgttatttactaattattatccgtattttcgacaaaggacgcgtgaattccacgtcagcatctaaagccaacaagtgggccttaaaaggataatttgggtcaagcccaagttagaaaataccttccaggaaggtacctaagctccatgactagatgagcttctaccaaggataacccgtatccggaagcagttccaataccgtgatgttaaagggccaaactgcgtgttccctgaagacttgtccaattttcctttttattcaagcacacggaataaagaattaaatattcctcaaaaatcttgacataagatagtctaaagctaaaaagaaaaattacataaatgaagaccaacaattaattcataattaattgtccacaatttaagaaaatagatttttaccgatgagttttcttgctagaaaaagaatgcataagtcgccagtattgttttcccgaagagcttctacaccgacaaagggtgccaacaataattcgctagcataagttgttttgctcgtgaaacaccatacctcgtcagctaaactatttatgctagtgaattaattggccgacataagttcccctactgataatgagctattagttgaggggtccctgacgacgttttttaggaaaaaattatgttaacaaaactttcccgccaatttgcaacaaaatttttagttttctggacatcgtacttcaccggcaaaacttctcaataaaaaattattttagtttctcggcaagatacagtttacctacaaaacatttttttaagaaaaaaattatattaataagaaaattaaaattaaaattaaattaaaa

SEQ ID NO: 164750 - DNA, 1395 bp, Cannabis sativa
ctaacttggaccctggaccccgaccccatccctgacttggacccaaaccgtgaccccaacccaatcctcgatccggaccccgaccccgtccttaactcggatcttggacccagacctagaccaagacccaaaccccaacctggacctagccacagactttggacccggacccagacccaaattctagcctcggcaccggaccgacttaaataaaatcaccaaataaaaataaaatttataaaacatatatttttttttattatttttaaaattgaaaaataaaaatgattatagaatatattttaattacttttcaataacaaacatttaaaagtaaaaaagtttatttttataattaaaaaatttaaaacattataaaacactttgcacttgatcaataagttaacaaaagctgaatatatatatatatatatatatatgtttatattgctatattataattaattaatctatgtagaacaaagatggtggatggggattacacatagagggacatagcaccatgttttgcacaactcttaattacatttgtatgagaatgcttggagaagggccagatggaggacaagacaatgcttgtgcaagagcaagacaatggattcttgaccatggtggtgtaacatatataccctcttggggaaagacttggctttcggtattatataaatatatatttatatgtatattctcaatattaaaatataaagtaatttatgatgtaaatatttaaatttaaatttttacatgaataaccatattaggatataattttttgaggtatcaaaaataaaaaatgctcagtacggtcaaaagtgatgtccctacctataaatatatgctttggttagggaattaaaccatataattttattattagagaatcacaccattaattaataatgtgtgggaatataattctatatataagatacatggactactcattttatagccaattaattttgatagaatctggtacatctcttaccatacattttctttcattctatatcctactttccacattctaacatttatttctatttctttctttctctcatatttttgtatttgattatagatacttggtctttttgattgggttggatgcaatccaatgcctcctgaattttggattctccctccatttcttcatatacatccaggtttgatagtttttattaaattttatgcatgtatatatactagataaaaaattaagtgtacaatgcagaatactttacaaaattaacttatgagaattaaagacatttctaacatgttatacaataaatttactgtggtgaatcttcaccctcaaaacaggttgttacagcagtaataatgtgtaacgccccgatattttgccttatt

SEQ ID NO: 164751 - DNA, 1535 bp, Cannabis sativa
  modified_base (1458)..(1484): a, c, t, g, unknown or other
gggcataaaacccaacagaaaggccacttaactaggctcttacaacatcaaatccttctatgcaagcagagttggacaaaataagagacatgataaagggcttagccggcccaaaatcataagaccttgaactagataggtaaaggggctctcctttctcggcatacattaatgcctttcccttgcctaaggttaaaatgtcagtatggaagatgtataccgaaagagaagatcttctcgcagatatcaagtacttcgagatggaaatagatatctaagaagtaactagtgatgtgcggtgccaaatctttctagctactctattggaaaaagcctagtaatggtactttaagctggctccaggaagattcaattcatggaatgaattttcatgagaattctacgcacaattctcatcctcaaggttgtcgaggtgaaataaagacaaggaaaacatttgaaggattatatccaaaggtttatggctgaagccacaaagatgaaaggcctaacaaatgaaggtcgttatacgaccatactaggggttatccttcaattgagtgaattctagaaagatatctggaggatctcaaccaacgacatgaaggagttccttgaacgagcatacgtcttcataaaataggaggaagctgtcagacaagcccagcgaggagggtaagccagcaataggtagtcttaggatgctgccccaagacttgccaaacatgcatgcaagtactactagtgccaactagccttctagtagtaaaatactagaggcaagcgtaacaacaatagttcttgttggaacagtggcaaaaaagagaagtacaatactccccctacgccacgaaaccaaaaggagaaggaggagaagtacacgcacttcaccctcctaactgagaaacttgaggccatttacatggccactcaggccactgtcccatagaaggagacctttcatataaaaaaaggagatgagaaagagggacatctcaaagttttgccgatttcataataattttggccacaacacaaacgagtgtcaaaacttgaagagggagattgaattactcataaggataaataatacccacttgcatcattatgcgcagaacaaccaagagtaggcacaagcagcccagattggagaccctattccatctttagtgtcgggtcacttggaggtcataatgtgcgaaccccatattgtaggagagacaagcattactagggagcactaggctcaaactctccatcatgagcctaaaagtgacatcctagacattgaagaaagaggctctaagcaacttaagcttggggatctcctttacagagggagatacatcctaggttagcttccatataatgatgccatggttatgactacatagatcgggaacatgatggtggctaggttcatggtggataacggaccctgttgggttttgtgccctnnnnnnnnnnnnnnnnnnnnnnnnnnnatttactaattaataaagaccagaaatcgtattttatgttgcatggttcac

SEQ ID NO: 164752 - DNA, 756 bp, Cannabis sativa
ttaatttttcttttgaatattagtagggatgttcactaagaattatatatatttatatatttatatacgtattgtacttgataaaaataattgatttgtatattcacattcctcacccttattttttattttatttttaaatgactctttctcgcaagtacagtactgtattatttttttaatttttataagatcatcatttaataaatttgattaggaaagaaattaatatattacttgtctttttatacatatacatataatacattacatgttaacatcaagagattggaaacatcaatatgataataagttaaattgttattttgatgaacaataacgacatatagtaattaataataacatattttaataaataatgtgcatttcttatttttttttcccttgtaaaagaaaaaactagataatatcgacaatgaactaaacaaagtatatgtatgcacattatacataatttatatatatattgcttatcgcatatatataattgataattattatatacctatatcaccatacacataatatatcatgtggtttaaatgaaacgaacaaatagataacatttttttagagtatatttctattaaacttttattagttaagttaagaaaaaaaaacatatattaaggtgcattcacattatggataaagaagacaagtaaagagtattagagttttatttgactaacctatcttatgaatatatacatatttttttttttcaaaaaaaaa

SEQ ID NO: 164753 - DNA, 1235 bp, Cannabis sativa
taattagtttagatggattgagcaatgtaattaattaattggtcttttctctttgttaactattagttattagtttgttagtttccttattatcacacctataattgtatcaaattaactagtatacatataatattcgtttgtttctttaatctaatattacttttcttacttttcagataaaatttgaaaataatcgagatgacaagcaatgtataatttgttcacgaaagaacattctctgaacatattgctcattgttttgttggtgattatgcccgtagacgggaccacagacctgcaattgggcttctcactttttcgtttatactttcatttctgtcaattttttttatctaaatatgaatatttacttattaatttgaagtatttttgtgattaatggtacttgttatatatagtgtatgaaacgtagcggaactagtatatgatatgtacacatattataaattcatcttatcttcttcttcttcttcatcattatcatcatcatcttcttcttcttcatcatcatcgtcatcttcttcttcttaactgtgacagatttttcttttctttttttatatttttgtgacagatttggatatggagtccaacacaagcatgtcatgggtgcacatggacactctgaaaatcagctcattctcactcagcctgtggaagattattttattagtgggaatcagtacagtcacaattatcgtcatattgcgtctgctctatcgattttaccggcacgcacaagcctagtttgggactatatctaatcttgttgtctatatctataatctataatttataggtttatactaattgaattactaaaatagcatttattaattatgaaattacaaaaaaagaaatctctcatccaccaaatatatatatatatatttattcaataatttgtttaggtctccaaacttttgttatgtaaaatttgggtatttatagacttctaatttttgtagttcaatatcaattttagtttttaatcacttcctattgataattatattagctaataatcatataacaacttaatcattaataatctacaacctctataaaagtgagaatattttgggacatttactaagtaaattatacaattagcttttactagatattaaattacaagaaaaaaaaatcattattttgataaccacaaactaaataaatttgctaataaaacaaccaaatatacacaatta

SEQ ID NO: 164754 - DNA, 1585 bp, Cannabis sativa
gtgtgcaagctatcttgcaaaaaaatttgtatgtgccaaacttttatttgcttattacaagaactttatactactacacttgcattagtgtgtaattatttttgcacagtatatttggattggtatgggttatccttatcatttctatatgaaggaatgttttaatcttatttattatgtagggatttagttttggacatttttattctcatgtattgaattaatttctacatttgtaataatttattccctcaacttcacaagttcatgcatttttttcatgtttattattcatagctgattatcaggtttatcttattcatacttttttctcaactttacaagttcatgcctttttcttaatggtgttgctggttgattgcttatgagggggtttttagattaggatttctgttaattgcttgctgagtctcgatgatggcgtcatggtcggtggtgtgcttgcaaacattgattcggtttctagggagatggtggtggctgaggcagaggcttcgaaaccaggtcgatttgggaacggaaagggttggaaggtagtagttcgatggaatcataatgttcattccattcttgactcgccaaagcttgaatcacattcccaaatagaccaattattgaggtatttgtggtctctcatatactttgtattcctagattcagaatgtgagtgcctttgattttcagtctatttattatttgttgttgcttagttttattgtttacagtttgagaatttatgaattttattgtttattttatgagttagtgagtgataaaataaagaacacgttttattacttaatcatctgcaggataagttcggtttgcttcagacatgaaggctttgagtgatgattttgaaagatttatatcgtttaatccatgacatatatatcctaagcaaggtatgatatgtcatgattatgaatattataagctctatatataagtgaatggaacaataaataaagaacaaatcaaatattatgtcattcttttactacgaaaagttccataaattatcatggtggtttcaaaacattagtgccttccatatatttttgtttggaacaaattgcgaacttaaaatatgtttttacatcattattttttgggggttggatgttatgtttttcatcataggaattcattatgtaaattgcaggagcatgagaagatgatacaactcaccatggttttcagagcacatttttttccatatatattattttgtttggagttcttgttgcacaatgaatgttaattctgccaaagtgaaatgcatcccaactagtacgagtagtaccattgattctttctgcattttgaattctaaactgaatttattgaccatgtctattcatgtgacacaagaaatatttttacaatattaaatttatttgtaatttcataactactatcatagctttaatgcattattataataaagtgttgaatgtaatttctttttttcgaaaaaaatgatgtaatccttaaacaaaagatatatccaaaatcttaaagaaaaaaaaagaccaaacttcaaataaaactaacaatacgt

SEQ ID NO: 164755 - DNA, 533 bp, Cannabis sativa
caaatgactaagatcaaacatgagaaaacacaaatctcctagatgcaacagctcgggaatgccaaagattgccatcaatgtggtccacaaaatcaaggacgtgtacattaattatgatatttgccttgaatattttgctgacatagccagctgttagtccataactcaaggcatcacgcgctcatgcgagtcgtgtgacagacagaccaaagaatagttgacacatgtactcctctcgcaaagtattaaaggttcacgagcttctgcaacctcccacttcaaaatatcaaaggatggaaatcattcatggccccacgtaccataatggatccggatgaaggctataagccttcgtgactcttcgaaaaactcagtaaacataaatatattcttaattttatatataaaaaataaatatagattttatttataaaattgtatgttaaattttaataataatattatacattaataatactaaatagatatttaagaaatgggaaatactattttagaccctgtgttttgtaaaa

SEQ ID NO: 164756 - DNA, 772 bp, Cannabis sativa
caacgtgtatttaggcacccatacatctatgtacaaggcttatcaaataagaagaacattctttactaatgtacgaccactgtagcacatgcactacctactgctactgtacaagcgtaggtagggtttgccatgtaccttgagtaccactaagtgttgtaccacataaacttcgtactttccattaatagtattggtaacaccatactgtactctttaagcattgtacattatgccaatgccctcagtacagctaccgtactagtgttggtagtgtacgaattacaataaatatgcatataaatcacacatacacataatcacatatatgacatgttctatgctattcttacctcgtttttgaattcaagtgagttggccgaccttaacagaaaacctcatgctagatggatgccccagtcacaatacataaactggtaaacgacatgccaatgctctgaaaataagacgaatcgacaaatagaacaatatgggaaacttgtccctaattcggttaatcagttttacaagacttgtcaaaccggttaatcggtttgcaccaggtttccccaaacagtttgaatcttgcctaaattgtgtccaaatcaagccaaaccttccaatacacctactccaacctcaaatagcatattccaagcaataaaacctagaaatacacattgaatcaaaaagtgcaattaatgactcaagtttgagttttcaaactcaaacttgttcattcaccatcaaacacaccaaaaccagcatcaag

SEQ ID NO: 164757 - DNA, 1129 bp, Cannabis sativa
atccaatatgcttctaattatcatgatattatataatcgtgtcacaacagctatacaataattgaactttaaaccttacaatcttttcaaagaggtcacatgtgttcaattattatcataatatttatgtaattacaaataatatttaaattctacaaacttatatattttattatataaagaattttaagtttaaggtgttattaacaacatataacatagcttagctagctttccatgattaatccattaaagaaacatgggtgatttaaagaaataaaatttaaaaaatatttatttggacgtttttatagtgcatctctaaaataaatatattgatgcatttgccgtattttcaatatcacgcaaagttttaagaaataattaagaataattttaaaaaaattaaggtttaaattatctatttgatactcatataaaataaaagaaagacgcatgtaacaaattatttaaattttatatttaacctttacacattattcaaaattttagaaaaatttatataaaatatattaaataactacaatacatttttaaaactgtttgaaggtagaaaacacccctttttagaaggtccaccatcgatttttcttgtatttttttttttgtcataaaaagcaagaaataattgaaagaattacagctagaataatttttctattggaatcatattctaaatataatataatagaggagaattaaagttatagcgcactacaattttattcaataaataatatttttatttttttttggtccatcaatcttttttctttaaaaagaattaaaaaaataggtataaataattttgacaagaactgaaatgaagatgttaaaacaaagggaaaattaataactaaattattaattaattaatactatatatattatcaatattatcacctcattattgaaaatatgatttttagtattattgataatatactatcaaaaatttaattttagtgataatcacaatataaattttctgtgactaaaatttaattttagctatattttatacaaaaataattttgtaatatttttacatcaacttttattattgtactccaatacataattgtaaatcttgatgtaaatttaatat

SEQ ID NO: 164758 - DNA, 1217 bp, Cannabis sativa
tatatattatcccgcaaaaagggtcatgatgctctcaatttcatattacttaaaaggtcactgtgggatgggatgtggagttttattcgtcatgactcatgtaaagtctactacattttacttgtaaaaagttttatggcttgtaatgattgtagagttcaactaacttcatctttgtttcttcctcaattatattccttaacgtcggtttgattgaacaagtattcatatttttatcatgctaatgatttgccatctatgttcatcttcaaatttcgacttggtagttgctagattctttgtacaatctgtatgagtagtgtttttttattaaataaaattggttctttctcagtctaatagatttatccgtgtccttttgtgcagtttcttttaataaatggcgattattagaagtgctaattaaatgctttttaaaaagaaaataaagtaagctaactacttttttaaagtatgacgagttgttatgtgcagatatacatgtatagtactaataaagaagttaaataatgaacactaaaatgagttgtttatcataaatagatatgtaaagggacagcttaacacacattctttacactaattttacaccatttgattaaaatgatctaatagtcatgataagtgttattttaatttttacacaaggtgatgtgacattttgtaggataatatgtgtggagcatgtttgtacctagacatggtattcttattcagggtaacgtctagaataattcaaaggcaaaacgattaggtttagtttttcaacaagtattatctaaacaggttccatgtcttgtaattctctaagcaaattaaatatgccaaattgagtttcatttttcatgcagagatgtggtaattgaagagcttcaaagatattgtaatgaccgtttaactttatattagaattaaacagataattaaggtttattgttaaaaataggctttaaattattattttcataattttgaagatatatttgaattctagtcatattaattatgttatatatgaaattttatgttttttatattttatatctaataatagtagaattcaacgatttggccattagattcatttagatactagggttgagcatcggtcggtttggtcggttttttttctatataaaaatccaaaattcgattttcggtttggattggtgcaattcgaaaaccgaccgaccaat

SEQ ID NO: 164759 - DNA, 1160 bp, Cannabis sativa
attagtgaaaattattttaaattaaactcttctaaacacagcttaaacgtaagaagtaaaatctaacttggactagatttttaggaaggaaaataaaaatccctttgaaatgccaatttttattaaaaatgagtacctttgaaaatgtttttatttatatttatattaaaggaggtgagcatttgatcttttctaatattctagaagttggatgtatatgaacacataaattgaagcatttcggttatttaaggtgagaacgtgatcgtgaccgatgtagtgatgaatggagattttatctagttctaaaatgatatgatgaattattgaacaaggcaaccaaaataaattgtctagagtttattggaaaaataataagaaactaaaagaagaatcataattgatgagagactgatcatctcagttcaattatttacaaaactctacattttgtactttgaaattcagttttgctttcaagtatttaggtgaaatatacaaaaaagaaaataacataatgaattgattattaagtcttttaacttcttctgataattaaaagaaaaagtgttttaacttccccagaatatcattgtcggaggagaaaaagaattatatagaaaataattataaattttacactttaatttgatcaaaatatacgtgattattgttattatatacgagtaatgtttaacattttttataattatcgtttcacgattagttcataatattgtttaaaattatttttttaaattatatagaactgatatttaattacatcaataataatatgatactgaggagactcctagacactaaaatactttttaacaatcactaccactaaagttttaattaattaaaacaacattttattatacatctactagttactccaagccctcaaactattctcattgtcatctggtttgccaaacgaaagatacaaaatcagctctattgtggttaataaatgaatatgagataagaatttataaaaaagtattattaatgtctagcaccttttttattggtacaacgctattttttttgaggaaaaatggtaactttattaataagaagattcaaccattacaatagaaagaaaatcagcaggaacattatcctcgctaaaaatacgatctgaatacaaa

SEQ ID NO: 164760 - DNA, 1264 bp, Cannabis sativa
  modified_base (484)..(487): a, c, t, g, unknown or other
tcagtgttgccgcgtgtaagtgtgggaagtgactaattacttatcatcatcaacatgggaccaaattgcatgttacttgaacttaaattgggccgacaatgggcacgttctggcccacaaagagaagtaacccaaacaaatgaacattttttggctccttaaatttaggacacaaaaaaattattaataataataattaaaaaagttttatttagattggagtcatattcaaatcgatccctatgaattaattcatctttgacaaaattgtttcctcatacatgtgctaactgaaaaggcccccactctccactctccaaagcaaaacaaattaaaagaagaataacaaagaaaaaaaatatattaatttaattaggttatatatattttttcaaagtagtttacttaataacagtatacgaaatttgtcggtaagatttagatgtttatcgatttgggaattattttaaaaatacaaaaaaannnnaaaaaaaattataaaaatagagttatatgaaattttaaatatttttataatttttataatttatttataaaatatatggtcttttgatatatgtttatattgtatttatgtttatttgttattgattttttattatttagatattacttttgttattatttagatgttattttaatgtaatttttgtgttattatttttttaaaaaaaacattttatgtaattatcccctatcaattatatgtgagttagatattttctagaaaattataatatgattttctttggtcattgacaatgatttgtaaccattaattaactaaagtatgtattagttaatgaaataatttatttgactaagtctcccaaaattttacttcatttattagttttttttttttcctttacttttaaatttaaatatatttttgttgagaaatgcaaaagaccaattcatgttgtttacgtgatttactttttcaagacaaaagctgataaaagaatcttctgtcttaagtcgagatttggagaacaaatttaacaacttatatttatttatataattaaagatatgtttaattaaatactaattaatgattatatagctgacaatgcattcccttttctaaagcttgctcatctttttaacatttcggccgatattaaaaagaaattaaaagataatcaaatgtaattatttgttgttgtgtgtgtaatttaatatgaaatatatatatatttaattatactgatgatgatgatgtctcttaaatatatat

SEQ ID NO: 164761 - DNA, 839 bp, Cannabis sativa
cttgttctgacatccttgttttacgcatgtgcaactatgtctcagatgatgttgtgcgcattgaagaagaggtcaggtgatgcctccggccagaagtctccagtgaagcgctctaaggtggacgatatgccacccaagagcatcatccccagcaccaagactcctcagttgacagttgagaagagcttggttatccctccaacggaggtttacgaggaagtagtaccaaatgtaaacccaccggccaagaagaactcaaaatcccagtctacggttgccccgtccaaaggttcaaagggaggaagcactaatgggcttggactacccaagcctttagcaactcctactatcctgaacctagagactaagaagaggaaggagatgcttcagttctattaggattgagtgcttctgaagtgaacgaccagctagccggaggggaggatatgtttgtggagcttctcatgggcagtttcctaaaggaatccaccaagtaagtaattttcctttggttttctttcacatgcttttatttctgtagactttaattttacttcattgtgtagctcaacctgaaaatggcatatacatactcccgagccaagtctacagccttaaaagctacaactagcaccaccaacttgaaaaaggaggcaaaaggggctaaaaaggagaccgagcagaagagtcaacaactaggcgaggttaacaaatagctcccggcagccaactgttgtgatattttacacacgcaagtgcacgtattgtttacaagtaatagactcaccaagagtgaggtcgatcccacgaggattgtagttaagtacattaaaattaaa

SEQ ID NO: 164762 - DNA, 1302 bp, Cannabis sativa
accaatcatatcccatttgttcttcgctaatgatagtattctttttagcgctgcatcccctgttacccctaaccatatcaagaaactccttcatgattacaacctggtttcgggccaacttgtcaactatgataaatcctcgctctatttctctcccaataccattgacgagatcaaaaatcaaattacttcattgctcaatgtgcctattcgtgattctattgagaaatacttgggtctccctcaatcttttggttgctcaaaaaactaagctttcacctaccttcaagatcgtgtgtggtcccatttaaacaagtggaattccacttttttctacaaaggaggcaagaaaatcctccttaaattggtagttcaagctataccgtcctatgccatggcatgtttccagttacctcactatttccacaaaaaatgaagtccatgatggctcaattttggtggggtagaactgagcacaacaagaaagtttattggaagagttggtcccacctttacaaatctaaatttcatggaggcttgggttttcggccaatgaaagctttcaatcaggcaatgttagccaagcaagcctagcgtcttcttcagcctccttcctcacttgtagctacccttctcaaggcttggtattatcctcattccacattccttgattctggtaaagggcactgcccttctcttatctggaacaacatttcttggggcaaagcactcttcttattgggattgcgcaaaacagtgggtaatggtacctctatttctatctttaaggatgcctggattcaggattacaaaaaacttacctacctcagtataccaaacacccttaacaggaatgtgtccagccttataatagccaatggagaatgggatgtccctcaaattcaatccatctttccaaacaatgtttggcaagctattcaatctattccactccttcatccactagcccaagattgactctattggtgtttcacccccacatggaacctatacaattattctggttaccatcacaaatatgacattctacaccaatttgagccctcactttcaattacaattaaccaagaaaaatggtagaagttgatctggaatttgaagatacctttgaaaattaaacattttatcaagcgggtgcaccgtgatgccctgcctactagtgtgaaccttcacagatcggaagagcggttaagcaggaatgccgagaccgatatcgtatgccgtcttctgcttgaaaaaaaaaaaaaactataatctacacattgattcttttttttttcg

SEQ ID NO: 164763 - DNA, 2899 bp, Cannabis sativa
cgatcttggctgctggaagtcatacctccgccgtcgccgctgactcccgggaacacgtcgtcggaaagtggttctcggcgcccgacatccggcttcgtgaccaccgattcactgtacctcttgactactcacgcaggcactcttctcctaaaatctctgtcttcgctcgcgaagtggttgcaggttcgttgttgtgtttgacaatgtaacagatttttcaatattttattagattcgtgctatatgtttatgtgaatatttacattcagataaaatcaatctgggtttgtttctgcttacaagtttttgaatgttagaaatgtttatggttctgctgttatataaaattataaatgatgttgacttttaatttcctttttcatatttctaattcggatttatgaatttttagtcgatcattcccactttttgtttccttagtagattcgttaccccattagttaagctacatgattatgtaatttgttttactgtagaactaagtcatggtgatcagggattatatttctcgtggcatctacttagcaatgtgacggtgtttctctaaagaaaaggggaaaaagaagaagaagaagatattttcagcagcatgcaaaaattagtaattataaactgaggcattacgtagtgaaaacaaataatctcaacaataaactatgtctccagagtgtaactatattgattgcttgactaatctgtacacggatatacattatttctatatgcaggactactaagaagtatgaaacatttttcctgttagccccgttgctaaagttgaattttccttgcagctgggaaagaagagcagccattgccttacttgttattcctacaaggtggaccgggatttgagtgtccgaggccaaccgaagccaatggctggatacaaaaagcatgtgaagactatcgtgttgtgttgatggatcaggtgttgtttactggacattttcttaagatatgtgctatgatatttgataatacaagtatttttattgatcttttcattttacttgtagcgaggtacaggtttgtcaactcctttgacatgttcatccatgttgcaattgaaatctgctgaagatttggttgattacgttgaacactttcgagctgatagtatagtatatgatgccgagtttatccgagttcgccttgttcctgatgctggaccttggacagttttgggtcaggtagttgttacaattttttgctggactctgtgtatgcattaattgagcctctggatctagaatcatgtcctacctatccacgaacttgctttattcaagtagcacattttaacattcatatcagagattactgtgctaatgcttaaaaatttccttgtttttgaatatttttccatgtacactgatacttattttatcttatgtttgtttttctttttccttcctttcataagaatgctcagcttggataaggttttcgtgttgcttgtggtccaatgaagccagtctgagtcataaattaaatgacaacttgttctttttgttgtatagagctatggtggtttttgtgcggtaacctatttgagttttgcacaagaaggattgaaacaagtcctcctaactggaggaacccctccacttggaagtcattgcaccgcagatgcagtgtacacagcgtgctttgaacaggttaaacttcagaatgagaagtactaccagaggtatcctgaggatattaagattgttcaagaagttgtcaagtatttgtcagagtctgaaggaggaggggtaaggatggtgtatgtttagtccttgtaattctttctaacatttgactgctaagcttaatcttagcaatcctgcaatctgtaggttgaacttccttctgggggcatcttaaccccgagaggcctgcaaactcttggcctctcatgcttaggttcctctgctggctttgagcgtttgcactacatgtaagttttaaggatatgtgtcatggattttaagaacttattggtttactaattcttttggtttattttttcaccttttttgttcttataatctgcaggtttgagacggtttgggatcctgtattagttccaggagcaccaaaacaaatcagttacaactttttggacgctgtaagacatcattgctctttcattgttgctgacctaatgatgaatcttattcatcgcattaaactagattcattgtatatgtatgcagtttgagaagtccaatgctttcaacacaaatccactttatgctcttttgcatgaatccatatactgtgaggtagaatacttcaattaataaactttttggtatcttgattggctaatggatcacctacttgctcgattaactttttattgttaatttactaatttgttttggttttcttttcactcccttttgaagggtgcttcatctcgctggtctgctcacaggatacgggctgaccatgacagtaacttcgacgcaatcaaggctgctaaagaatctcgtcctgtacttttcactggagaggttagttgcattgtctctgaatcattaataattaactattccacaaacaagcatgtgatgcatatgccttgacttctctaaagtagtctggtataatgtgtgtatatggaatatttaggacatcatgcattctaaagcctactctgcatgtgctagtaaatcttatatcaatatcctgatatgaatactcgtagcttggatatatcaatgcatatgttagtaaatccatgctcttttgctgcccttctccacaagcattacctgattttgtactctaacctctgtgctgttgaacatttttccttatttatgtctcaaacataacttaaataaattaggatttttgcctcctgaattttgacatgtaccaa

SEQ ID NO: 164764 - DNA, 833 bp, Cannabis sativa
aaaaatgtcaatttattagaatattataatatattttgatttctactaattgttatccatctctcaaaccctagcacatatccataggtctcactcaaaatctatataaatattattgttatcatcatctatcaaatttattatttttttttaacaactaataatttttattattgatatattattttttgacaagactattgatcaaatctttaaacttcaaaaaaaagaaaaatctttaaactagttttaaattaagaagaccaaataacgattaataaaaagaattaaatgaaaggatagtggtatacattctcatatatccaaactatattttattccatatatatatatataactataatatatatatggacaaaatgtgattattttttctaataaaaaagcacaaaaattttgaatttgaatttgaaaccgagatattatctgcatatttaaagcttctcaattattatttttaaaataataatgtggatttatatgaagaagtaaggcgtgtgtaatacatagaactaaaataaataaatgataataaatttatgaaaatattttatgatatatatttatagatattattgttaaaaaaaatatgtggtgtcctccagtcattataaagttgatttatcatatttaaattaatagacaataagtcaatcaattaaaaaataatattttgttaagacatattattggattaataatattgcatatataaataataaaaagtattatatatataaccagtggtggacccagaatttaaagtgagggggggcgtaaataaatttaaaaaaaaaatataaagtgtagtt

SEQ ID NO: 164765 - DNA, 2921 bp, Cannabis sativa
caaatataaaataattatcaagtgcaaggatttacgacaaactgtcgaaaacgtatcgacaacatagatataataaaaatattaaacacaaaaagcacatcatcgataaggcattgacaaacaatttttttttttaaaaaaataaacataacagttcaaaaaaattaaatgatcatacctattttgaaaataatgaactgatttccttctttcccatgtcagccctgctggtccagcttagcatcctgggagaaggaatcccctgacacgaactatacttcttccccacctttataatggcctcataggcccaatactgtaatgcaggtgcaaagtcataggcagtgtatttgcattcgtgctgattatccatcttcaacttcttctcataatttgccttctgtttcaacatgtctttttggagggtgtgcatcagtctggaaaatgagtagttaccccatggaatcttgaaggaaaaatcaagatcttcaacccattttagtatgtcagttgtaatacatgtatttgcctctcgacctagtaagacagtctccacaaacaagcacaaccctagcttctacgtgtcttttgggatctcccaggctaggaacttattctgaagtaattctgtctttacattatctgaccggttgaaatagagatttatcaaccggttagtccctgacttggcttctttctcatcgtctgttggcccctttgtgaagttgaggcctgtaatcagcgcgaactcgaccacaccaaatttcatctcattttgtgcaatgtaaaaccgcatttcatcatccatctcagcattcacaatcattttatgcagcatcagttggtggaatagtactgacaaaaatgatagagcaccaacctgccaaaattaaccgaaagggtctgcctttgccctatcagtcaaactgtgcttctcaaattctagtttcatcaacttgctaaaaacaccacttcctctgtatgtcgcacgacttgtaaaatgcttagagaatggaactataagcttcggagtcatttgcaaaatggaaaataaagcaaaaatgtcatcgaaaaactatcgaaaaaatatcgacaaaattattattctttaaaaaataaagacatgcaaaccatcgacaatatatcaaaaatatgtcgatattgcatcaacatccaaggaaaggataaaacacatatcattacaatatttgtcgacataccatcgatatcatatcgttatgaaaactatataacccggtttaatttctttgctataatatcgacattctatcgatctcctgtcgatatcctattgatgaacattttaacaataatcctgctcaaatatgtcgataaaccatagataatatgtcgataacctattgatatacagttaataaaacaaaaaaaaatgttcaaacaatcaaataccccattttgatctaccatcgatatcctattgatattttatcgataacactgtaaaaacacagacaccattgaaacatgtccaacatctacaacctatcaccagaaagagcacaaaatctacaaaaattccacacaacatgcaaaaattggcatccaaatctatgaaaaatatattttttttttcaaaaaaacaccttacatttgactgagcttggtggtggcggcggcgacggttcgtggtcgtggtggtgatgacctctatttgatttcgacgaacacaagtcgtggtggtggcgacggttcgtggtggttttgacgggtatggttgggttccaatgtgggtcgtggtggtttgggtcgaattcgagagcgagacagagagagagaaagagactgatagataaagagagagggttgggtcgtggtcgttggtggatggtcggcgtgggtggttgggtactcgtgggcagcgacgaaggtcgaagagggaaagacagagaaagagagggaaagacagagagagagagagaaagggaaagacagagagagagggaaaattaaatgtgaggtagaatagtagaattattttgtataaattagtaagtggtctaaaatttgatatgtggtattttattaggggtaaataatgaaatttcccttctgtaatctcattacaactaggaggtccaagttaaaatcccacttcctcaaagtaaaaaaaaaaaaattacgccaaatggcattaatttgattttatttacaattttgattctgtttatattaatgtagtttataccgcttattttttaaaacttttattaacacgtataccaattgtttaattatacatttcaattattcaataagctttatttcattttctttgtattttagattttttttaatttatttaaataaacatacataatgtcttaaataattagttcaattttatatataaataattttgttctcttaatatattagacaactttttaatttctaaaatatgtggtatttttaatgattaccaagtgcttcaattcatacatgtgcaccacttatgtgtcattatattatagcttacacacaagtcacaacatatactactcacttttagctcatcacaattttattaacgccaaccacaaaattaccattatactctttttactttaatgtatctagttaactaaaatttaattaaataagatttattataacaacaaaatttataatttactaaaacgtttttttttttaatttaaaagttattaaatagtaaattttattctcccaatttttttataataatttaaaatttttgtaaataaaatcaattttaagtataatattaaaaaaactctaatattataattgttgactggattttagccaaccgacacggagtcgtaataaatgagatttaaacaaaaatcacaataataatgcagttaataacaccagaattcgcaataaatgtaaataaa

SEQ ID NO: 164766 - DNA, 1023 bp, Cannabis sativa
ataaattatgcaaaatttagcatgaaatttcatgttggtgaaaagcctcctatacgttttttgtacaatagaggcttaccaagtaaataaagtacattatgttttttgtagtctttttgttatgtcattccttttatctggctggcagtttttgttaagtttggagttgagtaatcttgttcttagtggatcctagatggcattaaataatcccaaggggagcttggattagataagagtgaactcttgtggagagaccaatccttttgaaagattggaataagagagacaggcctcttgaatgcttaatttgtgtactgtttcagcaattcaatgaaatttctttgtggaatttcattattgatttttatttgtgtcttgattgctgatagaatatttctactctaagaaaatcctatcagttgttctcaaatttattactaataacttaaatcttgcatcatagatgcaattataaaatggcatttaatattattaaaacctaacaaacaatggaagactctctaaaagcgctatcaggtacaaagaaacaaagatattaagaaaagctaataattgtaatcataccaatgtagcacattcttctccaagaccaggtccagctgcagcatgcaagccagcactgctgtgtgcttcatccaagttctgttaggcatccaattaaaaacatatcaagaatttagcatcatctcatctcttagtaaaccaaaccgtgtttgcacaatgaaaccctctaaccagtaaatagcttactggactttgaatgtattgagtagaaaactaaaatcaccttctgaaattttgtaaattccttgaggtgcaaggttaagtagcagaaagataggacagaaaaagtaatggacgatgttcagaattcggcaaactgtccgctactgcccttactggcactagtgggtaatcaataggaatttgaacagttcagagcctttagattatcacaggactggataaaaaatatactaatgtttttttttttttttt

SEQ ID NO: 164767 - DNA, 1252 bp, Cannabis sativa
atgtattatacttaattaagaaaaagaatcatacaatttgttagaacttttttttcttaaaaaaagaaaaaaataaataaaaagataagatagactgtccacctatggttctacattatgaagaatgggtactatgaagagtgaagaatggcaggtgagttagttgagagttgacacataagtgggaagagaaagaaattttgtaagaaacgagggaccaatatgtaaagtttgacaggaatgacagttggtcattatttcacttcacttaagtaaaagacataagaacacttgtctagagctaagtatattcaaacttcttgccaaaacaatatacagctaccacatatttcatattcacacatgtgctagattaggtaacacgtgtcacgatccaagtagagtaactatcattgcttacatgaaatatgcaaacaattaagataataagtccaaagtataggtgggataataatggtatctttgaatattctgagtgctagaacgttgaggagccaaaatccattttagtttctagtttaagattatttactccagttctaatcctgccattgataatgaaataacattttgtcattttgtttcacagaaagaaatggattataagcctatcactgtctgtagtctgtagttgtcaattttttactacaagtttctatatgcaatcttaatagagtggatatccattccctataattaatagagaaatgaaaaaaagaaagtagaaaataatccaaatcatttatagtgatttggatacccaatatcattacgtggaaagaaaattggcttttttaaaaatactctgaaaataatacccaaagttgatgctgaaattagcttaacaataaatttatagaattctttgcaccaggtttaatcttatcgaattacaatattgataaataacgggtcatcttcatgataggataaatctctaaatacactctttgagacagtaccaatctcgtaattgaattgaagttctattttctcaatccataactacacatttacatatttataagttttcttatccttataatttactaataagcctctatacataatctattatttttccacccttcaaaatcacttatgctaaaaacaaaaataaaatgccgaaacaaacaaaataataacaaccatactcaaatgcaacccatttatcaaaatccaagttcatatattgttggaaattattttaccaggatcttagatcaactca

SEQ ID NO: 164768 - DNA, 1955 bp, Cannabis sativa
  modified_base (1604)..(1608): a, c, t, g, unknown or other
tttaaactttgagaacatcctaatatatttttagctctgaaaatatgtaacgtatggaaagtattcttataaaaagaaaataatggactttgaattattttcatggtcagagattagacgcagaaggtatgatatatataaggatgtgctttcaaaatggaatgattaacaattgggagatatattagtatgtcacatgaaagaccaccattttataatgaagttagtgtctaaagataaaagtgagctcactgctaatcttgctatacttagaggcacccctaaccaaaaaaaatgcaatttgtatatatgcatatacaaatcaaagtaaatgagaagatattattattctcttatctcaagatagaaaagaaaaatattaggtcattcggcaatttaattcaatattttgtcatttattttgatggtatttaatactgaaaacaataactctcagcgtatctttatactaatcgacattataaagtaagtctttggtagaatcttacttcaaccgacaagaaactacttaaaatattaagaacatgttcttactggaagattatgtggagatatttactattcttagttatacaatctaaatacggttttttttacatttttgtgaatgttctctttatttatatttttatggtttttggttgtttcatcattgttttcatgttgtagcaacgttatcttatatttctacaacgtgaaaataacgtgtgaacaatgactcttttaaaatgtctatacaacagtctgtaagaaaaaaaaattcttaaaaatgtaaaaaaaaaaaaaaaaacctgagaattataattttttttattttttttagtatttttgaaataatccaaaaaaaattaattttattaaaaataataaatttaaattaatgtaaaaaaattgtttcattataattaacttgaaaaattctattataaaaaaaatcaattgaaaaaaggaataaaaaatcaagatatttttattataattgttaagatatatttccttataacaatatattaattaatttctgatttaggatttatacaaacactatttcaaaagaaatgatggtatgttatatttatagctgtaatcttttcacctgaataggtgtgatatatagttcatagtacatactatatatttatgtgtatcaatattaccaaagttgtagctttcaaaaaaaaaatattaccaaagttgtacaattttttatcataagggtgcttgtattctattttggttatatctaatcatgtttatcacttattatatatatttctcacgtttcaaaatcaccaacaatatattactattttttttgttgagacattttgtaataacatattgactattaaaatatatctcttagatatatttttttttcaaaaaaaaaaaaattatctaacacaatttgctatatgaatgaataaaataaaataaatttataaaattttaatagaacaaattacaatctgttttgctctattcttacttttattgtcgttaatgtgtacacttaaagtgcactaaaaaataaagagatgatttactttaaagaagaaaaaatatttatgtatttttttttnnnnnaaaaaaaaattgtattttataaaagttagcgataggtcttgctaaataacaatttgaactctctatattattaaattataaacataagaataaaccgtaagtctaattcggatcaaattattttagggttataattattagagattgagccacaattaaggagaagagaaaaagttagggctataaagagtaaattttagggtttgagttaaaaatatttgacctaaattatgaaggggaatccctaaggttatgattttttaaatatcaattctattattacgatttttacttttgtttcttatttttatagtttattttatctatttttaggttaaaactcaaat

SEQ ID NO: 164769 - DNA, 1966 bp, Cannabis sativa
tgagtattactatagttacatattgatggtgcaattttactaagagtgtcatatttgtactacctacccgtaaatcatatttatgttttcagtatttgaagaaattataatttatcttttaatatgacagtttacattataattataataaatctcccattaatttttgaaaaattactgaataaattataatatcgaaatagttcaaaataatacaaattgcactcgtataagaaaaaataaatacacgtgcaactgaaatatttgaatattattttaagcataatcaatttcttaaaaattttcgaaaatgggtggattatctgttacatctataacgtatacaattatatagataaaatatttgagttataatttttttaaatattaaaagagtttataaaattaatttttcatatattagtgtatgtagctttgcttacaccattgatcggctcaaaaatcctccatacttctcttgtagtgcttgtggagaatcaaagtgcaaaagggtcacatagggcttgatacctaattatataccaaagagaatatatattattcaattatttttagtacaaaactacttataattagtaaataattttatcttaagtgcatgaccttcatatttctcaattgaagagtaataatcttttttaaaaattacaatgagatattaataaaatataaatatcactagaataaaattaaaatattccattacatgtttcaaaaaattgactaataaaaaaataagtgctatattatatattttggtgatataattgtcaaaaaaaaaattgtggtgtaattgaattttttttatttcttaatatttgattagaatatttaggttattaatttatcaacataatatatgtttactcatatttttttcttagaaattataattgtacttcttatgtttttttttatttgattatttaaactcttattagttttttctaatggattaatacaccaataaatgaaatataaaatgtattggttattcttacctcttttgactaattcattgatgagattattgtagtgactaataccagcttcattcactccaccacttagtgacccatctaaaaaaagaatcatattttcaaccaaaaattaattactacatcacaaataaatcaagaaaaattaattttatcaaataaaaaagatgccaattaaattataaataataaaaagaaaaataatcttactaggtagaatccttgtccatgcaatagagaatctataagactttactccaagcttgcttatggcctctatatcactctacaagatcacatttttcaataaataaagtatataaataatatcaataaaatatttactttaaattaattaaaatatataatagtacaataaaatacttaaagtactaaaaaaagtctttggttaatataatttaaatttgatccacctctttctcacattttaacatatcattactttaaattaactaattatgttaactccaattgatccaaatcgaataattaatgatatctatcaactaatcaatctaatcattttatgggaccgctactttatattgactcccacattagtatgacattgtccactttagtttaagtcctcacaagtttatttttggctaccttcccaaaagacctcatactaatggactaggtggaatacttatatccaagacaactcttgcctattcttccaatgtaagacttggattgatactccaataatcatcccctcaaaccaaggaccacatacatgactttccctccagcaaaactactttatgtcgccgttatcaccaacggaactcgccgcctgaccattacctttatcaggaagactttcgatacaagttctagcaccgatctccatcttgcaccgttgtaatcatcaacaagactcgccacctgactacctaaatattaagtagactttcgat

SEQ ID NO: 164770 - DNA, 1580 bp, Cannabis sativa
  modified_base (453)..(461): a, c, t, g, unknown or other
  modified_base (1551)..(1555): a, c, t, g, unknown or other
tggaacagcagctcgacgctttattgggctctatatcataatattcataattctaaagagagacatgctaaaatacttttcggggacttaaaattaaaatttaaaatttccctatcgaaggataacatgacaataccctaaatatcacaaaaataagaaaaattagggtttgcaaaactgctccaaccggtagaccggttccccaaccagaattacattttggtagggtttcctggggaccaacctgtcgatcggttcctacaggtccccctgaaccgaaattccagttttgtgcagggaaacccaaaaatgcacctaatatctctgaaattaaaagtaccattagagagcgaagtttgagttcttaacatcaccacaaccagccaatctaacatatttcaactcaaacaaccttaatctaacttcagaacacacactacaagaaatgtcacnnnnnnnnncacagttcgctattgcgttggtaaaagtaacttttaccaacgcatttcacaaactgcaatggcaaagaggtcaaagttttccagcgtacatttgtagtggctaaaatctaacttttaccaggacatttatgcgctgggaaaagtcatttttgccagcgcttttcattttatgctgtgaaaagttctataaccaacattgatttgccaacccccttttgtcaacacatcacaagtaaattctattttaccagcgcaataccaacttttgccaacacaaaaatgtgctggcaaaaatgacatttcttgtagtgacaagttcaaacatcaattctcaacacagaatcctaacctagaaaatcacacactaaaaccttgttcaagattaagaaaatcaagataagagaattaactaagagattataccttgatgtgaagcactcaaattctgctaggattcactaagttgacctgaaaaatctacaactcctagctagttcttgatgcttcgaaagagaggggatggtagagagtgttctaagtttcttcaagcttattacttagttgcttaggataaatctgaattaagtatttatcaaatataacttaaaatcatatcatttatgtccacaaaagacaaaagtcccatagaaaagactaatatgccccttgatataaaacaaaggcaaacatgccacccaagggcaatttggtcagtttcaaatcccaagaatttcccgacactctcaacgtctaaccatgatgccccactatcaataaaattcttatccatatgaaaagggactctctaatggcccaacgtcgtgttctactgctaccgagcataaaaatagaaacacaagaaattcatatatatatatgtatagcttaatcagtacatactgaatttaaataaatctccatgattaataactcaatctcataattgaaccctaattatttaataattcaacatatttaaaaatgattaatctccatgatctaaaaactcaatctccatgattaataaccataattgatgatttaaaaataataaccgtgatgagacagtactctagaagagactcccaannnnngttagacataacacatttgattata

SEQ ID NO: 164771 - DNA, 1185 bp, Cannabis sativa
ggggggggggtagccttcagtagatacattatggcgactggcgccaccttacctctctccatccattttttgttgaaatacttgcttactttatcatcgcccctctccaactcaccccaatggattatgtaatactgacgtgtttcgccattgccttcaaaggggcgaaaggtcattttcctttggctgtagagttttacttggtttttaacatccatcacaccaccaaatctcccagcacataccacttttcaaagattctgtctccaaaagtctagggtgtagctaggatgccttcaaaggttcctttcaagccttccgagttctttatcgttgataagatgcccgatggcatcctgtctgaatttaaggttcctggtatgaatagcgtgttagggtttataccctaaaaagctagtaaagacattcctgattattaaataaagtgttaaacatttgatatatgtgtgaacgttaagttattattgaatagtttattaaatatcgaaaaaatctttaatcatatatgaggttgttgcttgtagctgtacagagaattctgaccacttagctatgtttaaaatagtcaacaacatattacagttatagaatctttaatcaatagttgctagtatgattcactgatgtctgttctacgatgcaagtaatcttggtttggattactaatgtagtgagacatctaagtgaaggtgttgtacataatagatattatatatgacaaggactgatatgaatgaagttgtctttattaatatgtcgtttattttaaagacctaattcatatcataacgatgatcaatagtagactagtctaaatcttgagttatcatgaactcatgttcatgttattagtttctttgattcacttgtttaagtttctcaaagaaaatgattcttaaaacttctattttgggaatctaataacatggatggctaggaacaagatgtacaattatgaaattctgacttttctaacaaatcgaatgttggttccctttaagtgttaattatggaattggaatgctgtgcacaaaattcagatgtaatcttgaattatacttccactagtgaattaatggtactaaaggataaagaagtaactagaagggtaaaatagtattttgaccaaaactaattataaaccaacaaatggagggctaatca

SEQ ID NO: 164772 - DNA, 827 bp, Cannabis sativa
aaggtactttttgaatgatttttgtatgctttttttttaatgttaaatttgaatgagggttatgtgacagggaaataatatccaagattgtaagttctactcatttgaggatgaactcaagcactgtccctgtggacgtggcttttgccgcaccgcctttgtaaggggagaaaagttttggtgttgatgtgttatggtgagcatttttaagcgctaatacttattcttatgttgttttagagatgtatcatgtgtgtgcatgtgtgcatgagtggggacatggtgattgtgggttctttatgaggatcacgtcaacctggtacctgccttcgagttccactctttcgacacaatttaaatttctttccaggtcttcgagttccacttcctcgacaccgtttcaatctccttccagtccttcgcgacccactgtcaattcccaatgcatggactaaaaaatctgttattcgaggaaatcttaggtaattatcttcttccccttcccctcatcagtatcaacacttcaacctcaatctatcattgctcgaaaattatagaatggatggaataagcaatccagacaagcctcacaacaaattctagtattaagaaaaaaaaaaaaggaaaaatacaggaagtcgagactgaagcatgagatgagatcatatagcgaaacatttgtgactgtgtatatgtttatattttacagattgtagtcacaattgtttcgctatatgatctcatctcatgcttcagtctcgattgctcccccacccccatactcgtttcttaaattcacccccatacccgccccaatacccgtttaa

SEQ ID NO: 164773 - DNA, 1372 bp, Cannabis sativa
aaaaaaaaaaaaaaaaactttgaggttgcactctacaaatagttacgtagcgctctacaaatacttagtaattttctttcatcattattacaaataaaataagtgaaatttaatattaaattatatcaataacagtacaacactttataatattttactataaaaataaataaataatcgcctcatttttatttctagctctgctcatatcctgctcatatccttatgtattttttttaggtcaatatctaaaactaataggagtataaattaaaaatacaagaatatgattcaggataacataatctagccttttgaaagaaatcaaatcattgcaagattataaattacaaatattattattaaaagaaaaagattaggactatataaactataaagcatattcgttatgacgtgttgaaggttacgtatcatatttatctttaaagactttataattccaaatatttcaatgattttgaagtttatcacactattaattattgttgtagtgatgtttagctattttactaggtagagtgcaagatatttataaaattattgactataaaatactttgaaaattctatcacctttttcttttgtcttttcttattgtattgttttcatgtatttgtcccctcaaagatgcaacgttcctttgtcacgtttaaaattattttctatttattactttgtttttagttgatgatagcaatggcccaacaataggatttttttcttgaaataataataagaataaataaagtctaatattttgttggatgaatttaattcgacaagattgcgagctcacgtccaatttacatcagaaattaagttggagcaaactctttcatcataatttttcacattattaattcgttcttgtctctcattgtggaaataaataagagtatatatattagtatactacttttaaggatgtgcattgaaaatttatttttattatcataaaattaatttatagtattcatatttaaatttacacacaataaattgaaaagtatttttacaatgcactctccaaataaaagagttacccgtgaaatagacagtttaaaccttattttcggcgtgttaaatttatttaaatttttttaaaattttgcaaaatgtcttaaataagtataatgtacgctactataaaaaaaaatttcaaattttaaaataagtagaagtacatcaatgtaagacttttaaaaagacacattgtaatttaataaatacaactaataatataaacatgagtaatttgcggtaaaaccccctcaactatcaatttacttacaaaaaaccatccaacctcatattttggtgggaaaaccctccaaagtactgtttcgtttac

SEQ ID NO: 164774 - DNA, 3424 bp, Cannabis sativa
tttttttttacttatttaaatatttaagaagtattttcttcagtgcaaccatgtttaagaagaagaagcgcgcactcaaaaggaaggtcgataatgcatccagctagatatcacctgtcaagcaacaaagagtggaagttgttctcgctacgaccattagcccaagctccaaaacaccaaatataactgttgagaagtgctcagtgactacctcaatagagattcaagacttctcctgcagctaagaagtcttcaaaggatcaagcccagtccactcaggccaaaacttcaaaatcttctaagagctcatctagttctgagggcgccaatgctgactagcccaattttccaagactaagtgacactccttccattgtgcgagaaaaaaaaaacaaggccaaggagatgcttaggttttaccaagaccgcttgatgttgagatcaataagcaactctatggtgccaaagatatgactgcggaactcttggtcggaaacattgtaaaggagattaccagtgtgagttgttttttcagagttctttgtatagattctgctgcccagatgattctaacttgctttattattcattatactttttttgtagtctaacttgaagctggcttatacttattcttgagccaaattagaaactctaaattctagcacagccaccaatgacttgtagaaggctttgaaggaggccaaaagcgatgctaagttgaagggaaatgatttgggtgaagcaaacaagcaacttgttactgcggataagtctattaatgacttaaaatagcaaatagaagatatgacatcgtctaccaagcttgaagcagattttaagcaggaacccaagagggtgaagaaactcactgatgagagggaaggaatccacaaactccttcaaaataaagagataaagatcaaggagttgaccaagactcttcaaaaaaaaaaaaaaaaggagtccttgctgaaggagaaaaatgcatttgaggagtctttggctactaagcaggaggcgcatcaaaaagaggtcaaagggtacaaaacaactgccttggaggtcttctatgagttctagatgacaaacctcgaagataacttcaattatctgaaggaagatctctatgctaacttcttgggattttgtgaaatgaagaaagctgaagaggaagcaaagaagtctaatgagagctcttcggccgtcaagaatcaagaccaagttcctgggactcccatggagtgaactttgtcttcttttagccgatgggcctttatcaggtacaatatggctgaccaagcgggttccaaacctggatttatttttttattatgcttaagagaaatagttgatcgggaagcttttaagcctagacttactctacttctttatcttaatataaatatttcaatttattatatttttttctttgtattttctaccaatgcttgtgcaggcataagtgccccccaagtgactgagcagacttttgacacttggtcacttgcaatttacaagtattttatttatctgttcaacttttagggctaagcaaacctcttgcatgcatgttgggtagtttaattaaattgctataatttttaaataaaaaatataaaattgacacaatctgaatgataattaatatctttgttcatttattgttcggtatgcgttgttaccgtggtaacgtagatttactaaattctattacatgatttgtctaatctttagctaaattaaatataaaatattttggatggtatatcccaaccaaaagacatcacttaagaggaataatttttcaaaacatattgtacttttaatagtggccatcaagctttagcatcagttgttctttaaacccttgagcgaggtctactcagaaggccaccacatcagagtgatgtttaaatattatgcaattatgtagaccttttgcatttattagtagtattttcttagattctcctcattccaataccgtggtacaagaactagctccatgctttcattatactgacaaagcttgtatgctcctgatcatgtaacttctgttacttggtatggccctttccaattagttctgagaacttctacactgtccttagtgttaaggaacactcttctgagtaccatgtctcccacaaaaaaaaattcttacctttacttgcttgttgaagtaccgagttgcttttagacgattagcttactactttagattttccaaatctttcttttcttcaattttatcaagtgattctgttaggagggtatggtttgcttcttggttgtacatcaatattctgtgggacaaaggttgcagttccatgggaaacattgcttcataaccataagcaatagaaaaaggagttttcccagttgttattcgctttgtcgttctgtacgaccaaattacttcgcgtaattcttctggccagttacccttggctttttcaagtcatttcttcatagtatcttttagtgtcttattgactgctttgacttgtcatttgcttgcgagtgtgcgactgctgaagaagctctttataaatcccatgtgtcggtgcaaaaagtctgtgaacatttggttgtcaaatttttttccattgtctaaaataatcttttttgtgggagtctataccgacatataatgtttgttaccataaaatccaaacatttcttggaagtaattgttgtcgatggttcaacttccatccacttggtgaaataatcaacaaccactactgcatattgcactccacctttcgtatgggtagttgtccaatcaagtctattctctatataggaaagggccatgggctctgcatttgtatcagctcatttggtggtgcacggggaattttggaaaatcttttgcatctgtcatactttttcacataagcgatgtattaccttaattaaaaactatgatgtcgagtgctgatattgtagcacaaatgcccttcattgatggtttttttgatggtctagaccttgaatgttatactgagggcaatgatgacataagagacgaccaaggtacagaagtccctactgctgtagctttaaacttgactccactatcgtaccaaataccactgaggccaccgacacggaaaagaatgccccatagagaaaatcaccaaacacctggtactagtagtagttgtccaagaaaaaccagtaatgctagaggaaccactgacagtacaggtcctaataatgctagactgaccaatgatgctagtggtcctactaatgctcaagggaccaatgtgactggatttagcgatccattttcttcttagacaagttaaggtaaattcaaggagaaaatgtatacaagagaagacagcgaggattatagtcattatatatctatgggtagcacaccaggcggggagttacatgtaggaaa

SEQ ID NO: 164775 - DNA, 1241 bp, Cannabis sativa
taggtaaatataacttcatgtattacatctcatatagaagatgcatgtgaaatattttctcgttattatctcatcattttttattttatcacatatttttcttctaatttgctctcaccttaattacatgctcatcaatctttattttcatcctaacttttccttttcataatactttatttcattatttattacaaagtttataataatttttcatttaagaaaacattataaccaaagtacttatttttattaaacagcaaaatttattttctgttcttatttatgaaaacatacataactattttgaaaaaaaacacacacacattgtcaagcaagctgttagtaattggaaaaaggggaaaaaaagaaattgccccaagagatatatattgttaaatattcatagagaaataaagttttaaataataaataattctcaggaaatatttgctgctgggattgagacaacagcaacatctacagaatgggctatgtcagaactgatgaagaatcccaagataatgaaaaaggcacaagatgaggttagagaagtctttcacagaaatggattgggaaatgagagagcacttgatgaaatgaaatacttaaaatcagttatcaatgaatccatgagactacatccttctttaccattgttagtgccaagacaaaatcaagaaaagtgtgagattaatggttatgagataccagctaaaaccaacactataattaatgcatgggtaattggaagagatcctaagtattggcctgaacctgagatttttaaaccagaaaggttcttagataataataattctattgactccaaattaggtaacaagtttgaatttctaccatttggtggtggaaggagaatttgtgttggtatgtcttttggttttctcaatgttgagctttgtcttgcattgttgctatatcattttgattggatgcttcctaatggaatgaaacatgaagatttggacatgagtgagacttttgctgcaacccttcaaagaaaaaatgttcttcaggttattcctatcgcttatgaactgtcaaagaccactgcaaataaactggaatgatgagctaataatgtggtgtttacttttttaatgaaattatttacttcatgtgtcttagtgttattcatgatgtaattaaagaataataatttgcattttataagtattaattcctaatgattctaaataatctccatctagatttttgtt

SEQ ID NO: 164776 - DNA, 1376 bp, Cannabis sativa
aggtggcaacactggcttgtgttgttctccaaatttcagatgacaacaaatggatttacaaagcaatattgtaacttcatgaaggtcaattatatcttacttattgaactaataataacaatatttgaggaacaagaaatctatatcaaaacactaacctgaagtttgtgtttcctttggctaagcaacttagctgcaccaagaagcatagttgtatgtgcatcatgaccacatccatgcattttaccatcaaccttactcttatgctcccattcaacaagttcctacaaattaacatgaaaccccaatcaaacaatccataatcaatatcatcaatcatcccctttaacaatccaaacatttaaaaaataatgtgtttgaaagtttttgagaagaaagatttgaactttacttactttcaaaggaagggcatccatgtcagccctcaaagccacaacaggtggaaaaccagtgccaatctcagcaacaatgccagtttgggcaaatgggtaagaataagagacaccaagtttatctaattcacttcgaataagagcactggtattgtactcttcgaatttaagttctgggttttcatggatttgcctccttattgagaccaaccagtctttttcctgtttggctgcctggaaaatctcattggcgtaatgggtattgcagagagaggaaggaaagagaaagagtgagaaaagaagcagagaatggagaatcagaaaccaacccatttgaattttttgcttgatttttcataaagttacaatctttacatgattaaaacatgaaaatgttggagattgatgatgggttttttggtttgttggttggttggttggttggttggttgaccaaagaaaagaaaataaaaaagaggtcttttaatggagaagtttacagtggactgattcaacttcttctctttgttgtgacaaacaactacctattatccttaattttggtttttctaatctcttctatacccagctctgtctcatgtacacaaaaacgacactgaataaaccgaaaatatatgcaaaacgacagcaagtccaacagaacaaacaaaagagtttaatattggataagattttggctggaaaataagctggatttttaaaagtacaacttcttttattcaaaatataataaatagagaatcacttgtagatttaagtggttgggatctttgaggtaaaaaaaaaaaaaaaaaatatgctaaagggcaccagtggtgtctagcaccctcttatgtgtcaatatcgttattggtccaattaagtatcgggtcccatataatttaatttaataatttttatggagtaccgttaacaatcgcaacgcgacatgtcgagaaggtg

SEQ ID NO: 164777 - DNA, 830 bp, Cannabis sativa
aaaataaattttttctcgattactcttgaaaaaaattctacctaaattataaaaattgctgtgaatatttttttgtttattttattaaataattttaattatgtatattatagcatatatgatttttttttttttaagaaaaagtatagcagatatgattacaaacgtctatttaactatttaaatttgttgaaatccattttattagttctaaaaatacaatagttctaaaaagatatatatttcagaatttgtctatattttttactttagaactatattaaattagtgtcacattattcttaaatcgtttaaaaattaatcgatttaatatttgcaatatatatatatatatgaagaacattattaagcaattgtaattaatttaaaataaaattaaaataattaataaattatttataatataacctgatagtgagggaaggcatcacttttgacttagtgggagcacattttatgtttctataaatagagagaaattaattttttttttttgaaattttttacttttgagcatttgttatgttactagttacaacttgtggctatattaatagatgttgttactagaggattagaaaaatttcttctttctattgagagtgagagaacactttgtataactagtaacagagttgagtgtgttgagatgtctgttctgagcaagtctgcttttgtatgcatgctctcgaatctcgattatacttgattaatatttcatgtagtaaagcttgtcatcaatgttgtatggtgtgtcttagtcattaggtgtcactttctatttttgtccttgtcagttagttaacaaa

SEQ ID NO: 164778 - DNA, 1626 bp, Cannabis sativa
acatgtataaaaactcatttttttaaaaatgatagttcaatagagaaaagggagggggagagcatcttcaagagtaaagcaaatagaagtttatacaattgggtggcaatagtaaatgggtatcattattagattttatatattttaagattaatttgattgagctatccttttatgagggaaagtactatattccaacaccaaacattactgaatacttgtaatatatatattccaattcaatataagttattctaaaacacacttacatgtgaaaaaagtggtgaaagctcaagtatcatccacatatgaataaactaaactaatgttaaacagagtcatcaagcactgcctgctaaccttaattatttctagattgtcatcgctcaatgtttgttaagtgcctgcataactgtgacttatctcagtataaaataaaattcaaattctacttataatacatacaaagaacagagaaatgatgaaagaaaagtttttagggtggacatagaagcaaactctacttatgaaatcatattgcttaccaaacaaatcaataggtaggaattgtttgatcggctttcagagcatatgcatgaattcctcctgacacattgaataatctcctaaaaccctgtgtattgagcaatagattagaggacaaaatcttcgattaagtctaattaaatataagtttagtttaggatctcaattaagaaattttagcttgtaaataacaactgaaactagtaagatagcactcgaaattcataaggattctacctgtgtctgcagccacttggaaacctgtaatgaccgcattccatgatgacactgcattttcaaacaagattctcaattacccttgctttaaagagaagggagcaaaactagattacaatatttatcttatgaatgaaactaaccaatagtccatagattgcataggaacatgtacaaaatacaaagtttggcacccaatcaatatagcaaattaactagttctgaatggtttcggtaatgttgaaaaggctatagaaaaggaaaaaaaaaacaaaattaatagcaaatatacactggttctagacgtccttggtgtgattacatttttaacagaaaatctccagtaacagcaaataaataagtgctctttaaaaaccatgtcacaaaatatgcaggtaatattttaaccagtataaatatggtaatggtatcagaaaatgttgggaaagtacatatatagctagaattcatagcttctcttcttaatatccaaatataatttatgataagtaactaaaatacagttggaaactgaatagaaaacagagacttatccatcttcagaaagcatattagatatatttatcttcttaccttactacatctttttcctttatcacatttttatttctcttggtattcaataatttttagcataagaaaatcacattttgattagtatctaacatgatatttccggctgtcagcaggcatccaattgaaaaataggaacaaaaaggagaacaggaataggaatagaaatagaatcgaataaaatgtaaaatgcataaaaaaaattattaaacttttctgattgtgcattgaaatggtcttttcttctat

SEQ ID NO: 164779 - DNA, 1128 bp, Cannabis sativa
atgcactgataaaaatgactctttccacttccagcgcattaattaacgaattgagctgagaaaagtgatatttcttgtagtaatatcacactacaagaaatacgacttttgctagcatatttttatgttggtaaaagttgggttattatgttggcaaaatagttattatttttgccagtatatttttgcgctgacaaaagaaaggttgacaaatttatattagtattgaaacttttgccaacacaaaacaaaattcgctggcaaatccatatatattatgtataatgataatttgttattatatattaggaaaataaccacgtacattattattacaaactaatatataagaaaaagacaaggtacgtaggtacgtacttaagtttcatgcatgcatggagatatatacgtacttacacatacatatatatatctttaataattaatgatcatggattattggagttggagcatatatcgttgaagaggtggttttctctgataagtatcaactataaaagtcccaagaaactctttatagaagaaaggtctatagagtggaggattatcatcatcactggtaagagcatttgctggttcgactttgcaactgtgagaaggataaatgaagtttccaatggttgtccgtacaacatttttgtttgtcacaactctgtgttcagcactttttagcttcccattgctgataatctaacatatcaatatgtaaacaaactataataagatatatcataatgattttttggagaaatatattctgatgatttattatactgaaaataactaaataactagcatatttaattaattgtgtgtttgaatttttcagttgttttaaatttgatctaaattatacaattactaaattgtgctcttttgtccaaaatcatcaagaaaaacccaatttgatagatgtaatagttggaggacataataaatcgatatttgaagcgaaatttttttattaattagcttttgtaattgttacataatctttattagaaaaataacggtacaaatactttatattgcaattttgctgcaatcgtacctatttagttgtttttgagctgacaattttgtatatttttaattaaaaaaatagga

SEQ ID NO: 164780 - DNA, 2674 bp, Cannabis sativa
aactttttttcttacaaaaaaaatatggatgatagtttttacaaattgctttcacaataacattatactatgttatttttatgctactttatatttgtattatattgattatatgttgctttcatgagattacataaaaatgtagttataaaaaattcataaaaggaagacatggttcgtaaaaatgttaaaaaaaaaattataattttaagtattttttgcaaaaatgcctaacataaatcatgatacaaaatacaattaattttgaagccaacatatcataaccaaaaaatatttattatttttgatttgattatttacttcttatttattattataagtgaaggtaagctgcctaataaaaattaagtttataaggggaaaatgaataaaatattaaaaaacaaagaaaaattaaatagagtgatgtggaaaaaattagagtgttataattattatttttattttgattactggcaacagccaaacaacaagcaagacaaacaaaaacaacagaaaaaacaaactatccgaaagaacaaaaagacgaaaaccgagaaaaagagtgttataattatttagttaaacatattttaaacaaatttggacggtcgagaggagtatgctctcggacccatctacactcgcggggagaaatcctaaagggttaacaaaccccgacgtgatctacaccaaggatcaatgaaagattatcgcccaataaattataaattatgacaactataccaaacatatcctacaaaaaaattaattaattattttatattaattaattaatatttacagtcttaaaatttgttagttataaatatttaaaaaaattctaacattatttcaaaaaaaaaaaaaatctaacattacatacatgatattttttggttaaaatattattaatggaataaggttaattttgttatagatatttttttttaaaaaaataataataataattaatatccaaacataggtaagaaaaactataatctaaaatacatttgtcatagatatttttttaaaaaatatgacgatacatgtactttttttaaaaaaaaaaaataattaatattttaaattagttaattaataatttaatttaattgatatctaatattgttgtagatattttgacaaatattagagttataattaattaataattttacatttttttagagtagaataaaaaaaaaagtgaaaaggaaaaataaataaacggctttggaacaattttaggtattttttatctaaatatacatgattaataaggatagttaaaaagtttttcaataataataataataataataattttttaaggttaaaaaaataataataataattttattattatatattcattattacgtttttattggataattatagtgaaatgatgtatttgtacatttttttgtgatcaattacctttcaatttattttttacggttagcttagtatagataaattattagctattagttatgacatattttatattatttatttaaataaattatttaaaatgataaaaataaaatatttaatttcaaaacaattgaataaatttttaagaaaaatctttcaaactaaaaacaactaaaaatatcaatgattcgtaaatgcatattttaaattaacataataataataataataataataataatataatgattcacatgtgcaaaatattataaataaattttctcttaaaaaacagttaataaacattcctaacaaaaattcataaacttataataaaatacactttaaagtgtgaattttattgacatatatatttttgtcataatcactttaattgttcagaaaaaataagtaccaacaaagaggagaggtctctttcatccaactaagttgatgttagaattatatttgcatattatagacttgtattttgtggtcactcttgtaatttgagtgctaaagtgctagcttaattattttatggctgatttagttaaaaaggatctccatcaaaaaattaatcttccacacagcatgcaagatttactttatttgatttttgtctaatgaattgttaaaaaatattaagaatatagaatatcaatatcaaaatttaattaacatcacttatcattaagacaaattagaatatataaattataaattgcctctttttaccatgaaagcaatccatttaaattagaattactgcttctttataagaagaaatcaaaggtgtatgggttcacttacaatactcttaaagaaaagttgtcacatccgaatgtggaatgtggaattctcttctatgtctttagggcaggaccacgatttgtgcattaagtcagagagattgctttcatcaatcgacttagaaaaaaaaagaaaaaaaagtattaaaagaaaatcaaattttatatccaaaaatagaatagtatgagagttgacatttaagccttaattaaatacctatattatatatagtaataataaagatttagatataaaaacttatgtatattatatttgaaaaatctacatataaacataaatcaatacatataaacacaaatcaatatatatttttagggtcacaaaccaatatctattttatataaagtgtgcctatataactgaattcttgatttatgagaaattcatgagtgac

SEQ ID NO: 164781 - DNA, 1070 bp, Cannabis sativa
ctcaggtacgtcgatctcatattttctttaactaattcattaccattactaataattattaattaatccatgagtatttttcatatatatatatatatatatatatataccattaattaatttggagaaacatactaaacgacaccttaatacaacaagtggcgccaaaccgttattgagcaattcaatattgaatctcacccattttagaaaatcattaatcgggtgattatcatattagccagcttaaacttaaaagtaactaatagcaatattaattaatttattataaaccttcctatatattttttttatgaaaattaatatgaatatcttgtttttattattttattattattattattattatatattatgacatagatagatatataataatttctccccaaaataactatataattgttctaaagaaagttttagattataaataaataaacaaataggtctctagtaatttattttttttattataaaacttgttttaaagattttggaaaaaaattaatttataagctagattctttttaattctttattaatattattttattaaatacataagacaaatttgcggcacaaataactattttattactaatgagtacctaatttcagaaaattgtcattaaactcaaaagtttatttttctaaacttctgttttcttctcattttattttgtggtaattgctaatcattcactcacaatcaaagatttcataatctgcaacaaaatgtaaaacgagttatatttatgtaattaatttacgtaaaaaaattaaaggtcaattttctcttgttctttctcaaaagaaaaaaaattgagcggtccaataatttaagtagcctataatttctcaagcaccaccctgtctattatatgtaaagatattgctcgaagagtataatcaacaaaaatgcagtccattaaaatctaaaaaatatgttactgatccttattacttaattactaatttttttgaagttttcattctaaaaaagattactgtctttttttttttttttatggatgtcttttatcaattca

SEQ ID NO: 164782 - DNA, 1750 bp, Cannabis sativa
ttaaataacatactcaaagattgttataattgataaactcgttttttattttaatttttttttataaaatacattatttatatcatacatttataaaatactattaattactccaaacatattctctacttttatcaacaattaaaattaggtactttaagaaaacaaacggatccatattcgaggcaaaattaggacccatcacgaggatggtacttaaatatagtaggtcatagaaaaaaaaaaaattgacctttatttagaaaaaaaaaaatgtcatatttgtttaaaatcaataaaaatgtgtaattttaaaagagaatttttttttgagcccttgggctaggtgggcctaggcacaggcttagcctgcctatgcacagggctgggcttgcccatcgctcaggttgacatattgtctacttggaccatttccaaacagtttttttgagaagtctttcggacatattctacattttcaccaataactgagatatgagtgtttccaggaatcaaacaaaagcatttgatgagcaaaattgggacccatcacctaggttgagtcaacgtgggctagttccaactattttatcaaaaaagtgtttcgggaatcttttccgttttcagaaataacgaagatacaagtgatctcggggagcaaacgagatcatctaagggtcgaaatagggacccatcgcccaagttgacatgggcattgggccttgcgcctaggttgacatgcaacctggttcgcatgttttcgctccccaaatacaaaatttgcttcagacattcttctttttttgattaaaaatgtggtaagagatctcattcacaatctcgaatgtcatagaagtatcaaaatgagccctgagaaacatctcgaagagcacccagcgcgtaggttgacatgtggccaagtgtgctgggttctgcttatctaattttgatttcgtctcgagcatctggttattttttgtagtaaacaagagctacaacttgtaacaagtcaaactcacactttgatattttaccatttcaacaaggtggaatatcagcaaattcgagaagtttcgcgtctacccgattttacaaaaaggcaacatctttgagaactggtaaaaaaacttcaccaaaactaagaaattgactacaagtttaggatttcactgacccatcgtccaggttgatgtcaatatgtcaacttgggcgccgggtgttgaacaaccttcagtaaaatagccataactccctcaatttgatctgattgacgcaattcaacttggattttaaagctctttcaaatctctttcaagtcatggctcagaagcatattgtaattttgaagattttaagtccaaaattcgtccctaagacaagtgcaatttttttccacagaattcttgaaaaacgatccaacatacgagattcaaactccaaagccattagatcatcatcaatgggcaatattagcccaaagtaatttttttttcatatttttcatattattttaataggacatctttccccataaaagaagagttctactagttcatttttcacattcagaaaggagctcatatggtcagagcatctcttttctctctctagaaattagacctattgccttagtcaattttcttgtaattatcgtgagcaataaaaactcgaagtagatgtagctctatacctgtcacgacatgaggagtaaactactgtaaatattttgtgtctctttgttgtggtattt

SEQ ID NO: 164783 - DNA, 772 bp, Cannabis sativa
atgaagataagtaaaggttcaatggttgttataaaaggagaaaagaggcatggactgtactacttgattgggaacatagtgacaggagatgtatcagtggcaacaaacaatgaagattctaatgcaatattatgggatagaaggcttggacatatcaatgagaagggacttaaagtgatccatgattagggcctacttgggaaggacaaaatcagcaaagttgatttttgtgaaagctgcattttgggaaaacaacacatgtttagttttagtgttggcaagcattgttccaaggaaattttggattacattcatgcacatttgtgggggctagaaaaattacctacacatgggggtaactcttactttctcttaattgttgatgatttctctagaaaagtttgggtttttttattaaaaactaaaaattaagctttaaaaaaatattcaaacaatggaaactgttaatagaaaacttaatagaaaggaaaattaaaaccttaaaaattgacaatggtcttgagttttgtagtggagagtttgatgaattttgtaggaaccatagtattcaaagatatagaacagtaaggatcactccccaacaaaataaggtagctgagagaatgaactattcactactgaataaggtaggatgcatgatgttcagctcaggtcttccaaaaacattttggggagaagccttgatgacagcagcctatttgatcaatagaagtccttcaacagctatcaacctcatgacacctgagcataa

SEQ ID NO: 164784 - DNA, 1666 bp, Cannabis sativa
tagtcaaataaagagactaaattgtataattatctttaattacaaacaaatttaattacaaccaatgggaaaagttcttcccagcaggtggagccgattgacttactaattcctacaatgcgtgcccgtttgactttgactttcgtccttccagactgcataacattaatttgtcaactttgacaatacatatatacacatatatatataccctttattatatttttatatttacatcataacttagtacgtatacatcttcaactgtcttctaaaacccccacactctttctctctctctttctatatacccaatataatattcatataacttttcataatctcatacaccaaactagggtttgtttttattttgagaataaaatattattaataataatgggtagctgtagccctaatcgtaaaggtgtgagagttgtgttgatagaaactcaatatgtgaaaaccgatatgacaacgtttaagtcagtcgttcagagccttacagggaaagattctaccaccatttcgtcgtcgaaatcaacaacaacaacaactaataataagaaaagaaagagaccaacaacaacttcatcatcattaggagatgatgatccttcgatgaaaaataggatgaggtttttaaggaaaggaatgtcgtttaaagatttagatacaatgttgttggagatgccaccattgatggaagacttacaatgttggctctggccagatcagtataaatcaatcaattagtaatattttcttatttaattatatatatttattttcatttggtcatgtatatttcctatatatatttgatattttttttttatataattgatgatattatatatgcatgattaaaagctttattattattaggtatataagtaaaaattagaggatggaagaaagataatatatttaaagatcatataatccatttaataataataataattatataataaattataattattaattggcgattaattaatggaggaagaagatagtatatgtatggtcatcactttgcttagattttgtggctgttgaaaaggcacggatgtattgtacggacttataataataagaccaaaaaagaatattgaacaaaaagaaaagaagaaaagaaaagtcaaatgacatgcatgcttgtatacgactaactcttgcgcataaaccagaaattaaattttagaagctttggccatttttaatagtctagagagactgattgctcttcaattctcggtgcactatattgaaacggattcacttttagtaacgaaaggattgcaatcttctaatgtcttagtttctgaatttcattgtattttatctgatatttgtaattttgtgaccgatttttcaggagtgcagatctcttatgttcctagatctgctaatacttatgctcataagctagctaatatgctctttcggtggacacagattgtatttggttggaggaattacctcctctctaaactgttgtattttaaacttgcaaatttaatatataacaatttttattctccaaaaaaaaaacctcttgcgcattaatttgggtttagtatctccattattaatagtcattataaaaatttttactcataacaaaatttgtgactaaaagtaaaaaaagttgtgacta

SEQ ID NO: 164785 - DNA, 1134 bp, Cannabis sativa
atttgagcgccttggttgtcacaccagatcataggtttggatggaagatgtatgccaagttcgtttaagacagaggcaatccagaccacttcagttgctgtagtagagagagatctgtattcactctctgtgctagagcgagagacagctctttgtttgcgagacccccaagaaatcaagttgccaccaagtttgacacaaaaaccagtagtcgactttcgatcaagaagatcacatgcccaatcagcatcagaaaacccttcaagagttaagcgagaggcaggtttgaagactaaacctttgttgatagtacctttaatataccttaaaactctcttgcatgcacaccaatgagcaagagttggggattgcataaactgacttaacttgttcacagcaaaagacaagtcgggtcgagttagagttaggtactgaagagccccaatggtacttctgtagagtgtagggtcagaaaacacctcactttcagtgttgtacagcttgtaaccaggacaaatgggagtgttgcaggacttagcattcagcatatcagttttgtggagaatgtccatggcatatttggattgacataggtagatggcagaatctgttctgtgtgcctgaaaaccaagaaagtaactcacttgtccaagagcttttaaagcaaacttgctgttgagatgagatataagttgttgaatatctttagattgagccccagtaatcaatatgtcatccacataaacaagaactagaagtggatgaccattgatgttgctgaaaaagagagaactatctgatactgaattttgaaatccccatgatagtaaggcttgtttgagtttctcataccaagctctaggggcttgttttaagccatatagagccttgttgagtttacatacatgatgtggatagttgggatcttcaaacccttttggttgcatcatgtagacagtttgtttaagctctccattaaggaaggcattgttaacatcaacttgttgtatttcccaaccaaaagtaacagcgagagtaaacataattcgaatggtagaggccttgacaaccggactaaaggtgtcaaaataatcgattccaggtgtttgttgaaaccctttagcaactagacga

SEQ ID NO: 164786 - DNA, 1551 bp, Cannabis sativa
tttattatttttttttttgttcaaaaagtttttaattattttttggttttaaaaaataaaaatctttattgttcattatgataattttttgacaagattcctaataaaattaataaattgaaagtactttaattattttgatagattttagggttaatactgttgattgtgaatttagccaactgacacaaagtctgactagaattggatcgttacttatgactgtcacgtgtggaataataaatgtaagagacatacaaatttatagaggtccgatcctttttatttaggtaatgacatattccaattttagttgtattcactcttgagataataccaagcagattacagactcaaattttgtaatttctaactaggctctcatcagtattgcgatgtgttttgcgtgtgagaagtatgagaaaagagagaggacttattgctatagttcttctaaaagtgattgcatgtatctttttcacgtagattatgaccatgtatatagtattagggtttacaagctctacatagagatatccataaaaaataaggaagttacaacgtatatttgaaattcaaagcaaataataattaactcctaaggaatagggttgttatttgttgacaaagagtccctatctttgtgggcagtttgaactgctttaaagtcgtaggaatgatgagagcgagttggaaggcttgtgagaaaaacacaagtgctggtgtgtttctgtgcacttggcccgccagctttgttgaaggttgctcggtgcttggaagctagcactcctggccaaccagctataggtctgactaggaccttgctagcaaggttgtacatctcatttttcttgtgtgtaccgtgcaacatggagtctcaaaggttgagaggctgcacgacaataatcctggcaaattagtgatgacctgtcttcaacgtattttctgctttttgccatgtagaggagctacgtcaggtggacaaatttgggataacaaatgctattttagacttagtgttttgtaaaagttagtgaatggaccatctgttttataaaatgacaaaataaaacttatattttccaaatggtacaaataggaccctgaagtacaaaataaatctaatattttttttttaaaatataaccaacttgaagactatttctagcacagaacaatacaaaaaacataaccaattttgtaataacagttctagtcttctagatcgacttattattaagttttattttaacaaaaaaattagttcatagttttatttagtactatttaaataaatacatggtctaatttacccatagctttataaactacatacttattattatttgttattttttttttaagtagaagccttttcattctttatgtcttctaaacggacaaacaaaaatttagttaatttttattgtcaaaaaatattattttttcttttaatattagaagctacttttatgacctaaattgtacccactgagaccactctcaagagttttttttttttttttttttttttttatagttttttttttt

SEQ ID NO: 164787 - DNA, 1287 bp, Cannabis sativa
ttttctatgtttaatttgtgatcatttacctctgatatttacgatcatattgccaaacatcgatgacattttctttaatgagttgagttggaaaattctcataggaaagtatttttttcttgcagatcttgcattgaaaaaagtagcattaacagttcatgtggaaccacaacattgactgccttcacacacacttgcatacctattttgtttggtttaggctaaatgattttattgaccttcacccatgcttttttttaattttgtagatagatgttgtcatataggtgcacacataaaatatttgagtaattgtatacttgatataattttgggatattatgcaactaagagactgttcattatcatctgacattttggaatgataaagacattggttttcacttccaaggtgggttcattgtattttctttttcttccttatttatatttgttctattgttgtttgtaaaatggtacaactttttctttttttttaagaaaatcgtatttgattaataaataacaagttagacttcacggtcattacataaaatgtttgaagggatgatagaaagcagaatattaccaaataacttatgggtaaatacccagttagctacattatggctgacaaaattacaagtcctgctaatattagagaagatacaactagaaaataaagaaaagtgattattacaaaaggagacatagtttccaataacccaacaggactacctataactatttcttagaaaacttgattttaaatgcttgaagaaaaaactaaagtttagcttgagatatatcttagatactttaatggttcttacctttttcgaaaaaaaattcaaaactaaagcttaacaaacatgctatcatattatattacttcttgtttcattggggtttcatgatgcactacctattctaatacatgcctttctgcttggaaatcttgaatgatctaacaaggtgaagtgcatgggaataaggatgaagttcactatagcacgtcttgatgattgacatcttcactttgatgatggagacctcctcaatgctattattcctctcacaggtaacttgattaaaattaagtcatagtttgcttgcatcattaactatttatttagttttccgagccacgtaaatattagttttatttaagatttggtgtatttgttttattttagggcatctccaatggagaaactcaaatttggtgttaaatcaacaccaaaaaactactatttcaacactaatttttttttttcaattccaacc

SEQ ID NO: 164788 - DNA, 938 bp, Cannabis sativa
aacccctttcctcttacacacgctcacacaccgtttgaatcccaactaattgcatctagcctcaattgactgtccaggtaagatgttgaatgcatgttctaatcggttatgtaacagtgcatagataatgatatttgtatttatattatgttattaaacaattttttagtctttggtcttcacttttttcctttttgtttgccttgtatgaaatccataatggtggaaccttcagctaaattgccttaatttgttgaagtacttgttaaaagtatacttaccatttaacattgtaatggactggtactttttcaccttttaagtaacttttttttttctctcatttttctctgaaaaccaattttaagttggttgtgaacaccacatgaatgtgttcatcatgttgccagagtacttattcgaaacactagtaactgatcaattgaagcttcgttgatgatactataccttaatttttatttgaatggttttgtacattacattattcctcattacattcaggaagaaatagttaaggctggcggtcaggttgagcccccaggcatgcacatgatatatctcccatattctgatgatatcagagacaatgaagaggcaaggaagatgtttgattgtatttgagaattactggtaatttcatttctaacagacactatgactctacagcttcattcaagtgttgatgcaccttgtgcaactgatgagcaaatcagaaaggctgcctctttaataaaacgtatagacttgagagatttttcagtatgccaattcgccaaccctggtatatttccattttcacaactcttttctaatattgaacactttctatagctgaatttttgcccttatggaatggagtgtgctatgatagtctctgacttttatgggatagtagattaccaattgtgtttttcttt

SEQ ID NO: 164789 - DNA, 920 bp, Cannabis sativa
attttttaaaaaatatatttttatactaatagtataaaaacctataaaatatataattttcactattattattaacgagagactcaatacaaatgaaaagatgtggatccaaagatacataagtttacttctaaggcattcatatcttccatgatccacctcaatcaccataaaatagtttctctttcttgaaagttagcaacttcattaagaagagtacatttaatttagaaagattattctcacacatttattattgctagactaagatttttttttttcttatatattccactaagaactattagaagaagaaaaaataggtgtcggtgtataatagacatagactagtaagtttaattagaccaagtccaaaatattggctacttaattttggtatcatcacaacaattgacatatatttatatacattaaagtcaaaatgtttgatctttttgttggaatatgatatattgaaattagcttgaagatgcttttcaccaaaaaccaaaagaatttccaacaacaaaccaaaatttgatcatggtgcattcataactaacatatggcactcatcacttcacttcacttatgtattattttgtgtccacaactttaaattaatgtattttgggttgattgtcaatcaatctaagtgtaattacataaatactaaaaacaaaatatatcatattttatattattaatccgcaactaaaaaagaacatgactatatgatatacctatatatatatatacaaatataaattattactcattgtgtaagtatattgctccacatacatataagttagttcctaatgagttatattaagtaggggtgttcatccgatccaatccgcatttttttggtcaaacaacatccaattcgcactaagtgcggatttcatattttggat

SEQ ID NO: 164790 - DNA, 1263 bp, Cannabis sativa
  modified_base (1233)..(1237): a, c, t, g, unknown or other
ctgtgcacattatcattgataaatggattttataaatcgaagatatagaaccttgcaatacatgcatgtttttccaattttcaatgtgtattagtattgttatgcagtattagtttgatgttagtacgctatacataagtgtttgttattactaaactactaaattgaggtcttcataaaaatatactcaatccaacttaatttgcatgatctaatccaatttaatttgcaaaatatattaaaaaatcacacttatacaaattggatattgattaacatacaaaaataaccgaactaatcttatcgacacatatttatatatatatatatatttaaaaaaattatatatgtaattaatattttaatgtaaaaaaaacgaattaaaaaaatctaacacatgatacaaatatatctcaaaattacaaaacaccgaccacggcagcaacacaaaatggcagcagccacacacactaccacttaacaattacattacatagataattcccatctctattcttactatataattaatattttatttgctaatgtaagaagttattttacaatgtaattcaaaaacacaagtgttctatattcaacccgcctaggatttttggatttttggtcaaagcccactaatagggtaaattacatgcaaaatgagagctgaatattgggtcctttagaaacaatttgtgcatgtgcgtgttgcagctggaaaattggtgaccatttgtatgaagtggacatgtggtgctcaaaagtttagcctttaaaagtaaaagtcacatgtcagtcaaagctttcacctttaaaagtagacgtctataatatcgtctagcaaaaaaagtgctggaggtgtgtgcactactatgcttggacgcagggaataagatctaatcctacgtcaaaaaaagcataaccttcacttggtgacctggcttgtaccaaaggtagatgtctgaaacactccaagatggtcgagaattcgtattcagcccttcgagtacccgtccgtgcatcacctaggaaggcttccatgtttggaccccttcaggtctggagaggcaacacgccttccacgtttgggaagctaaggcatggccaagtgaacttctctatattctttagtcttgacttattcccggttacatgaagctttttcgtgacaggatcatagtgggagattttcattagggaaattatgaggctaatgttgggttttatgccctnnnnnaaactcatttcaatataatcacattt

SEQ ID NO: 164791 - DNA, 7487 bp, Cannabis sativa
attttccactacctatctacataaattgaaatcaaagataacgtttattcttacaaggggatcacacattttcaaaccataacatgcgaatggtcatttattcataaattaagggaagagtattagttaaactaccaaatagttgagacaaaaatggcatcacaaaattccaattttgtttcagctatatatgcatatgggtagctttgcttacaaattatataaacttttcttgaaaaagacaagccgattaataagaaaagcaaaaacagttatgtgccgaccagttaaataaataaataaacaactaaaatcttaatcaagctaaccatattcttaaaaagagcacatgcttataattttaatattagaaggaacaaaacaatctaatcatgtgtgaaaaatatgatatgatttctttagaagactaccataagtgggatttagtttattttatttagaaaagcataggtgagaactgaaaaagaagaaaaatatgcccacaatttttgcatataaattaattatttttttaaattaaattaaaagttttgcatgcagcacattttgagctgtgggtgatcaaattgcaagcagcaattggtggcgaaaattttgattcaattacactttacttttgacttcttttttaaggcccaaatttattgagatcctttgtgtacctaatttatgttccaacactctttaatttaacagaaaattacattaactcactaaaatttgtaattatctacacatatagccttcggcatcttaatcttatcaatagctttgtgttttgtttaatattcggtattggttccaattttattggtatgtgagatgtcttttaccctttatttgttagttgtttttttttttttcttttaaattttatttcttgaaaggagctgctcttttttttttttcaagaccatttgcttctttctttctttctttaatttttgtcattaagtgaacataagtaatttatgtaatgtaaatttttttccattttatatatatatacatttttattatatttacagtggttgttctctgttctattttgtatggttcttattttgtaagagctatttatgctcaacggtcactaacagtttctgttattactttttatttttctttgggttgtgtcagataggtagttaacttagttagctcctattttcctgctggcttttgtctcagcctcctgtatatatattgttctcggttattgtacaaattattcattcaatttaataatacagaattcctttttctattccgcattatggtatcagagcgaggaaagatatactttccatgattgatcctgttaactccggtctccttctccggtgctgacatcgcgtttccctgtccttctccgaccttctgctcaccgtgttcatctctctattctctgtgtttcattcatgttgaatgaaactccgtccataattcaaagggaaagtgaagaacccaactcaaaatctgctgatagtccttctgcttctactggacatgggaatcaagatctgcaattcatcaatcaaaagaactcgcttgaagatccttcaaacccgtattacctacaccatggtaacgttcttgtctctcaacttctcactggacaagataactatgcatcttggagtagagctatgtaactttctatatctgtcaaaaataaaattgggttcttggatggaactattcctaaaccaatgatcttagattataccttgtataatgcttgggtgaggaataataatattgtcatttcttggatattgaattctgtatccaaagagatttcttctagtattctatatgatgaatctactgccaatatatggaatgatctaaaggtttggtttcaacaaagaaatggtccttacatttataatcttagaaagaacctaatgaatttgagacaggaagcacaaactatcagtatatacttcactaaattgaaaaccattcgggaaaaattggccaattataggccaaattgcacttgcaatggttgcacttgtggtggagtaaaaaagatgcaagaacaccatcacatggagtatataatgtccttcctcatgggactctcggacagtttttctcaagttcgtggaagtatccttttaatggatcctctcccagatgtcaaccgagtcttccatctagtcactcaggaagaaaatcagagatccactatcactgaaggaaacgatcccaacactagtcatgcctttgcttttcaaggagacaaaggaaacaagactgaaaatcaaaaccagaaaaaccaagcttccaagaaaggaagacccttctgcactcattgtaacatccatggacataccattgaaagatgttacaaaatccacggttaccctcctggtttcaagtcaaacaaacaaaaggaaggcatgggaaaccagtttcataccagtgaagaaaataaaggaaaaccagaggaagctcatactcttttgcctcaactaagtgcccatcaataccaacaacttcttaatcttcttgccagtcaacaaaccaacgtgagtacacctgatcctagcacttcgagaggtaactcaggtataattcttacctatgcttcatctaagttctttgacacatcatggataattgattctggtgcaaccagacatatatgtaataatcctaaaatgtttcaaagtatcacttgcgtgcccacaactaagttgatcttacctaataatgaagctcttatggatagaatgcatactcactgcagcatatctcataaatcgaactcctaccccaatcttgaaaataagagcccctatgaaatcctttttgataaattgcctaagtatgatcaactaaggaacttcggatgccttgtttttgccagtactcttaatgctcacagaaacaagttcacaccaagggctagaacttgtgttttcattggatatcctcaaggcgtaaaagggtacaagttgtatgatattaatactaaagagatttttatctctaggaatgttatttttcatgaaaaaatatatccttttaaatatcacaaaaaactacattgaccctttttctaacatggttcttccttctcctaatatatctaacactaatgttgatgactttcctgatcttgttaatgatagttcctacactaatgactttcttcaagataatgacagtactcagaatacgggtgctgctgatgaacatacatctactgaacaagacgctaagaatgacaatcctccaatacaaccagaagaaacacctcctgttcccaggcgcaccagcagaatcaccaaaaggcctgcatatttctgtgattatgagtaccattgtatactccaagacaaaaactctacacctcatatacttgaaaattctttgtcatatgaaaaattatctaacactcataaaacctttatctctgtcataacagccctttttgaacctgcaacttacagccaagcttctcaattacgaatatggaatcaagccatgcaataagagttatttgcctactcaaaaacaagacttggacctatgttcgtttgcccccaaacaagaaggccataggatgtcgttgggtatataaaatcaagctcaatagtgacagttctgtagaaagacacaaagctcgtcttgttgctcaaggatatactcaacaagaaggtttagatttcttcgacaccttttctccagttgccaaaatggttactttcaagctactattagccatttccaccatcaagaaatggcatactttgcaacttgacgtaaataacgccttcctcaacggagatctcaatgaagaagtctatatgcaacttcccaaaggtcttattcttcacccagaaattgctacagattccaacatagtatgcaaactgaacaaatcaatatatggcctaaagcaatcttcaagacaatggtacaaaaaattgtctgatgctctaattcaagaaggttttatccaatctcaagctgactatactctattcaatagaggttctcaagacgatttcattgctattttggtctatgtggatgacataatcctaacgggtccaaatttgtccctcctcaacgagttacaatctatcttgaatgacaaattttctctcaaagctctcggcacactcaaatattttctcggatttgaaatagctcatggacaaaaaggcttggttttatctcaaagaaaatacactttacaactcttagaagacaatggcttcataggcagtaagcttgccaaaacgcctatgtacccaacaatcaaattggatgatcaacaaggagaatcacttgaagacccctcaccatatcggcagcttgtaggaaaagtactatatctcactctatcgagacctgacataacatttgctgttaatttcctcagccaattcatgtcatctcgtcgaacacctcacctacaagcagcacaccatcttctacgatacttaaaggaaccccaggtcaaggcttaatgtactctactgcatcgtccctcaatcttcgaggttatttcgattctgactaggcctcatgtcccattactcgtcgatctaccacaggtttttgcatcttcatcggagactgtttgatttcctggcgcactaagaaacaacccactgtttctcgaagttctgctgaagcagaatatcgagctcttgctgcaacaggcagtgagcttacctggctgcaatacttacttcaagaccttcaaattccccaacatcaacctgccttcatatgctgtattaatcactcagctatccatattgcaaacaacctaacttttcatgagagaacgaaacatattgaactggactgtcactttatccgtgacaaaatcaacaagtccaaacttcgtctcaaccttgtaaacagtaacaaacaacttgcagatgtcttcacgaagccccttgcctccactattcgcaattctcacataggaaatatggatgtatacgatgtataccgtccatcttgaggggggtattaaatttacagtggttgttctctgttctattttgtattgttcttattttgtaagagctatttatgctcaacggtcactaacggtttctgttactactttttccttttactttgggttgtgtcagatacgtagttaacttagttagctcctattttcctgctggcttttgtctcagcctcctgtatatatattgttctcggttattgtatagattattcattcaatttaataatatagaattcctttttctattccgcattaattttttaaaaaaaatatgcctttatcaataatcctttggacttaaaaattacatcaatacaacatacatattctttgaggtgactatttcaatataaaaaatatatttttttattttcgccgaaaaaaaatgacagaaatcaaaagtaattttttagttctttttctatccatatcaaaagtgaattagttgttagtgtcctgagtttattagaaaaggttgttagacggttatagagttagttagagtttgttatttgttagttggtttcgatttgattcagattgtttataaaagcactcatgtactctgtttcgaatccaatgaataatacacagagtttttctttcttctctttcattattctgctaatatggtatcagagctagactttttgtaatatccattctcgtttcctttcttttcatcttcttcatggctcgagtggaggagctcaaactcgaagctccactgaaaattcgaatcgatactctactttggatcctggtggctaatccttttccgatgatgctagaaatctatactttctgtcgaacagtgaccatcctggagctagtctggttcctaagatccttactggatgtgagaattatagttcgtggcgtagagccatgactgttgctttaattgcgaggaacaagctgaagttcgttaatggcaaacttccagaactcgatgaggacgatgatgactttgagctatggcatcgatgtaatagtacagtgatatcttggattctccatgtcgtgtcgaatgaaatagctaagagtattatgtatatggagaatgccacaacgatatggacgaatcttgaagaacgattcaatcaaaagaatgctcctcatgtttttaaagcaatctctggctcaaggaaccagtagtgtcacaaattacttcactcgtctcaaaactctatgggatctcattcaagaatatcaatgtcagccagcttgcacttgtggagctatgaaactattcaagattattaggaggaggatcgtgttcttgaatttttagttgaattgaatgagtcatataatacagcttgatctcagatcttaatgcaggatccgcttccaaatatcaatagagcttatgcttctattatttaggaggaaagatagagatctctgactaacatctcacaatctctgtcttttccttctgatgctgacaaatccacagccgattctaattctgtccagtttggtggtagtgtccagccttttaaacctaaaatggtttgttaccattgtggtatcactggccacatcatgtccaagtgttataggttgcatggatatcctcctggacacaaattgtatggcaaatttcctaatcaaaatgttaaatctgttggaaatagtaatgtcaagccatctgctgcaaatgttgagactaagtttgaaggaaatgagaacagcaatggagatgctattaaaggagatcaagacctagtttcaagtctgagtgctatggagtgtcaaagactaatggaattattgtctcaaagaatatcagatcaatctgctaatccttcaaaagaagcaccacttgtttctcatttttttggtgagaacctttttcttcctaaatcccaatagattattgatactggtgctacgtatcatggttgttttgatagaaatttgtttaataatattcacactgatagttttattactcatgttaagttaccgcatggtggtaatgcaagagtagaaggtattggcactgagaatatttttcctaatttacctctgcatgatgtcctttatgttccagttttttagcataatttgttatatgtctctacactaacggatacttgtgcttactctttcttatttcatgacaaaaactgtgacattcaggacaattcgaagaggcaaatgattgggatgggtgaaaagattggcaagctttattatctgcattctgaatccaaaaccagtgtaccttttgttttctctttgtctaattctagaataagtgatcaaactgtttggcactatcgaatgggccaccctagttgtatcaaaaatcattctatgaataaaactttacaattttatagtgatttctctcctgattatatatataactcactcacaaccttgagtgtagattagtggagatcaccatgacttgaacaaggtattacacctttgtcca

SEQ ID NO: 164792 - DNA, 1748 bp, Cannabis sativa
  modified_base (1624)..(1650): a, c, t, g, unknown or other
  modified_base (1692)..(1700): a, c, t, g, unknown or other
gcttgattaactaattttccacagtcgggactcgaggtccaggcttcgaagaacctgaaagggcatcgaagttttggttcattaccccaaggatggagaaggattggggcatgatcagaaccaaagatagtgagattgatcacactggctcgaggaaaggcagtgcaccaattagcatccgcaatggctctgtccaacgttttcctcactctattgcaagagattctaaagtttttccaagttttagcgcctccttggaatccaagatcaatgccacacacattgaacataaagtctctaagaaattctccttcacgcctagcaaaggctttcccaccttctttctccgattcatcaagtataatgtttaagtcaaccatgagtgcccaaggctctttacattaattgatcttatcagtgagccaattccaataatcattcttctgagagtagtacggagtaccatatacgcagaacaagcaccaagtaggagcccccatttcagtagagacagaaatacagaacccatcatcataaattttcactacttcacaattaactcccctcctccatgcaacacagaagccacccgcaatgcccagagagggaatataactcgagttaatgaatcccagccgattagtaaccaacctcattgctttcacatcgaccttagtttcagacaagaaaataaagtctgcattgctgttgcgaatgagaccctaaagggttctttctgtagtaggcctacgtagcccacggtagttccacaccaggcacctcatgatgacagtgggggcatgcttacagctgcctcgtcgccacatcgaaaattttggttatattccacactgatctcaatgcaatttgcaagtatcttgtcgaggtttccaggactagtcaataactctttggcatttgcttctcctttttcctgcagcttctggtttttacttcagaagacctattggtcgagtctttcttgtttcttctactcgatattttactgcaggctcttctactcaactccacatctttgtccccagcaccaataacaaacttctgaacatcagagggggcttcacttgtcgacccgatctcagtgaccacagctgcattaggagtaaagttctggctaggtgacgacagatatggttgaagccatgtatgggctttacattttttattattatccaagagatgtatgatcatctcggacagatttggggggttagataatagagattgcagggctttgtaaaggttcaaataatctgggccataaagtttgagaaaaatttgttgggcttcagggtcgtgattgggccagccaataggagttggctcaggaaacatgtgaggtttctgagataggcatacccagttatgtggtatttctaagctttgggcaatcaaaggcccagtatcagggattagttcattgttggcatcaaaaccagcaaagtcaagccgtggcaaatctaaaatttcaggcccaatagagaagttaggtacagtaatttccataatgatcacgttttcaatggccacctcattcccatacttttcgaaattacacctactgcacgtatcaatagtaccacgtgttgggttttatgccctnnnnnnnnnnnnnnnnnnnnnnnnnnnatttacttattaatatagaccagaaataacatttaatgttgnnnnnnnnncatgatttatttcatgattatgtacattatgtatgaattcatctgaaa

SEQ ID NO: 164793 - DNA, 2577 bp, Cannabis sativa
ttcttagccattgatcttgatgatatctcagagagattacaaactaggagcaagcctttaacaagtgttcatcaacactctattgtaatacaacttcaattacacagagaaactctctctcttaatcactcaatcttaccatagttcactatttctcttcttttctctcaattcataaaaccagctctaaccaacaactaacaatgagcctaggttgctggtctatatatgagcacaagacatgccaacaaggcataactaacataatagaatttaacaaacaatgaaacttaacagaatgatgtaagaaatggcaagttggcaatccaagtgagaggggtagaattaaataggttaaggacatgtggaaagtgactaggatgagctgaaattatcaaattccatctcagtttattatattcacaaagaaaacaattatgccacaaggagtttaaatatccaatctcatcagtttattgcaattcttagcagtgctttacagtggttgaagttgctcattgtaagcactttggttcccatatcagatgaattttcactagtgtgcacctttttaatctccacaaggccttaagttactttttcccttatgaaaaaaatactttatatcaatatgcttggtcctatcaatgtacatgggactcttgcaaagatgaataacactttggatgtccaaattgatcaccacgtttccttcaaacagtttgagttcctttagaatgccttgaatccatagattcaagataaaacagtttgagttcctccaaacagtttaagttccttcagaatgtctgaggtgatacatttgtaatgtgatcattgatcttaaaagatctttgtaatgtgatacatttccagcaataaattcagtttctgtattggacaaagccactgtgggttggagctgagatctccaactgacacagttcccacacactaggaactgaaatgcagaagtgaacttccttgagtccctatcaccagcataatcaaagtcactaaaaccctaataatgacttttcatttacttctttcatagaccaaacactccttagttgtaccaactaggtatcgtagcatccacttcatggccaaccagtgatccttccctggattgctcatgtatctgctcaagcacctcatgctatgagctaaatctcgctcggtgcacaccataacatacatgacagagccaactgcagtagtatagggaactttttaatttcattattctctttttctgtacttggacactacttttttagagacttggtattggcttgtcataggttgttttgtaggtttagagacaaccatagagaactcatctataacctttctgatgtagttttcttgacagagagttagctttcctctctttttacttctcttgatgtctatccccaaaattcttctagcatttcccaagtattttcaagtcaaactcggtttcaagaattctcttcaagttcccaatcttggctttctctttgctaatcaataacatgtcatccacacacataaaaaggtattcaacatccttaattccataccctctgaaatacaaataggtatcaagaaagcttcttttgaatccttggttgatcatggaattgtcaaaactcttattctattgcctatgtgattgcttcaatccatacaaggatttctgtagtttgcataccatttcaacaactgacttctcttcatatcctttaggttgttccatgaatatcacctcttccacttcaccgtgcaagaatgttgttttaacatcaatttgttcaagttccaagtcaaattgaacaacaatagctagcattatccttattgtcttatacttgacaattggggaaactatctcattaaaatccactcccctctttgagtgaatcccttagcaactaacgtggctttatacctaatatgctctccatcttcttgatacttgaatatcaatttttttatacaatagatttctctttaggtcttgtgactacaattcaagttctgttctttctcaaagatgacatctactcatcctttgtagtagcccattttttttacaccaggtgctctaattgtagcttcatattagtttggttctttcgtggaaagctctattgtatagtggaaggcataggcaataatgtcatcccagacatcaaactcgatctgttaacttgtttggaatctcttctttgcttatctcgagctagttggtaatttttaatgtctggttgctcagggtagtactctcctcattcttctacttttgttttttctagattaggttccacttgagctgtagggtctctttgtccatcagacctatcttcttagtttctggtttatgttccacctgaacattggacttttggctctcttttcctgcttcagagctaatttttttcccttttttcttgcattctggttagtactacaagggaaatttattttatttaatattacatctctgctgattattattttgatcccatttctagacttggagggtatcctaagaaaatgcatttgttttgatctaggttcaagttt

SEQ ID NO: 164794 - DNA, 1248 bp, Cannabis sativa
  modified_base (925)..(929): a, c, t, g, unknown or other
tttttttttttttaattttgagtttcttctttatggccaacttgacaattcgtaccactccaacagtttctctaatttattttttaaagtgtttgttaatatttttttaggtccttttttgtttttaaaactaaaaaagtaaaaatactttttaaaattatattttataaaattgtttttatgttttaatttttgattaaaaacttaaatttaaaaaaaaaaatcaattttaaaatattttaaataattttttttaattaatattttagactccgatttcaacttaaacctgagaaaccaaacctagactcgaccccagacttggacctacatccggtcccgacttcggacccaacttcggactcgacttaaataaaaataaatttaaaatttacagaacacttttttgttttttgtttttaaaatttagaaaacaaaagtggttattgaagacatttttatttttcaagaacaaaattttactaatatttttgtgattaaaaaatttaaaatcaaaagtattactaaacaccacctaaaatagtttaattttaaaaaaaattagatatattttaactattttttatatattttagttcaataaatagtacttagttaaatgtataaataatttatcgaacaaaacatattttaatattatttttaaactgttacatatatgttatattttatgaattatttatataaaataaataaaatatattaaaatcttattatttttatttttattttcttctatcagttttttttataatttattattagatgaagtataatatttaaattatggagtaaaaataaaaaaaaaaaaaatcgatatacaatataatgtcaaaatttaaggtaaaatatataaattaaaatttgatgtggcatttagtaatacttttgttttttaattttnnnnncacaaaaataaaagtaaaatttatatttttaaaaaataaaaatgtgttttataactacgtttgttttttatttttaaaaacaaaaaataaaagtgtgctctattacttttattttttgattttatttaagtcaagtccagttttgggtttgagtctggagctagggtcgtggtccgagtctgggactgagaccggagctggagtccgtatccaaggccaggttgaggtcggagtccgtatcgaaggtctaggttgaggtcggagtccaaaatattgattaagaaaaaaaaaactgtttaaaaaattttaaaagtgattt

SEQ ID NO: 164795 - DNA, 2352 bp, Cannabis sativa
acaaactcaataatggccttttccctactcttaagcctttcctcattaacaagactgattctagcttttaaaaacacatgaattcccataggagacttattaggaatccttggtcaagcacttctcataatgatgaacactatcaacaacaaatgaatccttgtcaactcatccaaggcactctgattttttttttttgacaattcccaaatgggactcagaaaaactgatcatggaaggcacattttctagctccccaaatttcgaaacagtcctctttaaagatcacatagtttgggctaactttaaacaaaattatctgttctttttttagtgtacacacattattcactgggaacttaaatagtatttatgagatagttacttaattgtattgctacctgtttctcaatttaactttaattgcttaatgattatattacacaaaataatttatctttttgacactcagagaggaaacataaacattcccatataatgtaggagctcttatttgtaagaggaaattaatggaggttttttttcttctttcatttaaatactaacactatttctttggtaaaaacttgtttcccaactttaacatatcaaccactcaataacaaacaatattttgtgcaacccttttcagaaaagaaaagcagaatgatgtctcaaactagaaaatcaactgagaagcatttcaaaacaataacaaaagaaaattactctatggttcttccacttctatctactctcatcattgtttaactgcaaggatatcatatctttaagcatttcaaactgagagtgttgaaccactctcttgagtactgtctctatgctcttctccaatccgtataagatttcatcaacctggcaaactcatcataacttatttttccatcctgcaagttcatggaaggtagttgagtaaataaactacttgaaataaaaacaaggacggtctcttatcataccttatcaatgtccacatcttccataatggcttcaacaacttcttcaatgttttcttcaacattaataccatcatcgaagcaatgtcgaagatcgtccatttctatatatccactttggttttcgtcgaatacttcaaaggctgcacgaatgtgcttgttttcattgcctagaattcttaccttaacaagtatgttcacaaagtctagatagtccaaatatccatccttatctaaatcaccctgtaaattcaattctatgtatagtgagctagtactttttgttagagagagccatatgtagaaaactgaatacatcttatcactaatttattttgagatggaactcatacatcttatcatatactcacccttctgcattctaacaagttctattggcagaatgcaaagagagtgtaaattattgtttgcttacaattttcattagaagatcaacagatggacatggaagtgaaagtttgaatccggctattagttcatccatgttaatcattcctctgctgctaacatccatacgattgaaaaatgcctttaaacaagcatcattttctaccatataaacactaatttcctgcaaattcaaaattaagtaagaggaaaaagaatcaaataaatatcatcaccaaggcactcgttaaaaatgaaaagaagaatatgctaagtggaacaagaaatctaaaagtattccacctaaaaataatatattcaagtaaagataaataagttgaagaattacaaagaaagctcttctcttgagcctgttcattttagagaattccatgagcttttcaaatatattaaaacccaaaaacatatttcgagctttctttccagcttgtgactcaggatgatctgcgtttagtagagtagtagtgaggacattaatattagttactcattattcattatagaagctctttaaacacttaaatataacattacctagtatgtcctgagttgtatgctcgcgttttggacaagcatcttttgtattgtccgggacgagactaggttgaggtttggggtctgggccggtcgaaactttaggcatggggggctgctgcgacaggggcccatacatggagggatgttgatcaggcggcttaggctgatgcgatgggggcccatttgtgttgggattgtgataaggcggtgtaggctgctgcaatgggagcacatttgtgttgggtgtaggctgctgcaatgggagcacatttgtgttgggatagtgatagggcagcgtaggctgctgcaacgggagcccatttgtgctgggatagtgataggggggcataggctgctgcaatgggagcccatttgtgttgggatagtgatagggtggcgtaggctgctg

SEQ ID NO: 164796 - DNA, 545 bp, Cannabis sativa
aggtggacaaacaatttgaagtagtctgccatcccaaattgagagctttcggtggtaccttcaaattccagaacttgcgccagaactcagaagaatcaactgcaatccaatttcttttttgagcttgtatcaacttgaaatttagtcattttagtaattagagaaaacaaaaattcattaaatttaataaaatttgaaaatatcaattcaaacaaagctaaaatatcaccccattcaaactctgattattcctctataaaatttagattgctcacctaaagaaggtagttgaatcatctatttgtagatggactgaccggttatggtaaattcttacagtaaattataactttagagaattacttgtgagtattccgtgatcaatgatattgacgaagtaaaagtgagtcatctttttattcaagtggatatatacataagagaacatagactaattagtttgagtttcatattataataaatttaacaattatttatgacttagaagtgaggagtttaaaatttattaacaaaaaaaaaaaaaa

SEQ ID NO: 164797 - DNA, 1297 bp, Cannabis sativa
ttatatttttgtagtgtaagagtatcgaacgagctaggggcagaccacccaagaacagcaaaagtatcgttaatagtggcagtaataacttcattcttaatcggtgtcgttttgtctctaatcttggtcatcactcgcaatcaatacccatcgttattttcagacgacacaagtgtcagaattcttgttacaaacctcaccccacttcttgccacctgtatcgtcatcaataacatccaaccagttttatctggtaataataactattttttaaaaaaatattatgaatattaaaaaatatatatatctttatttgttttaaaaattaatgcaggggttgccattggtgctggatggcaagctttcgtggcatacgtgaacgttgcttgttattatttgttcggagtaccattgggcctgtcattgggctacaagctcaacatgggtgttagtgtaagtaaaggcccaataatgtcaaatatataaaactataaataacaaaaatggtattttgtttttgttattttttctaaattatttctggaaatattatcaggggatttggtatgggatgttggcagggactgtgttacaaacttcgattctttttctgatggtttatacaaccaattggagcaaagaggtaactaattattggtgtggcataaatcaaaattattaatttttatatattttcatttgatattgtgtttgatctgactacgtggcatgtgatgcaggcctctttagctgaagacaggatcagaaaatggggaggggattccaatgaagatatagaaaaattagtgaaataattatgagtgtatttgatatgtttgttggtatatataactatatattaagatgtccaacattttggagaaaaataataataaaagaaattcttttataatgtttgatttaggaaaaaaaaaaaaacaattaactattacatggaagaatggattttatgtacgtatagtatgtaatcaaattaaattttttattttttttttaaaaaaaatataatttacaattaatattaaatatagattacatacagtaatatatgctgtgggatcatgccatcatatataatgttgtttaaagttattaaatggcttaaatgattaaatattactacttacaagaaaaatggatgtactttgcattaagaaagttgattgtctattgtgtacatattagaatattttatttatgaaaattattttctaattaaggaaataattttttatttaaggaaataaataaataattgattttctgataaatgaat

SEQ ID NO: 164798 - DNA, 758 bp, Cannabis sativa
ttaagaggaagattctttttttttttttttttttttttttaatatggtgatgtgcctaagtgactttttattggttatatataaaaattaaaaagtggtggggttcttcgaatttctgtgcaacataatgaagtgtactgttgattcaggggagcaatactgtgtagatctatctaccaaacaaaatgagtttcgctctaatttgtagtttacttctttcctcaataataatcaatagattatttattcaaaaaaataaaaataaataatcaatagattattatcattagttttaactttatgaaagatatatgatataatatgtaattaatgatatattccaggctcatctggacagaaactatttgtcctactagatgcacacttgaatgtattaaaaaatatatatttacaaaaagttacatatatattattatatttacatattgctattagccattatactactttacatacataacactactaatttggtgattttttggggaatagttaattgtttctataataattattaaatttaaaatatgtaatatttaatatttaattttctactaatatatatatgtatttatttaaaaaaaaaattaaacatttaattgtccttaaagagattgtaatggtattacatataactgttactctcataagaagagcacacaaacgtttaccgtgtgaaaattaatgttgttttttttttttcaaacaatcctagtttttctttgtttttttttttt

SEQ ID NO: 164799 - DNA, 1209 bp, Cannabis sativa
attggaatctctcaattactttcaatagtattgtagtttcattattcataaatgataagtatacatatatataaatataatttgcataaaaaaaattaatacgatgtatagcatacctacaacaaaggttaatgttcaatattacatacgtgtagtttcaatttcaaccttttcacgaaacacaaatttagtgataacttggcagataatatagataaatatatatatgtcgtttcatataaatccttatgtcgttttagtgtccttccccaggactaggcccagattggttagcccatttgagagtttgaataatgattaattcatgcggttgatcctcattaatggcacccaacctagaaacattaacatcgctcatggacaccaccgatgttgttgtactcttcttcaatggacgaccttctattggggaaacaactatgaagctcaacacaattaggagagtaataataaggacaaaaatgacactacaataatggacctgtattattaatcctctagccatgttattatgtatatatagcttacaaaactattgtatttggtgatcatcactagggttttatttatagtagtttttatagtgattgtggttttcagagactttttggaaaaaacgactgaagaggatggccggcagcatgcatgcatttgttagttaggcttgtttgaaaggtactggatgagtagtggtgttaaattaccaaaacgaatgggttgtgattttcatgagttccatgcattcattacataatccctgaaacattaaattattattaattatgacaatataatttcgaagtacgtagtcaaaagaaatattaattattatggggatgttttgtcatgtaatttagaaagtttattattttggagaaatgttaaaatggcacacaaagtgtttagcatctaccatttgtgtaaattgctattggtgtaatttaatatttgattctacatattttattttaataaatattatagagaacttctaactcaattataaaatgttgatccttatagtaacaatgctatttatttatttattttttagtgtattttattatgaatagagtattgttattgagcactagtagtaggggtgtgcatcatccaattcaatccaattgaaccgaaccgatccaatccaattcaattacaaaaaattggatatccaattacaattgg

SEQ ID NO: 164800 - DNA, 893 bp, Cannabis sativa
gttgagataataattaatgattttaaagggctatggattactagtctgttaattaaataactacctcatgtagtgacttttcttctggtacaatatcttttaaacaattttcaacttcaaccctttcttggggtgaaagaaatgagagggtccatggcaacatatcctccattagtactattggaacactgcataagaacttccaaaccagagaagcttgttccttttcagatatatgttccatcagcaaagggaataccttcaaaacatatatgaataataatatataacatttaagatatctataagtgaatagttctgcatatacatgaaaaatgattgttattacaatgtcccatatgaattgggagccacattgtttgaactgtacgttttacccatcaaataaataagaactttttaaaaccaaaactgccaaaagctctttatcttttgtctataattaagtaacaatataattacactttttcctttacactatttactcaaatttattaattgtattgttaattattagtttgttgagtttaaaatgaaagtctgtaactataacttcctttttcaatctcttttctcacccacagccttagaaatatataaatatatatctgccaaagtctttttattttatttatcatggtgatgtttggttgcaaaattttctctaaaatgttttaaatttttttaaataatttacattgtcaaaactatattttaattttttaaaaaacattcatagtaaactaaaatattacactacaaaaaattttgttgtgactaaaagtaaaaaaattatgacaaattataaattattattcctatgttataactaaaaggtacgtggcacaaaaattacaatttattgtgactaa

SEQ ID NO: 164801 - DNA, 957 bp, Cannabis sativa
  modified_base (859)..(867): a, c, t, g, unknown or other
ttttgtttgttcattacttgagctatgttcatgagagattaagctctgtacaagaagatgaagaagaagaagacccactacgtaattcgccaaaaaaaaccgacccaccgagtattatttttttttttttttggctcttctttgttggtgctgttgttgtcgttgagctagtgcttgagttgtacgagatttttccgtacaagattcgtcttcttcgtttcgtttggtgcatttgtccttactggttgtcttctccatttgagcttgtgattttccttattttaatatatatttttttgattgttttatttcttctctcgtacaattctcctttgctgggttttcttttatttatattttttattttgatgttgcgtggggatgaaggctttgaaatgagaatggggaatttgggattcttgttactatttttgagcaagcaagtgggttttgctttttttgggattattgttaattagtataacatacataatctagggttttcacatctagtaatgtattactcctctctgtaatgtggtcgatcaatgtttgaaaaaatatatactttatccttttttaaaaaaagaaatagaaaactaattttagttttgtgatcttgtggattttctgggaacatcccaaataaaaacggtttttgtagtttaaagcacttgtaataatagaatgagtgagtgttttgattattattttataaataattttttttgtgtgcatgaatttgctacctaaacaattgactcatgatgtattagaaaatttctaggaaaactgaacgaaagtggaagtgaagtgaaggaggaggaggagggtgtagggcaatgagagagagagagannnnnnnnnagagagagagaagaagaagaagagaattagagaattagggttttttttaatttttatttctttaaaattatttttttaatttttaaagaa

SEQ ID NO: 164802 - DNA, 1014 bp, Cannabis sativa
tttctggttgtgtttgtgaagatcgtttatccgggattgtgtgaattgttactaggaaatttaataaagagaaaataaaataattactactttttaactcgaaatatttattctgtataattactaaagttagtaacttttctttctggttttaaaagatgaaatcttattccaatagatcagcaattacaaaagtcaagtaatattaaagaactgagagtctgagaccactaccaacaacattaaacaattctcttttgtatttcatgtaacctttagagccactaaaacccaaataaacataacaataatcaaacatatgtaaagaagaagaaaaaaaaaaggacaatagcataaatagagtaatcaacaactacccttgtcggctaattaatcctgcaaaacagcaaaaccattatttgaaaaataagataaaaatgttgagctgcattaacacagcaccatacttgcacaagagattgcctctcttcaccaagctatctgcaagttgtgtagggaccaaaactggctactgctagtctactatcaatgtcaccctgagatttgacttcagtgtcatgattttattgtttacagagactatttgaaaccctctcagtctctttaaagccataaatggtggtaagttttaaaatttgaacacccctccagaaattcaaaatatggaaacaaaacaacccctttacttcaacatttatagcattgtaatatgcacacgccccacaagaaacagtgattcaacgatattaatgaaaatcatagagcaacacattgaccaacagtacagtaagatatgtttctcatttcttgaccatgtttaaatttgaatacataggatcttttttccctcaactattatcatatttaaatttttccatttaaactttttctcttaaggtgtgtttatgtaattactaggtagggtaattactaggatagtaattacgcagtttagtaattacactatattttaaaatgcaaggtgtgtttgga

SEQ ID NO: 164803 - DNA, 643 bp, Cannabis sativa
agtcattgtgttcaaggataatttttaattgggtataagatatagtataaataagtgagtatagaaagaggaagggtatgcaagtcttttatctgcatcataggggtctaagggctccaatagcttgtaattagcttttttggttatattaaatatcactcaatctatatgtcactactggttggcaactgttcttgtctccttgagataattcgactcctgcttcaatagggaacttgatgcaaaggtgcctgattgaggtcaccacatcgaattttattgaggcaggtcgaccatgtaagccgaagggcaaacccactatgacaaatgtacaatacttgaatgcttataagctgaacaatgttgaggtatattatatttaccgagcttctattattcgcgaggatcagagcaaccattctgtttgacacttgagtcttgatgatcacagcaaacaaagttatggcctgatccatcatatggggcatctgggaaaggctttatgcaaacgcatacactttcccgtcgtggtttagagcccgagcatatcaatcaaatgatgctcgggatggtccccaatgtgtggtctgttaaagatcaacacctactctacaagtatctagaactttctatcattttggta

SEQ ID NO: 164804 - DNA, 1720 bp, Cannabis sativa
agagaaaagagaaagattgggttttgggatttgtatgaagaagtttctgtagatgaagaaacttcttatgtaagagtgtgagagataaacactttgagagaattctaacagagcattgatattgactttgttaactcaaaaactagccctaataatgtgaacatcaatgcttgacatgtggcaagaaagatgacatctcggagttgagtagtctcaagtcctagcaggtcaacttgggaagggtcctagccctgcgcctaggttgacttcgggaactccgaaatggaatagttcagactttaataacttgaatccaactcactatctttcagtattctataccatgaagacatggagcaacctaatacaaggtctgggagctaaaattacacgaacatgcaacccgaaagccaacctaggcacctagggtttccacccggcacccaagttgacatcctcaactagggtttcaattttcgagattatcttagtgcaaagtagccaaaacttgcattgggacattgaattaacatacgacagacatgttggtggcatcaaaatcagattctgagcaagttgatttttgagaacttggggccccgaggccccgagcacccagcgcccaagttgacaatatgtcaatctgattgaagatctgacttttgtattgaattcgtcttcatcaaaaatcggggaaatgggtcatttcagaggaaaaacaacaattcatgggtagaaaaaatggggcccagcgcctaggttgacaacttgccaacctggacctcaaaaaatggagttttcccaaaactctttcgagcatcatctccgtattcagaagatattgagaatcaactatttctggggaccaaataaaactcctgaaagggcaaaagagggaccttgcgccgaggttgacattttgtcaacctgggctgtttctaattcagatcagcaaaaagtgatatgggcatcttcactgtcataaaaaataactaagatcaagtaaacttgaagagaaaaacacaaacccaagtccttggaaacaaggcccagggcccaagttgacttggtgttgggcccagcgcccagtttgacaattaacttgggacgctgccttcaattgctcgagtgccaaatctaatgcaaccattaaatttgaaatggtcaaaaatagggggagagacctcgtcctcaagttcaaaaaccttgaaagtatcaaaaacagaaccccagaagctcagtttaaaggccccagcacctaggttaacatttggcttggttcgctggttctacttatccaaacctgatgccatttcaactatctatcaaatttttcacaagtgcaatgatccatgaagtcatatcaatcaaattcacaacttcaattttggctcattcaaaatttgaaagtttcgagtcttctattttcgcaaaatagcaacatctctgagaatgtgtgaccagcttcaccaaacatataaaaggtttaagggatgtcaaactatcacctaagagtctcaaaggactttccttgggcgtttttacacctttttagcgtccaggttgacgttagatgttaggcattggaatgtcaacctgggcataaggacctgaactgtcttcagtaaaacggccataactcactcaatttttatctggttaacgcaattaaacttgcgttttgaagctattaaagccctctatcaagtcctatcataca

SEQ ID NO: 164805 - DNA, 588 bp, Cannabis sativa
acattcatgactcgattgagatgagggaggtgattgctaggatctttatcttcgaaatactgagccatttctggcatcttaaaatttttagggagctccgctcctaggtggttctttgcacagggctccatgtccacattctctgagttggagtcattgcttctttgtttttggggcactttggcaaggtccttctttcgggtagcctgctcaaccaaaattctctcatttatgacttctctctgaggtgataggtcatttcttcggttgttaatcttaatcctgggagtcccttgccaggcgttcaacttttctctcagttcttctcgatgagcattttcaccgaacctctcagcactgaatcagttgtttcccttcccattattgacagacatgcttcggggttggccaccatcttgaggtttaggcctcctccgtggaggcctattctctttcggattgttagagcgtacctttcttggatccgggttaactatgccccctaggtactatagaggggttcaccttggcattgtgaagtattttagtgggtaccttatggtacttggtgtccactcctttggtttt

SEQ ID NO: 164806 - DNA, 644 bp, Cannabis sativa
tatatagcctgcaacacagtgagacttttatttgtggggtctttgcttcattcttacaacttagctagaaatcaaagtgttgggttgtgcatgcacacacaacacactcatttaatttttaaatatatatatatatttatattaaaaatgaaaatgaagttattataataattaaggttttgatttatatagttgatgtttcaacttcattgagaattttctgtcctttttattaaaaaaaaataaaaataaaaattagattcaaagttgatagatctcatgaatcattgctatttgctaatgcaatatgaggtggttaattaattaattaattagtgatttaattaattaattaaattatctaacaaaaataaaaggcacaaaaacactaaaccaactcttcaataaaaaaaatagtcacaacataattttttgttactaaatgtgacttttagttataacaaaaagttatttgtgactaaaacatatagtatttagatacaagttgttactaatttagttttagtcacaacaaattaatattgtgactaaatcacagtaaaatattgtgactaaatcacagtaaattaattgtgatttttgtgattaatacttttaatcatgaaccttttagttataatgta

SEQ ID NO: 164807 - DNA, 1550 bp, Cannabis sativa
  modified_base (417)..(422): a, c, t, g, unknown or other
cagcttctaggaaaacatgtagatgttttgtttgatgtgtcaagtgtgtcatggaggagttgagtctattattgttgcttaattttatagtttacgcaagtgtacgtaatttattgcagttaaatactcacacagatgagatcgattcattagagaattgatattgagtaccactaaattagatttatatttttatttggtagaatcgaaaatatagttaagcaattaattaactaaaaattaaaagacaataaaataaacaataaaaagtgtagttaactatggattagtgattaggaatatgaatcctgttattttagttacccaattattaattaaaatattaattttctccttttaagtgatgacagattataaaaatatttctaacacttctcagatcattaaggtcctaannnnnntattatctacttgcatctctgaaagaaattaacatataatttgcattgattacataatctaaatgtcacataggctatgtaaatactctcgttttacatcaaaacctatgtttgttcaattatagcattcttaatattcacttgtcaaattttacacagtctaaaacatgcattaaagaaaataagaacaaatcacataatccaggaaagaaaaaactaacaatcacattaactaaatccggaaaacatcaactaacattcatcatatctctaaattgggaatttagttcatgatatccatgttcatatccataataaaactaaaaataaaaattaacataaaataaataaaagaaaaagaaaaaaaaatgattgtggaatagatctgggttgccactctcactcttgatgtcgtcctttactgcttttagggttaattttctgactcgcagttcctttaaatataagcaaattaaacataaaatattgcaagaatatgaaattaccctcgagtcgtacgaactctcttgctgagaccacttatagcctcgctacggtgagattaccatcttgaaaacatgccctttctgcctaagttttgtcgcagccataagtcagctcagctcaccgcggtgatgaagaattagctgcggccaaattaagcctcgatccagccattggatcaggcaaaaaaaaacgtccattctaccaaaatctagtcatggccataagttatctcgtcgcggcgatgaatagttgaaaaatagatttttcaatctagtttgtctcgccttggttctttattaaattttgatgctctagacttgtacagactcaagaaacctaaaaacacagaaaataagtataattttgtcctaaaagcattaaaagtgactaaaaataactctaaatattacccaaaatctaggttaaaaatagcctaacaattattcatatcatggttgaatgttcgtttgcttcactttgctggaaatgatttgatgctttggttgtagggacattgtatcctgattttttttagctcgttttctaatgttctgactattttctcgaaggctaaaactagtcaggtagcaatgatttgttgggttttgtggtgggtgttgg

SEQ ID NO: 164808 - DNA, 507 bp, Cannabis sativa
agttcagtcgagagtgaaaaactattttcaatctctgtaacggttaatccttttttagtttaagaaaagtgcggttcaatttaaactttcaattaaaataaacatacctgttatttttgtaaaggttctgggatttggaaaaacttaaactatagaattttaaatttttttaaaaaaaattatggcatccaacagcccatgtaaatgtaaaaaaggaaaaaaaccgatcaagaagccccatcaccaaaaccattatatgttgtgtaatttctaccgaaataaaatttattttcatagtaatcttatttacttttagttcttcagtttaatttaagtttatgtaaagagtcatataaataacacttttagtgtttataatttctcatagttgatgttgattgttgtagggagagaataattcttaactactagtaatcttaattgttattgtggacaatgtcccacatggaataaatggtagagaattgagccatatataagaacatg

SEQ ID NO: 164809 - DNA, 923 bp, Cannabis sativa
atgctcgtcgaatttatgttatttctgtatataatatacttctatctaggtggtaaatttattttttatgtaggtaattattcaattggatatactcaatctaaataatatataattaataaataaaaaaaacatatattttactattatataaaaaaaaaaaatataagagtttttacactacatactgaatttttaattttttttacttttttactgtagcagggttgaatttttttcaaaaatatcatggaagttttatttttggtactgtattaattaaattttcactattgttccatgattattttttagttgttttactgttattttcattaatctgttttgttgttttacggttgcttcataaaaagagtattttgtaaaaaattcggtatagcagtaaaattataaatttttacccaaaatttaatatttttgtaaagactcaaaaaaaatatatgatatgttgaataaaataatcttaacctcatgattccatgccacaaatgcctaccttatttagagaatttgacaattgtttgtggagatctgcaattgagttgtccattccaacaatttcttgctttaaattatgatgacataaagatcttaatttttctcttacagatttgaaaatatcatgaacagccacctcagcttcattactgcgtatatataaaaaaaaatgttatagtaatctcttacatattaatatgtattgagattgttggatttaagaacttttgtttaatttttgtaaaaaaagtttaacatggatgaaacttcaggagacgtgatttagtatatgtcaatgtttaaaaggcatgatttgatagagatcaaagtctagggagtatggtttagatcataaacaatcattgaaatagtaaaattgaatgaaattaaacaaaagtccttaa

SEQ ID NO: 164810 - DNA, 781 bp, Cannabis sativa
gagagagagagagagagaaaccagtgaactccattcttaacttcggtgaatgtctgatcctttcgacatcattatccaccgtctcctaaaaattagagcaagagagtatccagacgcaccaccactgaacccaatagtgagccaccccagtcactggagtcgttaaacgttttggtcggcattgatcaagtttttagttgggcactcaattttcaggccagtcaccaccacactcgtccactccactcccttttataagtaagtcccatttattccttgaactgtataatttctttcttctatagaaatgtgtgcttaacttttgattagggataactgtttgcatgcgaatgtgaggattgagtgtgtaatgtcttgggaattttgaaactgtagagatattttagtgtcagtgtaggtataattttgggtattcaagctcgtgattcgttttcctacattggttgaatataaattgtgtctatgttgaatcaaacttaaatcccctcatacagagtatttagggcttcaaatgaaatatctgggtttatatcgtttattcttatgttctcgattggttatccaaaatcatagctctgtgagggtcaggctaagcctccagatgacaagtccgacggggacctctccaagcagtctttaggggaggccttaaaaataacaaagacaattcatgcaaatattcaagtttaatgaacaacaaagataatcacaagtataaacaaataataaacttgaaatgtaaagactttagggatagaaa

SEQ ID NO: 164811 - DNA, 500 bp, Cannabis sativa
agattcggataagatgagatgagaaggaatcggatatcataataataataataataatagaaatttttttttataaaaataaataaatgacattgcactacattaaattgtaaaatttgtaaactaactatattaaatttacgttttaatgcttttaaatttttgttaatttattgcttataatcttgtcagaattacttgcattttggtttgttcatgccatgccaccaaatatgtttttgtcactaataaaaaattttcattgaagatcgataagttggattttgttaaaaataaatagataaattatattttttttatataatgataagatataaaaaaagaaaaagtgattacgaataacgttaagaaaataaagtagagagggaaacttctttattttttggattaaaactatgtatctctcaatttgttgtattcattaattatttatttttaaagtaaaacatatgaacgtatggtattgtttcaataaaaat

SEQ ID NO: 164812 - DNA, 1034 bp, Cannabis sativa
cttaacatttgtctcccaatgcatctaataattacacttgtgcttaacattttccttggacaccaaactgaactaaaactttgacattaatggtaaaagtttcatttttcaagtttttttttttttttatgaaattaagtgtcataaatatattgttgaggtaaataacatgatcacacctatggcaatcttttatgtttggttgctctattaagttagagtattgagatgtactaaggtatgtgtcaagtattattatgaaatgacgttctataattaattggttaataattttttataatttttattaaagtaaaataaataaaatttaatattaaattgtactaatattataataatattgtacctcatatattattttagcattttttattaaactaagaaagccaatgctttgaaaaagagtcaatgagagagagaaattagaggcaattgagtaaaggcaacggccatagatattgttgttatttaattaatgggatttgtattgtaaattttcaaggtccaagttattaagtgtctaaattaacaactattttgccacttaaaacttaatattaatatataatgtgttattctcataataatcatggccttattaaaaagtagtacactactctcaattgtaatgacttgtttatcatatttttaattttgtttgtcttacctcgattaatggagtctaacttatgaagcattgaagcttaatatcaacaaaaatgcttgcactaatagtctccactactatttaacatgtgttatattgttattatttatgaggttttatattctttaatttaataattattatagaatattaattattagtcatatgtaaaatattattttgtagtggtgtctaataacaaaactcggtacgtattaaattctctgaactttcatcctcatcaggtgttccttagtaaaattagatagaattttttaaatctaacaatctcaatatatagttcgagaataattttcaacagtctaaaaaatttagggtataactt

SEQ ID NO: 164813 - DNA, 1356 bp, Cannabis sativa
agaagtaatatatttaagtcttaaaaaatagaagcagttaatcaaatttctattttggtggaattgattgaggatcagctccaggctagcaatctcatgaatctcagtttagcaagttaatcccgaataaatatggattatggttgctatttttgtcgcagtagttaaagaaataatttggagaagatttgtcccagcgtatttatctgtacaacatgctcagttgcacagcatatcacgtgatactatccatgtcgaaagaatggttgcaagatagctttacttggataaatctaactttgggaggaatctggttggcctattcgggggatatgctccaaccacattttaacgtatttgccacatgttattttgtgaagtgtcaagccattttgtgcaaaatttggagtaacataaactaaatatactcctcatgatagacttcttgttttattggatggaagaaactcttccacctcttgtgtgctagcatttctttgatctaacctgaaaaaattacccttacaaaaaaaaaatattcttaataccacctataatgaattataataaaatagaagaaaaacttaaaatcaagctaaccccaatcaaacctcccgacccctaattcccaatcataaagtgaagttctgtattatataattacaacaattgtttaactaatcaatcaattaagtgcgaaataatatagttgatattgaaacaaatattatgtagctagaccgacaaaccagtaaagaactaaagtacaaaaaaaaaaaataaaaaaaaatacaagtttttcatatatggtatcagtaatccttctagattgatactagtttacggggtcacacctaaaaataagcttgatctctaaagatgtaaaaaatacaaagtttttgatgtatgcataaataaactcaatcgaatttgccacaagctcaatgtattccacattggcaaatgaacattgttgaaccttcaagaactcaaactcccttcgataagcttgaagtatgcctggttactcccaaagcaagtcttgccataaatttcttccaagcacgatccttgagaataaaccttctcacaaaggttttgcactttgatattgtagtcttgtttgataactcaaaacaattataaagacactgaatacaaaggtatagttgaacatactatcttttacataacaatgattattttttctaaagattacagtatagaataaaaggtgaaagagttatggcccgttttgcatattttttagaaaagctaaaagttactttttgaaaaaactgtgataaaaatgtgtttggtaaacagtcaaaataacttttagaaaaaattgttttg

SEQ ID NO: 164814 - DNA, 540 bp, Cannabis sativa
tttattaatagaaattttatcaagtatatgtgaaaatataaactaattcaaagacgtcgataaatgtaatcatccctagaatattagttcaaaattagtttacatttgaatatttaaagagcaactattgttctatttgaaactcgttactattacagatgacaaatgcccaaaaatagaaataaaagtctgaattattgttgtaagattttgcttatccattaacactttttgcagatttgaactaaaagtattcttcattcacaagtcatggtagttagtctttacattcttgtatttatcacatccatttttagcagcattcaaaatttaccagaaatgaaaatgcaactcaatagaaagaaatagagagatttgagctaattaaacacattctttcattaagtatttcaacaaaaactcctcataataatctacaagcgtgggatatgcatgtatctaaaaccatacatatgataaaaatcaatacttacaccaaaaaaattaagaatgctaccatttctttctcaaaatgaatca

SEQ ID NO: 164815 - DNA, 776 bp, Cannabis sativa
gggcttggggcatagtctgacttatcttaaagacgggtatgaaacgactaatttcaaattttgcttagaactcgtctgcgtcaccctaaagaaaggattgaaaaagccttattaacattattatataatctaattttatagggatcacttgctacagccgcgacattttgcctgttgacatgggcaatctcaattaaaggggccacttatccctcaatgttcaacccgctcacactcattttcgtatctttatctgaggcaatcatactaggtgtggccataacaacgggaacgtaagtatttatcaaatatttttatatacataacacatttttttatacatacccaattaaacactaagtgtgtatacatatttgcagtttgattgggatggtgttaatcatatttggattgtattcattcttgtggggcaatagaaaagagaccaaaagcttagttcatgatgagaacagcttagaaggagaaggagcaataaagattacaatgagtgctactgatcacattccaacaatgccaactactccaaaacaatgatataacaaaaatagacataaagctaaagctaaaatttatcaatgttgaccctaaaaaaaaatatttatgttgataaaagcttactctcttacttattatctaattgggtttcaagtttttattacatattccaagctaaccttgttagtgtttaaatattaattctaagtagagttagctttttttttttttttttttttttgtgtttgtttttttttttt

SEQ ID NO: 164816 - DNA, 1047 bp, Cannabis sativa
aacaattaagcaaacataaataaaatagaacaagaaaaactacacgtgcaatgcaattgcacgtggtatactcacctagtatttataaaatatataaacataatactatataataattaataattaagttgtcttacacatattatataggtcaagattttaaatttcaacaagaacatttttatttttaatatttaaagcatagtgctaaacacttatctttcaatatttttatacatataatttatgatatcaccatctcaaaaaaaaaaaaaattatgatatcaattgttcctaattattccaatactctagaatttaagtatcttttagttaacggaataaaaatataaaaataagaagaagaataagatggaaataggaatagagataaaattaaactaaatttgagatggaaaaaaaataaataaaaaattaataaatttttttttttaaattgtattggaataactttcttttcaaattaaaatagaataattatttaaatcaaaaaaaaaatagaataattattctatcaaaatgataaaaaattatttcattatagtaaatttaaatgcagactaaaggaaaaaaaaaaattatataaaatttatatctttatattaagtttttttttaatttttttcatttaaaaataaattatagtttaaatattatgaaaaaaaaaaacttaaaatataagtgcaaataaaactccctttatagggttcgattctggccaagtcccgtcttcttccctcgcttttgaagggttcacatcttctgggattgaggtgttcgcctctgcaatggacgagatactgaagaaaacccacaatctttaggtcacggatgaagacgaagaatgagaagtggataaaagcttgtcaatcacggtttcaaaatttaatttgagaggccgcctctgtacttactcagaatacagtaagagatttctcaagaaagtgctgggaggaatatggagattgaaggatgttgttgaccgaggttttcggcaactagtaaaatattataatactattgagc

SEQ ID NO: 164817 - DNA, 974 bp, Cannabis sativa
ggggagagagccaaaggcaaggtgccccctagcatgaaacctttcaggtgaagtctctccctaagaccatggggtgtttccctcagcgcgagctccttatggtgggtaggcttgagttgtcttaattgacccatagggttcttgtctcatgaccagtcttttccaagctggccttgtggggtattatcagcggaggacaaggagtcctctctgccaacatacgcaattgagacatcgttctcttgtcagtggcttttgtgctagaagtgcgaggcttgggttttgcctttgagtataccactcatcactttttgcatgttagccaccatagttttctagcctttggttttttcagcagagtttgtttatctcctcttcatagtagtgggttcgaatgcttaagctcacccagtacatcttcttctcatttttgggcccacgtcttgaagtatcaaggtcttgtggcatagatggtgaaaggtggtgtactagaaatggccttctgggcggttaaaagttattatcgacaaggggtatgactgatgtggtgtccctatcccgttgtatgttgtatgttgacttgacttcctccaccttggttgtctccatcagggtggtagtgaccattttcctcgttgccttcttcgacgatggtgagtgaagtttcccttctggtgtcaactagttgcttgttgtccaagtatatctcgatgtctcagagacgacaagaatgtctaggcatttcaaaatgatagtgaatggttttcgaactaacgtagctagagctcattggtcccacagacgacgccaaattgttgatggtaagaactcgtcaactaaactttagttataaaatcaaatgtaaagagctgaggatgaaaatcttaagaaaaattaagaacacccaatcatcaatagagtacaatactattgaaaaaccgtgttcttgcaaatgtcagttgtatataagaaaa

SEQ ID NO: 164818 - DNA, 854 bp, Cannabis sativa
aattcttaattggtgtttaaagttatattaattccaccggggggctgcgactggctggggaatgggggcacactaataaatgcagttgattagcaattttccatttctaaaccaatttattgtaattaatatactactctcaaacctatcaacacataaaattttcagaatttttattcaataccacttggtgccattattaacaacatgtagatactaaaacagagttctgttgacatgcattttaaagtgtccaacactcatatatagtgatgacatgatagcgcccttatgccaattaacaacatgttcatactaaaggagcattgttatatagtatttttttaattatttattaaattaaaatgtaggtgtaaaatccaatagtgaaatatacaaatggcaatacgccattttttatgatatctctaatgaagacgtcacgtagagttaaaatatgatcatttaataataaaaaatatgttttgtgtcaaaaaataatgtaaatttgtcacataaattgtaacaaatttaacacaacatatttgttataatataaaattttatcatcataaatgcataattttattgtttatttttatgctactttttaatattttattagtatattttttttcaagaatattagtatatttagtcctatatcatcagttatgacctatttatattctatttttattgtttgacataataaaattaataataaaaaattattgttttttatatttttaataaaaatatttaattttacaccaagttttacgttatatatagagatgcacacgggacggggaattggcggggagtgctccccccgtccccatccccgttaa

SEQ ID NO: 164819 - DNA, 1696 bp, Cannabis sativa
ttaaagtatgatttttttcttagctaataattagctattagtatcaaagaggagttaagttgaaactctatcattttacgcttactgtgattgaaacgaataattttgtggtggtagaagctatttgaagtacaatttatatatgttttgcgtttaagttaatatttttgtattttttctcaagcgttttgtgaatcgaattgtgcattatatgtcgtcaaaaattctcgatggttagttgatcgtgtggttacgaaagaatttctttcggctaatttattctttgttatgttaagcaattgctccttaatgaagattaaatctgttcaaaaattagctattagttttattatttttacttactaaaaatttaaaaaatttgtggaaattagaaatgagacagaggtgatagaaaagaagtgtacagaatccaactaaacagccaactatatttaatctgattaattattgattataaattttttgatgatcagagttcatctgattattattattattattatcattatttattactactttaagagatctgattatatatatacatattaatttggaaagtaaataattaatagacacgctaaattaaattgtgatatatatacttggaccaaataaattaatgttgtcctcttcaaataataataataataattaatggtgaattttttttttaaaaaaaagaattaggaaataatgatatatatacaaatagggtataattaataattaatgatttttggctccgtacgtttgaatcgtcattctgatatctacaagtccgtatcaaaatggaagaaatttgcttcaaataataatattttgatatattttctcaacaacaaaaattaataaatcaataaaagaaattgatgtgtttattaataatgaataagggttgataattaatatttttaattttgaattttaatatatactaaattatactcaaaagtagaatattttattgtttgtggagtggccactacattaccctctaagcttttagaatttttattttaatatatatataagttatataaataaaattaagataattaaattttagctattaaaaaaatgcttatttcctataataagcccaataataaaattaaagataaaaaataaaacccaaactcactattattgagagctcatttcaattacttaattattttatggtaattaaagttcagaaaaatgaacaatagtaaaatttattttgtggtaaaaagaggcacaaaaaatttacttgtataattatactaatttatatacaagcttaaaaaacgaattaaatattattgtatattaaaaaaattggtgaaaaatagactttcgttcagcccagatttattatttgaatttcactgatcatgtcctctcaaattattaaatttaaaaattttcgtttaattttactaatgaaagtttaacgtggatgaaagttagtaaaattagttgaacgttcaagtcatagacacgatttgattcataattcgggaggcacgatttgatatacatatcaaaatttagagggcactataattggtacataatcattacgttagtaaaattaaatataaaatcatacagaaatctttaaattcaataatcttgtaggaaaaattgcttggtgaaatcccaagtttgccctacaccactcaagaaa

SEQ ID NO: 164820 - DNA, 3554 bp, Cannabis sativa
  modified_base (1990)..(1993): a, c, t, g, unknown or other
tggtaaaataatatccaacatatcgaaccagctacttgctaccccagtcaacgaggttgggaataaaatgcatcacagattattcgaaacgttactggctcgcattatggtattgaagttattaagatgagcgactgggtccgaagccccatcatattgcgagacctgtccctgagggaattcagagttcataatatcagtatggaaaggttcggcctcctcatccgagtcatagccaggtaatttctagtattccccatcttggtattttcgaagcttaccctaactaaatgattcgcaactggatgggatccacttgctgttgattcacaataagttgatggcataagtgggggcattttgatttaactgctcgcaaagattgggttgtcttcgattcaaatgcttacgaagatcaggttgtcttcgttcataattacttacggatctcgtatctgagcaactctcagattgacaactcctcgtattgctcatactttcttgattaacataacagtgaggtcggcttccttctcgtgttttcgttcctaatcaactttgccctcaagacctcgagtgtcccgagctagaacttgactcgtcttgcacaggcattcttcatcggaaaaggttagatacacgccctctatttaggtatgtgtatgcctcctccctcttagattgagaaggacgctaggggtgtcttagtggtaaccctcttgttctaggttgagtcctaggatttctctcgttattacgagggatttcctattccctagttcggggttgccttatgttctcatttctgcgagaagcctctggcacatcattatgttcattcccttgtatcataaatccttggggtctttgaggtacttctcgacgatgttcttggttattctgttgttcatccactgaaacatccctagttcccccaggttgttcctcctgggtgtttatgggatttccttgatttgcttcctgcctcctggttcttgaacctcgaggtctacctcgtggccttcttactccaggatcaggttaattttgtgtattgtttcctttagtcgccttgactattgcagcctctctttccaactcatcgtttcgttggttagactcggccaagcattgtcagagttatcgattttccaattctactaatggtacatacctagtgggatcataagcatcctcacttctgggtacataccatgtagtattattggtttcttcattacttcgttttgggttttgattattacaaccatggtttattcttgaacgtgttattccagaagtgggtggactctgagaacccattggttctttcccaagacgatgtgtagtttcttcaggacgactaccatcgttttgattatgatcagccatggatagattttatttgtaaggagggatttttctgagttttatcacgaaggctctcaatgaaagcaccaaactgttaacgtagatttttgttaaccaataataagtcattttcgtaataaatttaacacagaaattataagaaattaataaagtataataagtataatattaacaccagatatttttacgttgttttgcaattaaatcagcatactctacgagtctgtcttattcaagatatttctgtgtatttaatacaatatacaattgatagtatttctgtatttctctcaaacattttccgtccctttttttgtgggatctacccctctttataggaatataggttggtagttatttacattttaaattataattataactgcttcatgaaacgtgggaattgatcacgttttatttaaacacgtgtagataacaattggtaaccgcaaaactgcttattattcttatcttcaaagatggtagatgctgatttggaaaatagcacctgacttaactcgtagatggtcaagtgttaatttggacaatcatatgccttccagcaatgtcatgagcaccagtgtactaagcaaacttnnnnctgctctttgaccataaggcctcatagactggacaatcatgtcttgtatattttgaagttgttacacttagttattgtaatgtagaaaatatgctaagtgtttaacaaatgattcgcctcgtcaatatttcttatgaaaagcgaggtgggcacctcactatacgtagtccaaatttgctctgggtaacttcacttattcctttaaaataaacaaatcttctctttggatttgtgtatttcgaggtaggctggtgtctcatcaatataggcattaatagttttgtatccttatctcgcttaaaactatacagctagtgagttatgaatatgctctattaattccatatttaatgagttattcctctttgcattaaatgatataacgttgttatactaagtggttcatattccactaattgacacatgtcaccctttgaagtgtagccgaattttgggtataacacttgttacgaagtgagagttggatgacttttgtgatagttatacttttgtgacaaaggatcagatcttgtcccttgtgtcaagccatggtagtacacgtaccacctctgaatacacctttttgcccgacgactccttttagggttttgtctactaagtgaaacctctgcctgatacacgtcttgtaccaaaagtggttgaggaagagccttcttaagggcctaatagtgagtattcttatatatattctacccagtagttggtgaatctccctagggtgagcttaaactaccactgttgggtcgtctctgacagtgtagctgggaatacgcgacaatgcacatcaccagtgaccttttggaggtcaagcagcatgtcgatgtacttgatgtaagccagcggttcctctcgtctggtatacatcttccatactggcatttgaaactttggtagaggtagggcattcatatatgccaacaacggtgatcccctcgaccgatcaagttcgaggtctgaaggcttagggccagctatgcctaatgtccctgagttggtccaattgcacctgcatagaaggatctattgttgtggggaatttattgaccgatcttccttagggaggctgctaattctaaagagacatgggctggctggccatactttgggagagtgtatggttaagattagccatgaactacagaccctagtcggccattcccaagtacaagagttggcctagggtggccaggcttatgcccggttgttgtgcttggtcgaccataactacattgggtagggtcttgccgcccgtgatacctccatggcctagacttgcattgggtagggtttggccgcctatgactcctcggtcgactagtgtcgactatgtgttaattcagggtagatcacaccagttatttgagtttggtggatctagacgcttgaagtaatcggtttcacttctggaatctccattttggatgtttccacctagtctctattggaaatattttaccaagatttacatttagtaccatgtatgtttcattaacattttaatatgaattctaaaacaatggaatatgtaacaccctaacta

SEQ ID NO: 164821 - DNA, 1079 bp, Cannabis sativa
ccggcggggccggcggcggtggttgtgacttttcgggctgagacggcggtggtgaacagatgactggacacgtggcgcaatcgcttatgcagagtaaacttgcttgatcgtctgattgctggtcttggtaagttagtgtgggcatcgttaagaacatggttgttataactaataaaaaccaagtcttttttagtggaagaacacattttcttctacccatttcatagaaattgtttctttctctctttttctctttgaattcatgtaacataattatatatatatatatatatgtatagattattatatgatgcttgtgtatggctcatcaaaaagggtttttgaataagattcttgctctagtgatgaagatttgttttacttttttgttaatataagttaaattaagttagtacaatttgcaaattatagtgttttctttttgtctcatttgttaataaatggttaaagtagaataataattaaggtaaacttagtgtttttcataatctttttttggagtgtgatgagtttttttgtaatatatcaaaaagagaagagaatcctaagtaaagcttctttaacaaataatgtcattctttctttgagatcaataataatacctttctgcaaacttaatcaataccttttttgtgcttcttaacttatacttttctttgctaggtgggcttcttcttcatcataaatatacatatatgtatatacacttttaataattatgaatcattatgttactaataggatcatgatcaataatcaactatacagtctattttatcatttaacaaaatagtgaattcaattactaatttttgcaaaatacaaaatctaaaaaaatattttctcaaaattaaatttaagtatttatctataaccgagaaacaaacttagatatttacactaaattactaaaaaatgaaacacaaaaattaaaattaaaaccccattaaagatatttctttaaatacataataatacactaaataaaaaatgacacatagatattgacttgacatttaacagccaagtacctacgaaagttttagaaatataactta

SEQ ID NO: 164822 - DNA, 787 bp, Cannabis sativa
actctttttcctcaacagataatgtctatatagttttctatttctacaccactaatgataatagcatattccctcctctttcactttgattctatttctagtttatcctcgaatattaaaggcttcttttggtcttccgatttaggttataaaaataaaaattgaaaggattgagtttgaggtttattgcatgacatcattagccaaaaaaaaaaagagtttacatgatactaaatatcagtcaaattttggttgtacttactgggattttcaatttggtgggtacgattccgtgggatcctagtaagagatgtttttagtggcaaacatgaactttgtcatcaagaaactttgtaatgattgataaaaagaacttgctttaaaccattgatttttttcattttatttttttgatattgaaatttgataagcacattcaaatcctgaattagacatttttcgttttatggagataagtaggaccatgaatacctatttgaaaggcttccactgagtattggtgcttcccaattttttcaatcaatatcaattgattagtctagcccactactactcatctatgcttgagtcactaaactatcatccccatacattttggtctttacatttcaaattttcaatagcagccacacatgaacaaagtttagtggctagagtataatcttggccaaattcatatcattctttgtattttgatttgattttgatattgatcgacgtaagagtgagacccttattttaagttttctttttttcttctgtttcc

SEQ ID NO: 164823 - DNA, 1321 bp, Cannabis sativa
tggtcaacgacctggaaaagctagctctagctcttcttctcttcataaacctctcaccgctgatcattttgctggaatagctcttctcactctccgtagtgtatgttgttgattaccgttcttattgattttcctgttgtttttatctattttgactttaatcgttcttgtttttttccttctttttcgggagaatttagtgaaactgaaaagaatatttgctttgtctgattcttttaggcggaaatgaagttcaaggacaagtggcttgcttgtgtttcttttggagaacagacattccgtacacaaatatctgatcagtacgttttcagaaaatgtaaattgtgttaattgtataagaatgacgtgaatcttcgaaaatgatggtattaagaatgcttaaaaaaagtgaccagttgcagcaaagaataggattaagattaagattggacatttgatcaagaataaggtagtaacatcatgttattttcatctaacgggttttgtgtgtttcggtccaatgataataataaaagcacaaagtttttcaatgtgtacagatttttaagcttagttattgagtttaatttccccctttgcttttttggttgataatgcaggacagacaaaccagtctggaattctgtgagtattgctaaaagattgtccaaattgatgaatattctccttttcttcttcattgagcaaccatatctttcaatatacaggaaaaaaagcttcttttggaaaaagatggacctcatgttgcaaggatatctgtgtttgaggtatgtatctataatacagtgtcgcaacttgactaaatttatgtgtgatacctgtataacttctattatatatgacggactaaaggactttgtgtgggtgtattaaggattacaggatatgagtgtgcaaggcattggtgtgaaaatagtctgggggataaatgttttttagactttttgagggattagttttcatagttttattgaaaatggatatgtagaagcttaccttttacttgaatctgaaatgtaaaatggtttgactttactagcttgctgtaactgttgatcatcttatgttttcctttgtcgcattgtttgtgtatcgcagacgaatactgtgtctagcaacactctggtaggatattgcgagattaatcttcttgaatatttaacgcaggtgagtgaaattttcattgattatatcgtttacaatttacaattatctcattacttaagagttttactttattcaacaaaatttatctgtaaatatgttcattgtaccgttggtttttaattgcagcataaac

SEQ ID NO: 164824 - DNA, 799 bp, Cannabis sativa
taataaattaagtttatgtgccttaagtgatgtatctgctgtgccgtttatagatgtatatttataattgtatgttttaataacattagcaatgtaatgtggtgtacatggacgagtaataagatatagtgaaagttatacacttgtggtgggctagcgtatacatgattcttactccttttcctactgggtatttcaattaaaggcatatacctatctgtaccagaatagagataccatatgacacaattccagggacatttcaaaaaataataatgttactttcgcaataaacaagttttgttaatggtactatgaaatgtaagacttaaagatcaaatttggaattagcttttgtaaaattaatcagcagttggctagttgacaaatgaacagaaagaaaaactcaagtctcaacaaatttggagtgaaagcctttaataagctatatttaacatcgaaataatttatataataaaattaaattttgattttgatttacaatataatacatcttttctatctttttaatttctgctaccttttaaatcttccattcctttcctttaaccaaacatagctggagggatccagcaaagttggcattttagtacttggtagtacaaactaattgttgagagacagctatacaatatgatctagtattttaagacataatcacatggtttctagtaaggtgtcagatttttaaccacagtccacagactattcaatccatactcttctttattaaaggcaattattattatcgggatataattttgttatgttattgtac

SEQ ID NO: 164825 - DNA, 1828 bp, Cannabis sativa
  modified_base (1622)..(1622): a, c, t, g, unknown or other
catttatgaatataagataatgtaaaaaagtgatttggaaaataaatgacattagtgagaaaaaaaaataaagaaaatttgtgataatagattttgtaagaaattataaaaatggtgagtggaataatgagtatttataagagatataatagttgatttttttattattaattaaattatttgagtgtgtcattttaaaattgttaccgttgccccacatttaaaattgatttaactttcatttattatttttttaaataaaaaaaaaattggatgatgaccgttgctcctgcacaacaattagagtggtcattttgattttctccaatacaagattactcagtatagtagctaagctactgacaaaagtgatttgggctactccttataggtgagcgtgggagaaaatcactttttctgttatatatttttttttatctattatgactttgattagtttttgcatttttaaaggaaatgtaatattagaatctgattataattttatatttggaatcagtttcgtttaaattttatatttgattgttttatttaaatttttaattggttattttttctgttatatatttttttgtctgttatgactttgattatttttttcttgttgtttattatatttattattctttatatcctatttcattaatattatttataatcgattttttaatactgtttaatatgaagtcatatttgtttcagattttatataaggttgtccttactctttttctcttggtttcattttgttattttatatttaatttttttcgttatttcatatttgtatttgaaattgtagagtttcatttatttttcagatgatatatacattcttatagaatatgttcatatataattatcaacatatataattttgattattgagtgtatatacctattttgattatactgagaactgttgttgaagagttgttgttgtgtataattcggtttgattttttattttctggtatgtgattatatgatcattgattttcaagttcacacagccgaggaagaggatcagaaccaattgacaaactcaccggagctggagaagacaatcggcgatgatgattgttgcttctgctctgtcgtcgatcgttgatatatgttgagaagttgatgaatattctggtttgtgagattgatttgctgtgtgacatgcttgagtttgagatcgaattgcagagtttaatcgttggagatgatcgcgcaattctgagagagaaaatcagagagaaaataggtgagaggataggggaaatctggtttatttatttggaaatatatgagtttttttatgttaaacctatttatatactatttggtttttcatatttttgccattatttatttattttttctatatttttttgagttattttttctgccataatggcactaaaaattctcatatttatgaaaatttctcataatttaactagtatgattgtagtgtcttcaatacgagtgaacatttaatgactgtatggtttaattttgagcattgttattaggcatcaatggtgactagcaccttctcgacatgtcgctttgcgattgactgtcgataaaaactattatattaaattatntgggacccgatacttaattagaccaataacgatattgacactaaataacacataggagggtgctactgctactttttagcatttctctttcattttatagaaggttaattagtaatttttttcccccgaactttgacatgtatcaaatcatgccccctgaacttttttggccgttaaaaatctccctcgaactattgagattgtta

SEQ ID NO: 164826 - DNA, 1645 bp, Cannabis sativa
  modified_base (170)..(178): a, c, t, g, unknown or other
agatttctcggacaagggctgtctaaagcccgtgtcacaccgagctacctcagccaagaaggctgccaatagccttattcctcgcccaaaacccatccttgtgccaatttttgttttgtgatattttgagtttcaaaaatcattttcaatgaaacaaaattcaaattttnnnnnnnnnttgtgtagaatctaaatttttaaataaaaatataattatcaggataaaattaatttttattaaattttttcgattcatttaaattagttttagatattattagcctttgaatttaaaaatttgattttttcacaaacttgcatttatggttagttttgaaatttgattatttttgtttgttttattaattttaattataagatcagatatttacttattttattaataaaatttgaaatgatcttattttgatattaagatatcaataaaacgagggaagtaccaataggacctaaaagtgttcaggtggtacaagagtttctggatgtctttctagagaagctacctaggttaccaccaaagtgagagattgactttgagatcgaattgatacttgtgataaagtctatatctaagagcctgtattggatgacacctacagaattaatagaactaaaggttcagttacaaggtatgttagatttgcgattcactagactgagtacctcgccttagggtgcaccggttttgttcataaagaagaaggatagaacactatggatgtctattggctaccgggagttgaataaattaacagtgaagaataagtatcctttgccaatgatagacgatctgtttgatcaactacagggaaagaccgttctctctaagatcgatcttcgatctggttatcaccagttgaggatttgagaggagaatgttcccaagacagtttttcatacctggtatgggcattatgaattcctagtgatgtcctttggattaagtaatgccccagcaacattcatggacctgatgaacctagttgtcaaagaatttctagatcactttgtgattgtctttattgatgacattttggtcttttttgatttaaaagaggcacatgaaaaacatctgcagatggtgttacaacatctttgggagcatgaaatctatgctaaatttgagaaatgtaagttttggctgccccaagtaagcttcttaggccatgttgtaaataaggatagcattctggtggacccagtgaagattgaggcagttcgagattagcctcgacccaagtctgctatcgaagtcaaaagtttcttcggattagcaggatactacagaagatttgtggaagggtttgccaagatttctacacccttaatggaattaacctgaaagaactgtaagtttgtttagactaacaagtgtgaaagtagcttccacgagttaaaatagagattgatgaccacatcagtactgaccttgccgatcagcgatgagaaatttgtagtttattgtgatgccttcaaacaagggttaaattgcattttaatgcaatttgataaggttattacctatacatctaggcaactgaaggaatatgagcagcagtatccgacacacgatattgaattggcagcggtggttttcaccttgaagtttgtgttgggttttatg

SEQ ID NO: 164827 - DNA, 3692 bp, Cannabis sativa
ggagctgccgcggcgaggcccttacttttttgtggttcttcatttttcttgtttttgccataactttttactcggaactccgttttggacgttcttggtatcgttggaaagctcattttagactctatgtgttaatctataaatgcaattcagattatgtatatgtgtaaaaatgaatttgggattaaccctatttaggaaatctcgggaatgtatgactggattactggtgcttgttcaggaacacccaaatatttggaatctccacatacttagattaccaagtaagacaataacctagaacatagagtttagtgcggtgacgctcatgtatgttattatgtgtatgttatgtgagaaactgagattaggattattaccctaagtttagcggttatgtggtttagagttattattcttgaatttaagtgaatatgaatgcaatattataatgtatatgttgatataaagaattatgtggttaaggcataattagattagactcggtaatcagaaccgagataaactattctaaaaccttattgtaaacagatgtgtgagtgtaacacataggtttatgtcaaattaacaataggtgcagtggcatcaatatttatgtgacttataattaatattcatatggttatctatactgccttactgggccttggctcacggatgctctattgtgcaggaaagggtaaatctgttattgatcagccatgaggtcgatggcttttgtgctgtattgtacatgtttaggtcaagctagaccatgagggttgggtctactcaaggaaaaaggtcataatctccacctttgctgcttaggttggcgtgtataaataacttgtaatattttgagaaaaaaaatttatgggatcaaaatataaaatgtaaacttttgaatgtttgtaaagtgtattaattacaagttattattttattctacattttaaaagttcaacttccgctcttagctctagtagattccggtttagtaggattagtttatgtttagtcccagtgcgcgtgatgttcctattgttagggcgttaccatttggtattagagcgccaaggtttttaaacttcctgtagaccgattgaacatgtacatttatcatcaaagacaagctcgacttgtggtacaataagtattgagagtaaatgcttaactgcttttcatattaaatgcttaccactttccattataggcggcatatgagcatgtagaaaataaaatattatatgaaaagcatgattattaattaaattgataaacgattaatttaaaagaaaaaatagtatgtgtgagttagggttaaggcaataagtgtttaagagtggttttggtgcctaactcaccgagattgttgatttcagggctatttgcgagaaaatagaccctaattaatcaactagaccatagggcgagcttgtagagctaatgaccaaaccaattcaccggcacctcctgtgtctctgtgaaatttggggattaatacgggggttgacaatgctaatccacctaccgactagcagcatatattccttgaaatgtacttcgtcaagaagatgagttgcgtcggtttaggcaaccggcccaggtagctccagttgaacaagtgttaccaccagctcctattttagtggtgggtaaccatggatttgtactgcctcacaaagactcaatttttgagcattttatcaagctgcaacctccaacatttttgggaggtactaacattattaaagcagaatagtggatgagcattgttacccacattgtggataacatgggagtaacaagaacgaaacgagtcaattatgctgcattcatgttttaagagcatgtccgcgtctggcgggatattgtgggacagacttaagatgttagtatcatgtcttgggatgaattcaagagttagtttgagaaaaaaaattaaaatattgccatcaaaacttctcacatggaagattttgtgaaattgactcaacggaagaggacagtggccgagtatacgctggaatttgaccatttatccaagttcgctggtgatctagtacgaacggacttcactctgaaaaacaaaaatatgtaaggggactgagtgccactatcagtcaggacttgaaaattaccaccgattatgatacattacacaagaaagtggtcgagttagtattgattgctaaagaggctgaataacatgtaatcaaagaacagcctgctaaggatgtcatcacggtatcgaaccctagtgttggtggtagtgtaagtaaggggaccaatagtggcaacccagaccacaagcgaaaggctgaagctttcagaacaccgaggaataataggaagttttgtgggaactaaggtgaccatcagggtgagtgtcgagccagaacgtgtttccagtgcggtatggtgggccattttattagagactgtcaacaatccaagaaggaagaaccaaagaagaacaacaatcaaaatctaaggagtttgttcactatgacccaggctgacgctaatgctggtccatcagtggtaacaggtcagttgactataaacggttgttcttatttagtattatttgatttgggtgctactcattcttatgtatcaagtagagtaatagagagttttcataaactgtttaatatgtatgcttcgaggtttgggaccatggtaccttctggagacctaatcgtatctactcagtggagttaggtccttgtcttttttggattgacagttgtgaattaattgccaacctaattgagttacaattatctgattttgatataatcctaggaatgaatttcttgtctaaatacggggcaacgatttattgcaaggggaagatggtagtgtttaaacctgatagtgccaatccagcagtgtttgtgggtaaggtacaagaatcacgcatatccagaattacaatcctgaaaggtagagatttgatgcgcagaggttgcatagaattcctagttataacagtggatactagccagcctatttcatctggacttgaaaatatgagattggtgtgtgagttcctagatgtatttccagaggatttacctggattatcaccttcctaagagattgaatttgttatagaattagttctaggagtgtaactagtatcaaaggcaccttatcgaatggtttcagtggaattagggaattaaaggttcaacttcaggaattacttagcttgggatttatcagatcgagtttttcttctttgggtgccccagtgttatttgtaaaaaagaaagatgggtcccttcgcatgtgtatcgattaccaagaactaaaaggctcactatcaagaacaaatatcttctacccagaattgacaacctatttaaccagttgaagggtaagatggtcttttcaaagatcgaccttcgttctagttaccattagttcaaaattcgagaagagaatatcccgaagactgcattctatactaggtatggacattacaagtttctggtgatgttttttggactcaccagtgccccaactgcattcatgaatcttatgaactgagtattcaaggattttttggacaagcatgtgatagtgttcattgacgacattctagtttatttagaattagaagaagaacatgagttacatctcaaattagttgtaatacccggaattaagaaatggat

SEQ ID NO: 164828 - DNA, 1441 bp, Cannabis sativa
tctaaaagccactttaagttgtatacctgccaccatcactccagacatgaatattaatcttatcaagcctttcactccttcagaagttaatgatgctttgttttcaatgggatctgacaaaagccccgggattgacggtatgtcagctatgttttaccaaagacattgggatattgtgggtgattctgtttgttctgctgtactaaacgttctcaatcatggagtcgatccttcacccctaaactcaacaataatcacactcatcccaaagaagaaaaaaccaatattcgtgaaagattatcgtcccattgcactttgtaatgtcatctccaagctaatcaaaaaatttcttgtggcttagttcaaacctgtcctaccccttgtcatctccgagaaccaaagtgcttttttgcctaatcgtctcatcacggataatatcttagtggcatttgagctaatccacggtatcaaaatcaggatgactggtcgcaaaggtattgctgctatgaaattggatatgtctaaaggtttcgatcgcgttgaatgggtttttgttaagggagttatggaaagaatggggttctgctctcaatgggttactcttattatgacctgcctaacaacgaaccatttcacattccttctaaatggggaaacaactagttcactcactcctactcgaggtctgagacaaggctgcccgttatctccatacctttttttgctatgttttgaaggcttctctcggcttctgcaacatgaggaaatgttaggtaatctccatggatataagctcacacgacgggctgggccaatatcacacttactctttgctgatgacagcttgcttttctgctatgccaatgagagttcatgcctatctattaagcgtgttttggacatttatcaccgtgcttctggccaagctctcaacgctgacaaattgatcatgtcattctctccaaacacaactacagctgtccaagttttcttccacaaaacgctctcgatgccaatcatggagtgtcatgaaaaataccttgggttactagcatactcggggcgtgacaagcaacaaatgttcaccgatgtaaaggagaaagtttggaggttgatgaacacttggaatgagaagatttttttggctgagggcaaagaaatactcctcaaagcgattgtacaatcgatcccaatgtatgctatgagctgcttccgcttacttctcacggtttgtcaaaattttgaatcgatgatgtcaaacttttggtgcggtagaactgaaaatggttctcgcattcactggcaaaactggaagttgatttgcaaaaccaaagctgagggtggaatgggtttccaatcttttgagcaattcaatcaagctctccttgctaaacaagcttggagacttattgataacccctctgttggaatttattttacc

SEQ ID NO: 164829 - DNA, 1813 bp, Cannabis sativa
ttttgttaagtgtcactggagataactgaagtgtatactaacgtacatgtaacagaatttgtgtgatccacgtaagattaaaattgtattaaatataaaaaattaaattttaaaaataaaaaataaaaaatacattatttattaattatttttcctttttcctttttcaaaccctcgaagccccagtcgacgaccctctcttctctcaaacctatgttgtcggtgtttctcttatcgaactcgaagcccatataggtggcgtttgctcctgtgatttgagccacccctcctcacgaatctcatcccaacggaacctaaatctatcagttctgagggttaggaagcgtgttcaggaatggaagcttaggctcttttctgttagtggaagagaggtacttattaaatctattgtccaaactattccaacttacattataagtatagtgtctttaagcttcttgtggtaacttgtgaaaaatttaatttcatcttaggcaattgtggtggggttcgaatggtgataaaaggaaaaaaaatttgggtaaagtaggagatagtatggcagcctaaggcgataggtggtcttagatttcaggatttccaacttttaaatcaagttttagtggctaaacaagtgtggaggcaactactgaacctagatttgctaccttcaagaattttgaaacataaattattttacaagatgctctattataaagctactaaaaatgatggtttgtctcacctttggtcaagtttgatttggaggttggaactgcttaagagtggtcgtcggccattggagatggaatgtaagtatcggcgttcaaagatctatgatcttttaagcctataatgagtaggttttatgatgaatgtcgggtgagtaaacttattcttccatctggtacgttggatgttgggaagctttaacaagtttttatgcccatggatgttaagataattctatctattccattagcaagacgggtagtgggagatagttagtgttggcttatgagtccatatttatcttataaatatgaccaattaatgtattaatattcttaaattgattctttaaattattgattagtgtgattttaatttattaggctattttaaagactattcatgcatttagagtcttttggatggattttagtatattttggtgaaaatagtagaagtcggcgagctcggttttacaaggtagaacttaattacaaatttggacgatcttaaaagcagaattggacttagagctcaacatgaaagttttagatctcgttcttagaatcttatcgtctaattccaagcaatatcaggagagttatggtgaaaatactatcagttattgcagtaaaaaattaaaaaaaaagataaaaagatagcttttcaagtcgagttgcaaatttttttaaaatctttttagtatcttttaggtaactttgttagcctatataaacatattagagcactcccaacagcttctttactttattcttcaaaatatatcattataactctactttctttattttacatcaaacttttacattataccatacaataacttctctattttttctctatatcatttaaataataatttttataatatatataatacacataacaaaataagaataaaatgctatttatatattattgaaatatttttgaaggatgaatagtgtttctctacatggagagaagcactattgcattctttatattgttctttaaaatacatcacttgtaggaccatcatttttacacttttttaccttttatcttcttcatttttaag

SEQ ID NO: 164830 - DNA, 1854 bp, Cannabis sativa
cgtttacattttaaatgacattaagtggatcacgcttaaaaattctataataataaatatgtatttatcaatcataaataaattaaaatgataataaaactcaaatgtaatatcgagttttataattcttaattaaaattattagaaaatgtaaaactaaaactacatatattaatttattggagagtaatttaaaaatttaagtatttttaagtaaatattcaaactctaataaattatatgattgttggtaaaatgttgctaaaaatatataaaaataattaaatctataaaaaaatcatacatagtttagtaccttattagtgctaaaaataattgtgaaaaagtatagcacgaatttgagcccgtatgagatacgagttcgcccatttaagataaatgggtcagctcaaagcacagtatgaaaaaatcgggagtataggtcgtgtcgggcataccatttaaaaattttgacaagacacgacacaacccatattttgaaaagcgcgaaaaaatatagtttatgcacttttgattgcgatgtcaaaatttgacattctttataccgttagaaagtgtgtgaggagctttatatctctgtccagtttgtgagctctaattatttgtgaatttattatctgattgagattaatcctattatgtccatgccccgaattgtgactagaattagtgccacttgaacgaggttacctatcagtaaggatttctccacatacattggaattcaagtaagaaagtgaacttttcacttagagtttactgttgtgtcgcctttatatgctaatcatatttgtttatgagaatatgttaaatgagttgtgtggataaatgataagggttatgcgttcaatgtataattaggttagactcgatgatcaaaatcgaggtaagcccaagaatatgttaaatgagttgtatggataaatgacaagggttatgcattcaaggcataactaggtgagactcagtaattaaaactgagatacaccctaatgggaccttataaattaaatagacgtgtgagtgtaacacgtgatgtctgtccaaaatagacttaaaatattatggcatcatcataggcacatggtccccaaattttttatcgacattacttggtaaacaatggagttcatagacatcaatgcatgttcttggggtattttgctcaccacaaatgttatatttgtgaaattgcagaggggataatatacattctgttaggaccgtcaaacactatttattttcccattggtatgatattgtttgctttgggtctaagccctcacagatttattttagggtaccttcccaaaaacaaatccctgagtgcttaggcctaaatcgaacaatatcataccaatagagaaatagatggtgtttgacaatgctaacaagtggtattagagccgaattccaaaaattagtcatgtgaatgaatcctcgaaatgacaaacaaaggaggtgaagcttactgctagagccatcagaggttcagatttgattcgaagggagtttgaatctagttggtgaagggattcatctagcttactcaagagaatcttgagtgttgaaatcgaaggatttgattcgcaattttctaagagagttggaaatatgttcttaagtggttgctcaaggtttagatttgtaatcggctgaggggaggcaaggtagtcctttgtttgagggacgattgttgggtataactaaagttccacattggctaaaaatgggaaggatcttgggtatataaggatggacactctctccattgaaataagaccttttgggaaagtacccaaaaacaaatctgtgagggcttaggcccaaagc

SEQ ID NO: 164831 - DNA, 2212 bp, Cannabis sativa
ctgtcatattgggcctgactatcacttcgctccccttcgaatcgaccttgtccgcaaggttggtaactttgtacagttgacaaaaatcttcatagttctcccatgttgcatcttctggttggctcaacgaccattgcactaatagttgtttgatgggctggttgttgatgttctttatgcgtgctgccaaaattgctatcggcaccataattggttggtttgcgactgtaatctctggtaaaggataactcttgattggttgtggtccatggaatggcttgaggagtgacacgtgaaatgttgggtgaatgcaactcccttccggaagctccaacgtgtaggcgactggaccatggctagctaatatttcgaagggaccaaaatatctgcgagacagcttggcgttaagtcttttagctacagtcgactgcctataaggttggagtttgaccaacactagttctcctatttgaaactccttgtccttttggttcttattagcttgctgacgcattctgttttgtgcttgttctagatttgtcttcagtttttgcaataaggagtctcttgtaagtaaatactgctcaactgctttgatggtagtggatccacgtgcataagctggaatggttggagggacacgaccatatacagcttggaacggggtcattccaatcgccgaatgttggctggtgttgtaatggaactcaacccaaataaggaacttatgccactgtttcgggttatctgctgtaaatgcccgaagatattgttctaagtagcgattagttacctctgtttggccgtccgtttgtgggtgatacgcagaactcatcttcaatttggtgcccatgaatttgaaaagttttctccaaaaagcacttgtaaaaatgggatctctgtcagatataatcgtacgcggcaacccatgcagtttaatcaccatattcgaaaataattcagcaacctttgaagatgagtagttagtgggtaaagctccaaaatgagcgtacttggtgaaacgatcaataacaaccaatatgttagtcattccttgagaactaggtagtcccacaatgaaatccatggctaagtctttccaaacacgctctggcagctccaatggctataacaatccataaggtgttgtaggtgaatatttaaccgtttggcagacaacacaagcttgcacatactgtttaatttcagatctcatgttttccaaaaaaaaattgcacttatccgtagaaaggtgcgttcgaaacccgcatgtccccctgttggtgagtcgtgaaactcgcccatcaatagttgcttcaggtttgaatacttgctcaccattaatctgttgcgaaaatacagtagaccatctcttactgagtagttttctagagctttcttactatctaatagctgtttatggagttgcctcaaatctgggctggtcagattctctcttctgagttcttctaaaaattcgaaacaccctgatgatatggctgcctgcagaatagatagtgacttctcgtgttgtctggataatgcgtctgctgctgagctatcacggccagctttgtactctatagtaaattgaaatcccaggagtttgtggaggaagtgttgctgttctggggtctgaattgcttgtgtaagtaattcttttaaactcttatggcccgttctgatgatgaagtgccttctgggtaagtaatgtctccatttcgaaattacttctgtgatcgcccttaactcccatatgtaagctgaggtgccagcaaattttggaccaaatttcttgctaaagaaagccacgggatgcccatcttgcattagtactcccccgatgcccacattggacgcatccatttccacgacaaatgtcttggaaaaatttggcagctgcaacactggtgtttcagtcatggccttcttgagtctttcaaaggcagatgccgctgttgatgaccaaccgaaattgtcttttttgagtaactctgtcaagggagctgctatcgctgcatattgagccacaaaatgccgataataccccgtgagtcctaagaaaccccttaattgttttatattcttcggaatgggcctgattagtggtcaaagtatcattttattgatgttaaagtttgaattaaattaagttttgattaatattttcatgaaattaatatgatatattatataattgaaaatattattt

SEQ ID NO: 164832 - DNA, 1171 bp, Cannabis sativa
aatagattacaaaagttaaaataaaaaaacaatgtaatggatttatctaagttatatttattttcttttctatttctttctttttcaattttgttaaactttttagtttttattttaatttttagctattataatgtgtttttgctgaatttattctatctctatctttgtaagtaagtgctctaaagagatctaaataacatattctaaaaaaaaaaattatgtctaatatattaattttttttcctctgaacttatttcaagcagattattattattattttacgagaaaaatatgtaattttttttttacaaataaaagtaagtatttaattagctataaacttctatcattttatatttattgttaaaaaaaaataattatctctaatatttagatttttttttctttcaacttagttttaccatactatattagagttagtctcacattaataatgtgtggaaataaattatcatatataagatgaataggctatttctctcattgtcaattggttttgagatgaaactccataaatttgatcccaaattctaacatggtatcagagtcgtttgtgatccgttgtgaacccaatgtgttgccgatacaaaaagacgagccaaactaaaaaaaaactcccgctctttcccctttaatctccattgcgggcctttcagccaatgtttgtcaatgtgtgctagtttctagtattgggacctttgacctgtttcaaatccacaaatttcccgacaagtacacccacaaatttctcgatatttggcattgttaaattctttcaaatgtcacgttcgaccctatgatctcttaaaggtaattcattatacccacacttttcaggactaaacgtaaggagagtgtattagagttagtcccacattgctaatgtatgaaaataaattgtcttataaaagataaataagctactcctctcattatcaattgatattgctgttagactatttttagcctacgttttgtatcactttttatagttgttttccttctttgttattctttttggaatagaattatacttgttttctttggttgcaggtttcacacttggaatgtataaattgatcaaatttcggaaaacaacaatctatataatagagaaaattctgcaagaaaataaagctgaaaatt

SEQ ID NO: 164833 - DNA, 2319 bp, Cannabis sativa
caatcgccattgatttcagtgtccagaggaagaagaaaactggaaaatgtatttattatttaaacttttgttttattttattttttaaaattgaaaacaattttaataactttgttaatatcactcatttttaaatgggtaaataatataagtattttgaagtttgtaagaaatatagatttaaatatttatttttaacgaaataagtatttaatatttgttagtcttttcatattattttttattctttttaatattttattatggggtgaattgaattgtttatattagagaatattctcatgtaaataaaatggtactcgagcgccacgaataagagcaaataataatatttatgataaggtgatttaagataagtgaaaatagctaccatcttgaagggatattagagaacattgtctcacatagattaaatgtaaaatattgagtcatatataaaaaacacgagctactccacttatcactaattggttttgagatggaactctatgattctcaacagtttaccagctgttcaattaatcacaaaaaaaaaaaaaaaatagttgtcgtgatattgataggttgctagatcaaattaaaaatttactgttacataaaaatgtatgctttgattcacaaagtaagtgctgtttggattgggattgtactcctttgtgctcgtcaagcctttatgctcgtcaagcctttatgctagacgtgttgaatcctgcataatgttgttgttttatgaaaaatttctattttaaaaaaaacacttatcatggaggactaaaaaaaatcttcattaacttagatcaaaccgtttaacatacataaagttttagataatacatccttaagaaaaaactaataaaaataaatttttctctacaaaatgcatattacatactagggatatattaacaacattttttacttatttggatatataagagtgataccgtcatcctcttattataatcttttaattaatttttatgtccaaaaatacatgtcaaagtatttttttcatggtggtatttattaattacaacatcatccttataaaattttaaatagtttacagtactaatagtaagtttaaaactttttaaacaagcatcgtataatagaatattaggatgaaagaaaaaattgaaaaaaaatattccaacatttaattttaaatatggaggttgactacaaaattataaggtgtaagatattttattttatttttttacttttatgtttttctttatatattatttccttttataaaagttatttttattttgacattcttctatttttattttaaagttatgttgtttcaattttataaaaattatttttttctcgatgttgtgcaatttttattttgaaattatgttatttttatttttataaataaataaaaaattaattataaaaatataaataaataaaaagtaaattataaatgtataaatgaaaattgtaattatatatgccgcaatttactcgtttctttatttcatatgatatacagttattcaacaaaattactgacgtggcagaatatgattggataagtgacaacgctcgacgtggcaatccaaacatatataaatgtaaatgatattccaattttacccctcaccacagtccaattcatcatcttcttcaacctctcattttcccattttaatttctaaataaataaataaaaataaaaataaaaaatgcgaagctttgtcttctctctcctcattttctctctcttcccaatctctctctacgctcgatccgttctcctcgttcttcaagacgatctcaaggactcaccgcccgatgaaaaccctacagattccactcacaatgactcgcccgagtgggacgagttcggggattccgatccccacaagtccgacgaagaactcgatcctggttcgtggagaccgatctttgagcctgacttgtcctccgccgagccaggttctgagtccgacgcgatgtactactcaggtgtgttgaagatggtcagagctgtgagttccggcgaggaattggtcatggaagaaggtgccgcggagatcgaggcggctgctgcgtctggtcattctcattctcaatctgttctagggtttctttacggtacaggacagatgaaggagaagaataaagggaaggctttcatgtatcatcatttcgctgctgaggggggtaatatgcagtctaagatgtctcttgcgtatacttacttcaaacaagatgtatgaacacttaattcaactatgaatttgattttatatatttgaaatttgcagtaaatgt

SEQ ID NO: 164834 - DNA, 1978 bp, Cannabis sativa
  modified_base (996)..(1008): a, c, t, g, unknown or other
  modified_base (1143)..(1151): a, c, t, g, unknown or other
tgttagtaaaaagattgaaataaggttcattgaatttgaaaatgtacgtaaattaaagaggtttggtgtgatatctattgggtcaacttgctaagtttttgtagcaatgatagaggtatgggggggacctgtaatgtttatgagattgtttgtgttgttcaatcatgagattcttgtttatgaaattaaaaggagcaatgctatccctacatgttttccaggactaatgttaattatttccttctctttttatttatttggttaaaagaggaaatttgttttccaattttcattcaaaaaaaaaaattattgagttaggggatatggactagtggggttctatgttatacacttttgtctatactaatttcattcactaattaactctgtagagaaagagactaataactaaggaaaggggttatgtagatttatttttatgtacaaaagttaaacataaggaaaaagatgtaggctttcatttgactgtatagagtagaagagttttaaaattataagctggaacgactgtttgcaattattattattgaaataatcaaagaaaacacaaaacaaaatgtaagagatgagactaaagagattacccacaaaaggacgtgtgagaagacaaagaaaagaccagcacaacttggatttacttccaaagcccaataatttcaaccaactctgactatgtgaagaatagacccactcattctacaggcccaaacaaaagtatctacaggtgcctttggaaattaattgaaattggatgtagtattggagtaattattagattttacaagggaaatttgggtaatcatccttaaatttaacatatggacccaatttaatcaactcattaaacatatggtataaatacacaatacactattctttttgtaaaatttttatatttttacggtattttataaaaacaacatcaaaataataaaaaaataacagaaaaataatatcaaaacaacaacaaaaaannnnnnnnnnnnnataaaaaatcaacaacaaattaataaaagtacaaaataaaaatacatcaaaagaccattttttatgaataaaatcataaaaattgtaaaaatatttaaaatttcgtacaaacatatttttgtaatttttttattnnnnnnnnntatttgtgaaataatccctaatataaatatgttattattctatctaaactcaaaaataccctctcattattttagcttccctcattctctctcatcttcctttcatctctcttttctctctcctataaaagatcacataaactcgccaccacgcaccactcatgaccaccactcaccactacgcacttctcattctcctgctctttgtttgggcgcactactacaaaaaatactatttctgttgatcctcaaattagtttttttcgagaagcgtcgctaatcaaaataagtgagtgttcctgacggttttaaactgtcatttagtatttccgaccatttaaaatactatagccgatattttaaaatcgttatctattttccctattcatgtgctttataaaatccaaaaaatctctctgggaagctcttagaacacgaacgaaaatttcagtctgaagttgtctctcccctaaaccctagcatattactatcgttaataggcctaaaatttgttagtgatcccccacatgttagggtgtctcgctttcaaatcctgcatctcattctaaacaataaaataaaaaatagaaataaatcaatatctacgaaaatttctcattcataatcaaatatttcacaaacattgagattgttgtttaagttggttaatccctttgtcttaaacttgcttatgtgccattgagctttgaaaatgccaaattagagaggagtaacaaaggatgtcacctctcggctagaaattttctcaatggaagagaagtgttttgggatgacacttctcggtcatgatgccacatgggctgtgg

SEQ ID NO: 164835 - DNA, 2161 bp, Cannabis sativa
  modified_base (2126)..(2128): a, c, t, g, unknown or other
tttttttagtttttaaaattttaagcttgttagtcgtgtggttggttttgagtagtttcttagtagttgggtgttgatcaatttttctattttgtttgaaactcatttttcttctaatttttttcctcctaaccgttttttccttttctcctataaattttcattttatttatctttaccatggtcgtcactcgatctaattcttcatcccctgttgttaaaaaactcaaaaacactcgtaaatctaagttaccccaatcttcaatgtgaaaaaaaaaatgaaagatcatcctccaagtcctacttcccctgctacttccaaacgtaagttagatcttcattctccttctaagagggtttctaaacgtcatcgatctatggaggaagggtttgattcttattttgaacttgacgatgagtccattcaattagttaaagttgacaaggtcaatcatttgtttttgtattttttagggtttttgtgttttatttttaaacttttatattattgtgtttcgattttttcaattataatttatagtgttttatatttaatttttatttgtacgttttgttattttgagtggatttataccttctataacagttgtattcttttcccttttttttccttattttctgtagaggaagggaaaatcccctattctaaatgttcctactgaatttgggttgtaagagccttctaatgatattgttgttgaggtttgtggactttttttaattattctttttttttcctggttatttttgagtttttttaaaatttatttgcatgtttattttcccaggactggacatgtaaatataggtgctcacaacattatcattctcaattaataacttctagttattattcagtcattaacgatattaaaactattctaaccccaacctagttgaaaatcttttctcaaactattttgggtcacttccttcgaattccagaatatattattcattttcaagtcttgcatggtctgttgttgagggaagttcaacaacctaatgagatggaattctgggtatctgttgctgggaagtttcttagatttagtgtagaggaatttgccttactcacaggtctagattaccacattgagtcggatatatttcagtttaaacaggataagaatatgctagttgaacattgtttaaagggtaataaaaaaattaccaggaattcgaattaagttacctttactgctaacaaccttagggataatgttgatcttgcagtcaagttagttgttttgtattttgttcagtattacttgctcggaggtcctcttggaaaggttatttctattaaggaacttgatattatggatagtggccattataatgagtgggtggcgaacggagtgttttgagatgactattgaatctcttaagggtaagattgatgtcaatattatgactgttaagaagaaggataaggatggcagattttataggttgttagttttctcttatgcattgcaagtttaattttttgagtgttatccatacgtcagtggaaaactttctttgtattcaaacaatggcattcctaggcttcttaactggcctaaaatgccaaagcttaaagtatttaagctaaaaatggataatatgaatagcatcatcttcaatcaacctttaaaggaggtatttgtgtgttgttttactttttttatttttttttgttattttagtgttgttttttaatttgttttatgaattgtatttttattcacttttattcttttttttacagtttcaactggaaaacatttctcaaacttctattgagagattcagtttgaatctggctgattatttttctggtggcacaactccttcctttactaaagttaaaggtaaaggtaatcgtgaattcagttctaaatctgtgcccaatgcttctatagaaggtgatcaagttggtccagcatcgtctaaggctcatgagcatgtaactcgtattgagtatgaggatttttttttttaaaacaaaaaaaagatgtgtctcttgttcttagccaacaacgagttattgtgtttgattttgttgatttgaacaaaaagatggatactcttattgaggtatttgttgggttttatgnnntaaataaaactctttacaatctaattagttatc

SEQ ID NO: 164836 - DNA, 868 bp, Cannabis sativa
tattacattattcaatgtacctttgtaacaacagcatatacctatataatttaaaatatgggtattactattaggcattaatcatcattataaaaaatagttatctttagtaataatattttagtcacaatgtttgtcactaatacaattagctacgaaccttttaatcacaacataagaatgataattttataattattcataattttttactttcagtcacaaatattattgcgactaaaaataaaattatttgtatgaattatgagatcacaccttatgatcatgcataactatttttatatatttttttttaaattaaaataaatgggacgacttgatgcttaatatttaattttttttttacttttagtcagaagatttcatgtgactaattttaaatcatcatttttatgttgtgattaaaaagatccgtaactaattatatatatattagtcacaaaaattataacttattgtgactaaatgtatttttaattacaatatttgttacaattaaaactaaattagtaacaaattgtgtttaaacagtatatttagttacaagtgagccacatttaatcaaaaaaaaaaatgttataactaaaaagttgtcattaaaataatttttttttatagtgtaattataccaataacaatatatgatacattatatgatagttttagacagtgcttttagctgttgtctttaaatatgtattatagtgatcacatttcaactcactcaaattattagttttctccattcaatctctcagccatggcttccacatactactctcaagttggtcttcttcataatttgttactttctattcttttcataaatttgtttaaccaaattaaa

SEQ ID NO: 164837 - DNA, 741 bp, Cannabis sativa
  modified_base (676)..(678): a, c, t, g, unknown or other
tccacttaaaacatgcatttagcatataattaggaaaaacatcattgcaattagctatcatcaaagagttttaagcatccaccacagtttataatggggtttgactcattgtggaaacacatgacaacttgagcatgccaaattgcaaatacaaagagaactttaagttttgcaagtaattaagtggcgtttggtaatacttttgggtgtgtttgataacatttttttaattagctttttatttttaaaattagaaaagtaaaaataatttttaaaatcatgttcaataaatttatttttacggttcaattttttaattaagaacctaaattttaaaaacaaaaaaaattacttataatatttttaaacagttttttttttttaatctatatttttgtctccgatctcaacttagaccttagaaatcgaactaggacatgaccttggacttagacctacccctagtctcgacctcagactcggccctaggcccgacttaaataaaatcaacaaaaagaaataaaaaggaaatttacagaacatacttttgtttttcaaaaataaaattttaaaaaataaaaaattcacttttatttttgtgattaaaaattttagaaataaaagtggtaccaaacaccacctttgtttttttaatttttttaatcacaaaaataannntaaaatttttgtttttaaaaataaaaatgtattctataaccacttttgttttttaattttaaa

SEQ ID NO: 164838 - DNA, 1755 bp, Cannabis sativa
  modified_base (92)..(94): a, c, t, g, unknown or other
ttatttattttcttaaattaaaagagtgataaatacttttaaaaaatgtgtattaaaattgttttagtttctatttttaaaatatgaattannntttaaaaactgtcaatattaaaatttgaatgacaattgttgattgaaatttttaataactaattaaataaatgaagatttagagcaagaaaagaaaagagaatatgaagactatggattttacatggataggcgttaatgagccttagttcacgagtcagagatagagaagatgaatgttctctctcttaaatttagtagcattttggcttaataccaataaaagagaaaaacaaagaatccttttatatgtgacctcattgtcatatttataggcattcatcgagtttattttttttatttgtctaaatgcttcattgacaaaaggaaatatattgatggacataaataaaatagtagttgctggtacatgcttgtcttgttttatcttttcacttagaaagacttcctaacatatcacatcagcattattgggagttttatgaactagtgggtgcaccatcatttttctttgttgacaaaaatagagacaacaataatcatgacgctctattttttaaataaaatataataatacttgagccaaaatttggtcaaacttttatttaatatatttgagccaattttagtacaaataagtgcaaaaaaaaagagaaaaaattagccgccaccttagggtatttttatatagttgaggatattataatcttccattttaaaaatatataattctaattgtcatttaagaagatcgaattgataatttttataaaacacatagtttttaaattttgaaaataaaataaattactttaaaaattcatttaaataaaatttttaattacagtctattttgtatactttcttttatcaaaattcacttcatttatcttatcagtttctctctcattttctcacactattttcacttaaataaaaaaatgtaaaaataaacacatttttatttgagaaatttacacaatacacttaagatcggatttatatatatttacattttatgatttttttgttacaggtttttccttgttttttttagaatgaaacattgttttcatgttgttttcttgttgaaacaatgtgaaaataatactccgtatttaaaaaaaaaaagaaaactaaaatccgtaaaaatgtaaaaataattgtagatccaataaaatataaatttttattatttttgagtgtttataaaataattattttttcaatttccaaaaaattaataacatgcttttttagatttcaatgtttaaatttaaaaacaaaatatgaaaaaagaacatattatataaacaaagagaaaaaagaacttcaaaagaaaaacaaaagaaaaagtttattaatataataaaataaataaaatagtttcctacattaaagtgcattgtattagaataaaacttaaaatccctacttgataattgtctaaaacacttccttatactatgggaaaaagacaacccgccccatattagataattcctaaatatatatttataaaagataattttttttttttgaaagcagaatctcactttgggtaaacttcaagtgcggttccccactgtatttagtaaaggcaattagcactaatttctgttatttttatgattatttatgaaattaattatttgtggaccccaatatttagaaatgaatattagagttataatttcttaa

SEQ ID NO: 164839 - DNA, 1916 bp, Cannabis sativa
ctctctctctctctctccctttgttcttctatttttccctaataattaattgtttctctgattattttcttataagaaagaaagaataattaatagtctattttatttttaggcacactcattcaatcttcgaccaatttcttttattttctttgttacagatcaatggaggcaagtatacgtgaagaggtaatatttattttttatcaaaatattttaacttaatatttcttattcgtataattataatcgtctttctcattttatttgcgaattcctacctctctccttctctctttcttttttgctacaaattcttctttcttctcctctcattctttgatcgttttgctgcaaatggcttgagttgaggtattattaatttacttcttctttttttatttctctccattttcttaatttctctctgatatccctatctatgttttcctgtcattatatcttgaatgaatgtttgtattgacttagacctgttcatgagagcaatgtatgaatgccgattataaacactttatcacgaaatgaatgcaacttctatcattagtataatgattttgtattactgaatatttttttactgacgatcaattgtgacagatgtcagcagtgatttggatttcatcttatgagtaatgtgtgatcatttgactctgattatatgagtataaatattgatatttgaataatgaattatataattgttattattactttttttgttgagtccttgtgactcacgagtgctatgtggtgtaggtaataggtatagacgtttggacaaccatgagtcatgaattttctccagcaaatgtacatattagcttattcggcacgtggtgttgagttgtcatgaactgcatttttaatgttctaactttgaaatatattatatcaaattataatggtatgtcttagaatattttaaataggggatcctcaatcgtaaaaaaggactatgccatgattttttaatttaaattagttggtaaagtttttattaatgtttatctaaactagtagcttattattataaactagtttataaacgcacacacgtgacgtccctaagaattagtgcattacaatcatcgttacagatttttaaaaaacattcaagagacaacggtaataatatactaatctctctactcattctctcccttcatttctcttctcatttttttttcctaataatcgtttctcttcattaggctttcatgtcattacatccagaaacaactttgtacatcgaattccctctcagtcgtccttgtcgtcgaagattttcataaaacaatcgagtcacaactagtaataatatactcattctctccctctttttcttcttctatttttttctgaataattaatcgtttctatgatcaatttcctgctacaaagaaagaacaattaataacttattttatttttaggcacattcattcattcttcgacccattttttttaattaaataaaattaattttaataataatagaaaaacattttcctcaagaaaaagaaaagaaaaacatttagttgaatttttttaataattttttaatggctatctaatcttaaaaaaaaaataaaaataaagaatattagttgatattttatattattaaataaatactcattattagttgttacttttatatttttgaataaagggtgtaattaaatttaaataatagaatataaacgtgttatatatgaaataaaaccggaattttttacacaaaatgactattttgaccaatttttaacatttatattatcctttctattttttaccatttttactttttaaaattttctttaatacttttttaaagttttataattacatatttaccttttgttcttcttcctcatatctaacctcattcagat

SEQ ID NO: 164840 - DNA, 1306 bp, Cannabis sativa
catagataataagacttgtaagaatagaaatcacatccactaatttatttcataaagcatggaaccatattaaaaataagaaaaataattcccactttcaaacttaagattacaaaactcaaattagtcagtctgagaatagagaatagagaatagagaaatttactttgtaactggtgaagctattattagcgaagaagaagcaacaaaggaaggctgacacttaagaagaagaccgtcacaatggtatggtcgacgacaagttaatctttaattttctaaagttagggtttgttgggcttggcccatgtctagagtggaaaacagaaattttgtggatctgcaaaatgagaaagaagggaactagggtatgaattagtaattaagtaatggaatagaattataattctaccaaatgaaaaatagaaaagcaattttgttagtttagaggaataagcattacaataaaaaaaatttctaaaattattatttccaaccaaacaaaagaatcaggtccattattattctattctattccttttttgcccattaccatcaaccaaacaacccttagagaaagtgcatttatcaatgagaatggttcagatatattgataaataatttttctaagaatatactcaagtttgtaggtgaggagcgagcttaattagtagaggtcaccaactgaggggaagatttgttgggccactaagatgaccttggaccaaataaagagaatcatcccacgttataataaataaaagaagaggaagaagaaagaaaaacataacgtcagttgtatttatttaaaatcaaagaacaaaaaggtattgttgtgcgaagagaagccgagagaaaacaaagagagaaagagagggaaagatgacaaaaagctagagagtgaaagtagttttggcattttatgttgaagattcaatgattgattttcaaattttgggtgatggatctttgtaaagtgttctagaaatatatgcattttgatttggtgattgtcctctttaagggctctcctatacagctctactattctcattttgtgatacccacttttttctatggtgtaattttatttttatagatgataattattgtattgttgaaccaaaatttttagtttaatattgtcaagtctctagttatacttgaagagaatttgtactcccattattaaacaattgtgatagtgaatgatttaagggctcgtttagaacttcgtattaggtcgtattgtatttattgtataatattgaattgaattatatatcatatttttatatatggctg

SEQ ID NO: 164841 - DNA, 1358 bp, Cannabis sativa
gaatacatcgtataaaaaggaaatggctatattactatctcgaaagtgttgcaccccgtacaaacaatgtacaatgcagttatatcaaacctggttataatgcaaaaactaggcctcagtatacaaccgtgatcaagatgttcagcatgtacatctgctagcctggctcttagtagctccaaattaacctgaaatagtaaagattgatagtaatcagtatatttgatcaaaaatcaatatgggaacctatatggagaaatagatgcataatgggagtgaacaaagaaagatataaaagattaaaagttcttccatggaaatttattcccttagccgaatatactcattacttttttgaaaaataaaaaaaattgtgtatcaaatttcaataaaataaaaaggaaaattgtagtacgaaaaccagtttaatttaaaagtttctgtaatcagggtgtgtgtgtgtgcgtgtttgctcaacaaaacatagttaggtcagattcaagaatgttataggaggtgtctatgataatagactacataatacattaccacatttaaaaataaataaaaaatggaagaacatgacagcaaccaaaattaacatgggaaattataatcacttataacatcaaaaagaattgcagtacctcctcgcctttcttcagctgtagatcacataaagtgcagtatataagatgactattctctcgcagttctccttgcttacatattgggcaccaaatagtttcgtgcacctagcataatgttacagaatccaaagaaaaaaaattacacaccaatcatttgataaaccctaaaaagcatttaaataaaatgatatcttctgttcattggacataagaggatataaacataattttatttaaaaagagccaaagatatacagggagcaaatagcactatagcagcacaaaaatagtaccactatcattaaggtggtaaaacaatacaataggtgtgtatagtacagaagaagagcaatagtctagcaaccttgatgaaaactagcatgaagccatggtgtgcatcattagtgtctctaatcccccaacctcaaacttaaaagcatttctaaattttcttataacctttactttacgaaggattatcaacattgaagataaaaattaatgacagaaaggcagatgctgacccagcacattgtttgcgcagtcaattagtcatctcattatgttgctcattgtagatttgagctaataaagcattttaatagcaagcagacattatcccactaaaagaattcattgatgtacttgaaagaaagcctagaaacccaagatacaaacttcaagtaaggaaataacatgataacacat

SEQ ID NO: 164842 - DNA, 2430 bp, Cannabis sativa
taatagacaaaactgttgtagtgttatttctcagtttattagcttgtcaaaattgttattattaatgatacgatacatcactatatatagtgttataaataaagtctttaatcctttattttaaataaaatataaatatctaatttgatttgagtttataattcaaattcaaattggaatataaatatctaataattggatatcgaaatatcagtagatcttttattttaataattatccttttaattaaataataatctaataatgtatttaattaataattaaaagataattaatttaaataattttaacctaataaaataattaaaccaaattaatcatgtgcttttatatgtcaccctacacgtgtagaatagaccttcacgtgtaggccatattttcaggtccaaaattaatttctcaattttgccacaaataagatttattatttattctaccaatgaataataatagaataatttttcgttaatcttttatttcacaaggattaaaataaatattattttctctaaaataatatatttatctttctagtattatttagtaatgataatatatttaaataattaatatagttttatccaataaaactaaataattaaatactattaattatacaatttataacttccataattaattaaaacaataattttgtaaattactatattgcccttaagaatttatttcccgtagaaattaattctcactcgaaatccattcatcaaataaaaccatcccttgacagtgttgtatagaggtgactcggggaccatagatctatatttcaatgctccaataaaactaagattactatcaatctcatcaataaaataatctggtttattaattctattattactccatcctaaatattgaattgaactctttgacaatatagatttatatttatagaattcttacttgtagtccgttgatataatcaatgtaagtagtttttcctccaattattagttcataattagagtcaaaataccattttacccttctaattatcttatgattccttatgtaccattaattcattgtgaacagttaatgtatcacttattatagatttggatccaactattagcactcccagaattaacaatataagggaactaatattcaatctgttaagaaagcttagaatctaatattgtataatatggtcccagccattcatgttattaaggtccaaaaataggagtgattcaaagaactcaatgaacacaaataggagttcatgtatactcatgatggaagctaatctaatagtgatcatcattgtgatatgataaactcttttcatggtaactgataaccttgataatgtatagttcaacactttccttacaaggatgaaaacaaagctatctcgaggcctttccaataccctcagtgttggactaataattgagtccatgggtttcataatagatgacaaccctcttgtactcactattttaaaatgtgtttttctttattaaaaccatttttgaactattcattttaatcattatccaagttgtaatacattgattaaaatactataacatatgcttaaaataatttaattaatattgttatcctaaaatttgtccacctgacatggcatgtccacgtaagccaaagacagactacaggtggagtgcaaccctaccggtagtagaatagggcctccatgcaagatatagcaaaatcatcaatgagcaaccaaatggagtgaagccagccttcaaggagctgtaccaacatccctggccggccaagagaagcctacaggccagccagggtgagcctataggccagccaagatatgtgcacaagctggcaggccaagaagtgactgttggaccaaggaggcttccgttcgaccaagggaacgttgtctcttcaaggaaatggtaaacaaagttgtctcttcaaggaaatggtgtacaaagatgcctaaaaatcagctcgatctgcccaataactcaagcaacccaagattataaacctcctccgtaagaggaagggacaccttggttatctcgagagggagcaggtcacaagaatacaaggggcagttactctggtaaagaaattttgtaaaagaattgcgatgtgagcaaatatcagcccactgtggttgccatatcaagctgccacgtggaaagctggacgataaccagtagcagtcgaagacaaacaacaagaaccaggactacttcacctggaaccccgggaaatgtcatggattgaccctagatatagaaacaattgagggagtacgtgagggattgaccctgaacatcaaaaccaggtgctcttggaagattgataaaataaacgattgaattggggatgttctcatgagattaatgattgtaaatcacattgttgatgaaatattttgaactt

SEQ ID NO: 164843 - DNA, 1734 bp, Cannabis sativa
tcaagtagtgtcaatttatggggtccatattgacgaaatgactggaatgagaactactgcttaacaagactatctacgcaagtatatatctaaatctagtattgacttctagataactagtatatttatgttgattttcttctttatgtataaataagtttatatatatgacagctataaaatgatgtacacaggctagttttgttacattgtatatgtatattgtatatatatatccgtgtcttatacggtagaaatgattaggaccaagccatagaagatctctctgttacgttcaaaaagttgagatctgggatacattttttcttctaaaggtcaatcgaataatattaataataatattgcaaaattatgacttttttttttatttcttttttctttttcgaaaggtgcaaaattatggcttttgatttttgagagaatgtgaatattctttacctagctaagaggttaaaagctaggtatagggttaatactttgtcattatgatggttataatgatctattaaactttgccaatttaagctacatatctatattaaaatctatatataaataaatattacatgtacgaaatttcattggatactctcataaatctctaccgaccctatttaagtaattaaaccaatatcccaacaatatttaaaagtacctgctttctcttcccataattcattgtcaacataaatttgaccagttttccaagacggttggtggttttggtttgactgaattgtgagtcataccatctctaatagttatctccaatggttacattaatttagtataaaagttacactaatttagtgaaaaaatgtttacttttagtacaaaaattctaatatttcataccaaatattttattaaataaatatattttacttaaaaaatctcacattttattttatttacattaatattccaaaatagcttatttatgatacaattatatcacaactaattaaaattttaaaataacttagtcaaataaaatatttattaaattaattaaacatttttttttaaaaaaaaaagaaaacttaaataaaatcacactttatgtttatttttatttatgttgttcattttaatttcataacttagtattatgttgtttttattttatttaatactagtattttttttattgttgttttgtattattaatatgttagtgttttaaattaattattactttttgataaattttaatttgacgactaaaatgtaagattaattttaaaatatattaaaaacacgcaaattggtgtagactcaaaatcccacactattaataagtatagaatttggtgtacaccaatttgatgtccactactacaaatataagaattcgcgacgttcctaaaaaaattttttttcgagaaccgtcactaaaaaaattaagtaactatttaaaaccgtcgagaaaaatttagtattcccgacggtttaaaatcgcagtaaacaaaataggcgatgtttttttttaataaaatgcgattttttaatggacccttataggcaacggtttaaaatcgtcgcctatactaccgtcgcctatagtataggcgacggtttttaaaccatcgtttataaggatccattaaaaaatcatcacctacttctcgccacatttcctacgtgcccacctactttttatctacttcccacatgcccacctaattattctcacatatttattctccattt

SEQ ID NO: 164844 - DNA, 1085 bp, Cannabis sativa
  modified_base (1030)..(1040): a, c, t, g, unknown or other
aaaaaaaaaaaaaaaaaacagtgctcgttttgatattttatatatattagtgagtgagagattctttttaaatatattatatttgcttaattttgaccaaaatgttattattatattttttaaaaaaaaaataaagaaaccccaaagacaacagccctgtatatgttattaagtcaaataaggcacatatacattggatatcttaaatatgaaaatttgaaacattaattatatgatatgaacatgtacacacatacacgcacttccatatatatatatatatataaagatatataatagaactattatactattacttacagtgatgatgaagtgagagattggaagaagatgatgcagtgtagtgtttggaagatatatgatgattaatagtacaagagatggagagatatagctagcatggtgtggtaaatgagttagttgtaacctccttatttattaatctcatttatggcatttttttatgctaacttctatgaaatgcattaatattaatccaaaacgatgatggaaaagacaaagtcacttcttacacattttttttttatttattttcattttcatttcgtgactttatttattttgactattttagccaaaaaaaaaaaaaaaacactttatttattttgaatagagacaaaaaaaaaacatacaaggccacaaatgtacttttttctctacttgcataattaagattccctacgatgataggcacgaaaaggcattggtgtgagaaaatatttcttataattagttattggggtgggaatttgggatcgcattttttttattatttaaacgttactactttatatattataatgtataattttgaattcgaattcaaaattttcaacacatacttttttacaattatttgagctaattttaagttgttaagattgcattacgatttatgtaccttaaattgtatttattagatgttttaataaaaaaaattagacgctttaactaaaaaaaacttattatttaggtggcgtttggtaannnnnnnnnnntcagttttctgtttttaaaagtagaaaagtaaaaatatttttcaa

SEQ ID NO: 164845 - DNA, 2025 bp, Cannabis sativa
aaaaatacttgatttaataaaattttacataccaaacatatatttttttttcttacattttccttttataatcaacagtaaaatctttgtgcaaaaatatagcttttttttttttgaaatgttattttatagaaaaattgaaaaaaaaaaaggttaaaaattataagaaaatcatataagagtaactaggtactcttatggtaaccaattaccataaagaagtaaccaaacatcttatgttgtttttttttttctataattttttaactttttttctaaaaattttcagtaaaataactctttcaaaaaaactatattttacaaatttaaaccataaaaataaaaattatcacttttttattgtccacacatttcttcccaacattttcctttaccttttacaatctacagtataatctattgattttaagtacattcctaaatagaaaaatgtaatcatctacaatataaaaatccactactttttcctttcttcaagatatagaattttccactccaagttggggaatggcgccaaatttttaaaaagtagttgcaataatcacataatacacgtaataaaaattaaaataaaataacacataaaaattcatataatttattaagtagaaaaattataaaggaattagtagtgcaacaaatttacaaaaatccttgtaatctaattttatctcataaattttaatttaataactaaatataatttaaatttcaaaaattatagctcgcatattttaatttaataattattataaaatatagtaagaaacttaccaatttcttccaatgacctccttagaagagtaaccagtcatggaaaaaaatccattactagcatacataatagggcattcaggcttagtagcatcagacactacaaaagtttgttgaagagtagcgagtgcatcttttaactcttgggaaaccctcgggatcgcgccttccaatgtggaaagcgattccgaggatgtccttgctgattctgagttctttcctttctctctttccccatcaccaaacgaattcttaacactcccaatactcttaaaactcctctctccaccgtccgatcgcacaaccaatccccattccgccgtcctttccgctatgctcgccttttcggtaatgattccttcattggaatcctcattcccggtttcaaaagccatccatttattgattccagagctaccacttctctgtttttccattcttgattctctttttaaagctctctttcaacacgaagccatttttggttagcaaaatgaagatggcccatcaatgaaaatttcccattattatgttctttcttttctcataaatgatcagattgctctgacttagctttatcaggatgaaaaaaaggtgggattttgctgtaaagagaaaaaaaaatggaagaagataatgtttttcaggtttcaactaaaaaaataaaaataaaaaacataacatgtctcccaaccatataaaatctcagagaagaaaatagttttgatctcagccgttgattatagatgttagtatgtacgaatcatatccagccgtatattaactttttttctttatttatttattattaagtatttttatttatttatatattatatgcatgtcacatcttcttgtcctcaataataataccagaaataaatgtgcataggcaaaatagaatagacaccttgaatatttgtgaggccaagaaaaacccaatgggtaatgtttgatgataaatctctcaatcatttcactattgcttttttttttcttttttttctctcttttttaatggagatgttaaaaaatcggagaatatatatatatatatatatattagttagtacatgaaattgtaataaaatatgatacttataggtataatattaatcttggtgtaataattaagtttagtttgaaattttttatttaggcctgaaaacttctaaacatctcatttaataatatttattttatataaaatttatatatttaattatatta

SEQ ID NO: 164846 - DNA, 1595 bp, Cannabis sativa
gacacattccattatcaaatcacaaacttgcttgtcaaaaccattacctttgagcacctcatggaggaagttccattcaattctatcataggctttgagcatatctagcttaatcgccatgagccctcccttacctttcttcctcttaatcatgtgaaccaattcttgagttagaattgacgattccgcaatccaccttcccgaaacaaaggccgattggaaaggggatatcaacttgtcaataacctcccgtagtctggtagcaaagattttcgatataattttgtaggcaaaattacacaggcttatgggtctgaatttgtccaccgtactcgcattctcctctttagggatcaagcatataaaagtatagttcagctgtctatccaacagccccgtttggaaaaaaatttgaaccatttctattacctcactccccactatctcccaatatcttcgatagaaaaaacccggcatctcgtcgggtcccggggccttcaaaggatgcatctcggccactacattccagatttcctcagtcgagggaatacttttaatccttttgttctcatccatcgaaataactggcgactgaagctcatagaaggccccatctataaccgtttcctgggacttatacaattcccggaagaactcattgaacactatcccaatcttccgctcactcgtctcccacacaccaaggttattcttcaccgcagagatctcattccttctccttctaattatagtggacgcatggaagaactttgaatttcgatcacccactttcaattaaatctccctagacctttgcctccacatactctttccgaatccaaagttcagaaattctggactgcaagtccgattcctcaagcaaaagagatgcagtcgttggttgacattgtatcaaacctaatctttcctcagcttctctaatcatcatatcacattccccgaagacatcttttttccatttttggagagcaaccctcgtatcattcagccttccacacatatttctactcctctcacccctcaaactccacgctccttttatgacatcctcacaagaatggtccctcgcccatgcttcaaaaaatctaaagggtttatgacccctgttctttcccctaaccgtgtccaaaagcacgtacccatgatccgaaaccgagataggtgcgttagtgactttggccgcaggaaaagctgtaatccaatcccccgaaaccacagctcggtccagtctctctctagtcaaaccacccaagaatttattattttgccaagtgaacttgcacccatgggaaccaagatcaattccccttgtattttgcaagaagtttgtaagaatccaagtatcacgggcgactactcgtcttccaccactcttctcccaaggatgcgcaatcacgttaagatccccaatcaccatacagggacttcggcatctgttgatccttgtctccaaatcttcccaaaataattgtttttcattctcatacggtcttctgtacacagtaaacaacctccattgttgttggaaattattttaccaggatcttagatctactgacaagtatgttgattaa

SEQ ID NO: 164847 - DNA, 1647 bp, Cannabis sativa
  modified_base (1206)..(1209): a, c, t, g, unknown or other
gatattcaacttcaacatctttctttgcaactcttcaacttattcctccaaactcttcaactgacatactatcaaatccaatgttgttacattttactaactttcttgggaatgtcttctcattatttatagatggaacattgtgatatgagtcattggaacatttatcaaagcttttggattgaactgttaagaaattggggcactcataagcctaacattttcgcacaggctatagttttgagcatactacttgtctcatgtactattttggcttatttcttaatgcctcagttatagcagtggtggttcttatggtatttaaaccattatacatcaagaacacagacacagttgaccttatcatccacgaaaaagaaaaacaaaaatacaacagaaaggttaaaataattgttgaacatgtgtaatatcgaaccaatatcggatgcaatcgggctgttatcgcactcaaagaattatatttgaaaataataaccatcgtgccgacatcagactagacatcacaaaaccctaatcgatatactacaaactattggacacatatcgtccaaatatcgaacacataaccctaacactaatctgaacaagccatcaaacacctattgtctagacattggacccatagatatcagacacatccctaaccttgaaaatgtacataccatcagacacaaatcgggccctatcgaaccctattaggacatctttcccaaccttaaaatttaacaaactatcagagttccatcggggtcgtatcagacacaatcagactaatcgagaaaaacacaaaaaccagaaaaacacacatttttcaaagaactatttccataaaaaaatcagcaaaaaacaacaacaacccaaagatatagaaaacatctaaataatattcttaactaaatataacaaccaacaacacaaataaacaagaaacatcacctacccattggttctgtcgatgatgctcgtgcttccttaagaaaaaatcccactagcaatgtaccttagatgtgagctcggagtagcttggagtaactaaaatctttactctatgcaagattttaggtggcgtttggttacaaaataaaaatagaataggaatgtgaatggtaataggaataggaatagaatggaatagaatttctattcttttgtttggtaaagactatggaatcaataactgaatannnnttgtgatgtttggtatagtatggaatgaaacaaaatttttattattttgaccaaaatatcctttactcttttaaaataatttttgttttataaaatatttatcattgtggtacaaataaaaaatgatatatatttatgtatcactctcaaattgtattttgttagatttaattatcaaataattaaatataaataaatatttaatttaatagtctattttatattttttttaagtatcaacataaatgttattcatataatttaatcatcatacatcgtctatccatataattataataataatattgctttcttataattttgtacaaaaaaatatagtaaacttattgttgtaatattaaatgttgtagatatatttttcaaaataaaaaaggctaattaggatttttttcgccccgaactttgacatataccaaa

SEQ ID NO: 164848 - DNA, 1091 bp, Cannabis sativa
aaaaaaaaaaaaaaaagagttaccgttttgttcttttctaattttgttttctttaattaaaggaaggccggagttaatttacttaattatttttgaatggaagagggcatcggtattaattctagggttgttcaaccacatatatcgaattacataattaatttaggcaaaataataatgataataataataaagaaataggtgattaggtaagctaatagttctgtcacagtggatatatgtaattgtttcactatttaaaatattaataatattgggaaataaatgtgaggataatacccttacggtaacgtatatatatagtgcttaattgagactcaaataggggaacatgttttgtttcagtagtcattaatcaaaatccaattaatgatatcaagtctcaaatttgggaaacagagggtcatgaggattagatgaaatgttctctagaaatgatatagaggaaatttggccgataataaaaataaatgtaattaaatttaaagtaaagtattataattactggtttttgagatgggaccagatattgggtttatctaccaaaatgaatggttggctctaccaaatgtgtctataatagatgaatcgaccattgaaatggatgtacctcattttcactcgctaaggccattttcaaataatgctaaaatttgtcgcattgagaattaaagagcaaaattaaagaaacttcattatatataatgacttctcttttgggtaatttggctttcatctcacaaattattagacagagtattatatgttgaacaaatactgaaaaatgaaagaagaataatattactaaataatatttttggattgagttgtagactaaatcacttttttttaagacgtttacataactgtttaaaaatatgcaagcagtcaaaaattatcggtcgttcccagattaaaataacccaatcgaaacatcattgtatcgaaactttactgtacgataaagaaccgtaaaaaaaaacaatactcaaatactactgctcagaatacttatgaaaaatcgtgtttttgcaaatgtcagttgtatataagaaaatataaaaactgta

SEQ ID NO: 164849 - DNA, 2477 bp, Cannabis sativa
acaatgtcatttttatccaaatttatgcactatgacatggcatccatctaggtgacatgtgtaacatatttcacaacatgagcagatgattctactcctagtaggtcatacaaatagttatgatgatcaaagtcacacatagatggtagaatgtttggacagatcatgagtagacatccaaccagctccactaggcaggtagctcgcatgcaccaaccaaggggtgcaaattaacaatttttgagatgtatctcgtatatttcaaagcttgcaagtcacaacacaatccttacatttgtgggatgaattcgtatatttagagaataaatgtaatcaatctaagtttctcattttttcattgtaattatagaaataaactagtttcccattttatttattattaattagggaaactaatttcatgtaattaatccctataaatagtggtctcatctcactattcaaggacacaaaaaatcagagagagaacactcaagagagaaaatcaatctaagagtaaattgctcagagatcattgtaagagcttttaagagagatcaaagcattcttactcaatcctctcacaagtcaatacaatgaaaaagggagtaggctaaccaactataaggggttgaacatctataaaatttggtgttttctttactttatattatttactttctgttatttaattattctaaatctctttaattagactcactatcgttgactaaaagagaggtcaacagtcatcttaggacgacctattttagttgactttagggctgtgacgttgattcaccacttatgcttaaagttcccaagtgatatcgaaatcattggacaatcagagggaaccagaagagtgcaagaagttgttacaatgtctcgaccaaaactgttttgatggtctgagaaagaaatcatgaagaacctggaacatccacccagcaagcactgggggttgttcgggaagaagatgagctagatccatatgtaggtgtaaagagataattaaacctgtggaggagatagaagaagtgtgcatcagtgatgaagattccactaaagtcatcaaagtgggaaataatcttcctccagccgttagagaaaaaattatctctacagtaaaagaaataatgatgcattagtctggagccattctgacatgattggaatcaacgcacatgtgatttgtcatgctctaaacacagacccaactatggaattagtttgtcagaagtgaagaccattagatccaattcgagcagaagtagtgaagatggaagtagacaagttgactaacatagagtttctctaggaagctttatatctagtatggctagctaacccagtattgatcacaaagcctaatggaacttggagaatgtgatagatttcatagatgtaaataaggcttgcactaaagactgctttccacttccacgaataaattagatggttgacgcaacttcatggtatgaacttctgagctttatggatgcatactccggctataattagatcaaaatgcatgtggttgaccaggaacacactagcgtccaaactgacaaaggaatttattactacatggtcatgccatttggattaaaaaatatcagagcaacatatcaatgccttgtcaacaagatgttcaaagaagttctgtggaagaatatggaaggctatgttgatgacatgttggtgaagtcaaagaccttcgtgagccataatgaagatttagaataaactttctctatcacccaaaagtatggaatgcaattaaacccaaataaaagcactttcagagtttccccaggaaattttctaggtttcattgtcagttctagaggaatcgaagcaaacatggaaaggtacaacttcatattatgctaccactttagtgtgagaagtgccgcttttgtacctggcagtgtcagatcacgccataactgcccctttagtgcgagaagaagaaaatgtacaacttccagtatattatgtaagcaaaagattatcgggcgcgaagtccagatactgaatgatataaaagctttcctattgcttactaattgcatgacaaaagttaagattatactttcaagcccatgccatcaaggtactaacaaatcataacctccgccatgtgtttcaaaaacctgggtcatttggaagactcttgaaatgggcaataaagttaagccagtttgacatccattaccagcctagaatatccattaaagggcaagctttggcagactttattattgaatgcacagggatggacaacaaccctgaagaacccatctcgaagctggaaatctaaaagatatatgtagacagagcatcaagcaagaaaagttctagagtagaaatcattctcattaggggtgggcaacatccaatccaatccaattgaactgaactattccaatccaattcaattacaaaagattggatatccaattacaattgga

SEQ ID NO: 164850 - DNA, 850 bp, Cannabis sativa
ctatatccaaacattaaaaataatgatttaatacttaatatgtcccttcaaaatgaagtgtataaatttgaaattcattttggcaataaatctttgaaatggaatgaaaaaagaaatttggtaaggagatcagcaagattatgtttggtgttgacgtgaaggagcttcaactgaccactttgtacccatacacggataatgtggtaattaatattaatatgtttagtccgttcgtggaagactgagttctcaaaaatttaataaatgttttgttgtcacaatatataagggttgaatgtaaattattaaccccaaagtctttaagtaaagctgagcaatcatttgcaagttgtgttcatatcacggacactttattattttgaaataaaatatttgttattataataaatgtgactttatatggaaggatatctaaggatgaaatacacatcaaactaaattaaaaataatccaatttctatatccaagcattaaaagtaatcatttgatacataatcctttgccaagctaagttacgtttctatataataaaaatacatatatatgtatacatgtactagcaaaaaattacgtgcgagagacacgtatactaaattttatgctaattttttttctactttattaaaaagtgatacaattaaaatttttttaaaaaatatattattagttattaggttcaacataataattaatatagtgacagacctaacgaataataatattatgttacctaataacaaaataggaatccaccaaacaacattatcaaaatttattccaagtataattatataaatctattacccattgaagtctattagaaactcta

SEQ ID NO: 164851 - DNA, 1387 bp, Cannabis sativa
aatatatggtatgatagaaaaaaattgactaatctttttaggattatctaaatctattgtatatatgttaggatttgtgccctgaaaatcttataaagaaatttttgattataaatataagctgaataatttgaaatatgtttgaatgttgaattatttattaataatttaaatataaatattgaattttttaatcatatatgaggttatgacttgtattatatggagaattaatgtcactagccatggataaaatagtcagcttcatattaaggttacggaatatttaatcaacggttgctagtataatttactgatacccattatttgatgcaagcaatcttgattcggatcactgatgtagatggacatctcgatgaaggtgtagtatataataaatattatatataacaatgaccgatatgtaattaagctatctttatcaaactagtcgcttattataaagacctaattcatattacaacgatgatcaattagtagatcaacctaaatcttgagtaattatgaactcttgtttatgttattagtttctttgagtcactcattaaagtttctcagagaagatgattcttaaaacttctgttttgggaagctaataatgtggatgactgggaacttgatttagaatatggaatcttgactatcctaatggatcagatattagtttcctttaagtgttaactctagaactataaagttgcacacagatttaggtttgatctaaattatactttcactgctgaattaatggtactaaaggagaaagagatcattaaaagggtaaaatagtaatttgaccaaaactaattatgaaccaatacatggaggttaatcactgccattaattatattaatagacaatatagttaaactcaataatataagtctataattactaagagtttaattacatatttttagttgagtaatcatgaaattaataaatagaattatttggttgatgagattcaatgtataatttaatttattggagctttgtattataaatccatggtcctagaatcgccactgtataaattgtcaaggatatggatgatgcaagataaagatgttcagaaaattaattttgcattagtaaaatagtaattatttattttaaatttattatttaaataaactagggagccaaaaatattgtcaggataaataccattttgtaataattattacaagtggtgcctagcattgtgttcctaaacaaggtgggaccctactaataatggtaggctccactggatttgtattttgattaattaattaattcaaaagataaatatttatttaaaattaaatttaaaaaatttgttatatatatttatttatggttgagatattttctcaaagt

SEQ ID NO: 164852 - DNA, 1530 bp, Cannabis sativa
tgtaagatcataatgtatgaattacatatattagtagagttatgcggataaggcataaccaggttagaattgataactataacccagataaacactagtaaggtcttaaatgtaaaagagacgtgtgagcacaacacgtaggtctatggtacatggacattaattatagttacattattgtacagaataatgtaatttagtgcggtggcagaatatgtatgctgtagcctactgtatgatgaaattattattataattattcatgttgtagtattatttttgtcttgctgagccttggcatacaagtgctctaatatacaggcattggtaaagtagtgtcggttcaaccttgagttcgagggttttgaagatcagttgtacattttccagccaaaatagactcacaagtgttgggtccaacaagaattgtatagaaattgcactttgtcgcttaggtcgacctgtacaaaataccttgtaatactttaaaaattaactttatgagatcctagataagtaactttaaattatatttgtttttagtataatatcgatttttattgcaagttatttatttatcaagtttaatatttgttttaaatcacttggcccatggagcccaattagcgagattagtggtttgtaatcacgacatgtggcgttcttctaattaggatgttataattttgtatcagagcactaaggattttaaacttcctgaacactagccaaacatgtacaatcatcatagacaagctcgactcgtggtgtagtaaatgttgagagtaaatacgtatatgcttatgtgattaaatgtttactactttatgatcatagaaattattgatattaaatgaaagtatgattatagtaagtactgcataattatgtgataattaagggttatggaaagaagtgtataagagtgggagtggtgcctggatcattgggattattggttaaagggttatttgaaaaagaaaatatcctagtcaatcatttagatcacagggcgagtttattgaggacagtgttatctgaaccctcccaccaacactgccaaggcctccgcaaaatccaggggataaagcaagggtgattaatgctaatccttttactgataagcatcagatgtttaatgagatgtaagttattatccttcatcaagaagaagagttgtgctgagttaggtcaccggcttaggtagctttagtagagcaagtgatccttacaactctagttctagtggtagttaaccttggaccaattttgcaacggtatagagattcaatttgtggaaaggttgttaaattataatctctgacattcctagtggtaatgatatgagtggggtggagtagtaaatgaatatcgtcaccagtatcttggacaatgtgggggtatttaaaactgagtgggtgaataatagccccttcatgctttaaaaatttgcccgtattttgtgggatctagtaggttagactcaagaggagcacgagcatcatcttcgaatggtattacagcgactta

SEQ ID NO: 164853 - DNA, 1486 bp, Cannabis sativa
cgcactcctctgcatgcaagggctgagttggtaggaatccaggaatgagctattttctacacaaagtatttaactttcggtggtatctttaacttccacatcctcatccaccacgcctcctccaacttgagatcagattgcatctccttaacttgtgagcttgctgccattttatacccactacgaactgagtactctccattcttgctataatgccacataattttatcttcaatgttccattccgaagtagggattggtaagattaatttagcatcatttggattgaagacaactctaatgaaattctcatcccagtctccattactttactttaaatcgatgacatacagttgttctaagagtggtggtttgtcatagatcttaaaagttacgggtctcagtaaccaagaatcctcatgcaatctaactgattttttattacctaaatgtcatctatatccctgttggatgacttttttcccccaaactaagcttcgccaaacaaacgaagcatggttgccacatttcgcctccaacacccctccatttaggaaataacactccttcaaaactttactacaaagtgagtcttggaaccttatgcaccgccaaatttgtttagccaagagagcttgattaaacaatcctaaatcccaaaagcctagccttctttttttcttaggcttacataacactaactattttcaccaatgactcttcttgtctttttcagacaatccccaccaaaatcttgccaccattctatgtatgctattaatagtactcttcgttaactggaaacagctcatgatataagtggggatggcttgaataatagctttaattaagacttttttccgaccgctgaaaacaaagttcctttccaaccttttaatttattccacactttatttttgatttcagtgaatagctccttctttgttctacccacaaaagatggtaaccccaaatatttcccataagtttcaacaactttaacttccattatagctgctactctagctctaacaatcgctgaaacctgtttgccaaaacacatttcaaatttatgaaattcactacttgtcctgaggctttggaatacttctcaagcaactctttgaaatatcgacattcagcttcaattgcctcaaaaaatataaggctatcgtccgcgaagaaaacatgtgacacagtcaacccccgtattccaaaagtgatgcctcgaatagtcctagtgtcttcggcatgttgaataagattggagagaaaaagcctcagcacaaaacagaaaaacaagaagggtgatagcatatcaccttgtcggagtccctgctgtgttaaaacattaccttaaatttctccgttaaatcagaaaagaaaagtggactgaagtaacacaaagcattatcttatggaattattacattgaaaatataaattgacattttatttacaaaaaaacttccataaggtaaagaca

SEQ ID NO: 164854 - DNA, 1401 bp, Cannabis sativa
gtaaaataaattccaacagtttctcgtgcaataaagatcactggggtacgatatatcttcaaccctccttctgagacttggaaggactgcttgaagtctatcccacacctcatgatgctttctcccttgatccttttatgcaaagtccaagcttgaacttttaggggactttagccttcctacccagagttgaagcctgcctcacaaaagtatagcatgactcctgtgaacccaacaatacttcaccctttggtgtttactagcaaaatcgatgtcccagctcacacacactttctgcctttcttagtgaaagccaaaagcctactgccacgagactcgacatgatttttgctgaaataaacccctacgcaaggacgattgtttatgggtgcaagcccagctttcccccgggaaatcaacagctggcctagagtctcccttacgagatttgcgccatagaaagggttgttgggatatacaatcaggttctcaccctgaacttatcttgtaccttcccagaaggatggtgcgaagcaaagatatacctggtactcctctttggaaattggaaagagacacagtcagactcaaagcaaatgaccgagaatctgagccccagaatttccaactcatttgggggtatgatatgtctgattgtaaatagctacaacatcctacttccatttgccaaaatcattcggcccaacatgtaagaaaaaaaatcaaggaacgtactcaactaaagtctcctcaaagagaaatatgcttgagttcttccctcaaaagctaagctcaaaagcaaacgtagagataagaagtacatttgattaaattttttcaaaatcaaataaacacgcatgagtcccttcttacacatctccacgggctccacgaggagtttagcccagcaagttgcataaaagctcaaaatgagaagttggcaaggaccaaagtaaggagaatacttaaggaagtcgcaaacaaggctctcgaagcttgactttgtgaagaccatacccaaaaggggacagtggaagacctcgtttcatggatagaggtcatttcctggccagtttcgaataagaaaccttcttggaagagagccaaaaaaacatcgcgacccctagaaatgaagggccaaatcaaaaatcgtccctgaggtcaacctgaagacaaccaaggctaagggaaaaaggttgaaacaccggccgttggaaccaaatatttcaaaaaatataaccagcccctagacagtctatcatagcaagtctctaagaaaggaacaacaaaaaatatcctacccagctattaaaaagcccccagcgggtagggtaaagttaactgtctctgcagctaaaaaagtttagttaaggagaaggatatacaaaaaagaaaaaaaaa

SEQ ID NO: 164855 - DNA, 540 bp, Cannabis sativa
tgcatccgtctcaatatgtgtaatcggaagttgttgttgtatcacccaattgagactatgaaaaagcgatttagcttccatttcatcagatcgaaagcatccttggactggcttagatagagcagctataacattaccgtgatggtcccgtacaattgctccacactccagaatttttaagtctgtgtttacagcaacatcaacatttaatttgagaccaaaaactggtggtggtgtccagggaaaagcgttgaagctacggtcagaatgttggttatctgcatgtacagcagtagacgagctggctctttgatctgtaggtggcatacttggatgaacctgtacattttgttgctgaattggtgcagcaacagtggctgtactggtgcagtgaaagtcagaccggtttttagttctactccgtgcatatttctccaagtgcgtgcttgcaaaagtggcaatagtgagacttgatcatggaacacccccatgagttaccttgttgcgctcatgccaaatagcccacatggtacatataat

SEQ ID NO: 164856 - DNA, 1762 bp, Cannabis sativa
aatttgaaaaacgaatatatattatagaaattagagaaagagaatacacataaacaatatatatacattatgtaacaattaatatatataatatatacctggctttatttatgagaattgatggcagccaaaaattaaaattgatttaaaaaaaatgagaaaaggagagaatggtactgatttttaaaaaaaaaggaatgacagaaagaggaagaatgagataaaaatgggcatgtcaattgtgtattaataataattgtacataacattaacattaacgttatgttatgggcaactaccaaaaacaatctttcctattttcaatattaattaacaattttttatattctcaatctcaaaaaaaaaaaaaaaaaaaaataggcccctattattttggggccccgtgcaactgcccatgttgcacaggctattagccgggactgaccctaagacaaaagacttatggtaagtttcgaactcgaagtagtaagtttcgaactcaaattttggagcccctatatatagtttaattataataataatgatagttctagtacttagtgaaatagtaaaacttttaaaaactcttaagagatccaaggttcaatccctcataactacacattaaatattttcttaaaaaaattaaaaagtagaggttaggaattgatcccatgacctcttacttaaaagtaagaccttctaccaccacactaaataatttttgttatattttcttcttatttaattctttaactatttattaaaaaaaaaaatcacaatttcagggccctgagcgttcgggggcccaaggcgcacgcctagcccacctaccctcagggttggccctgattatctgccttcccaaaggggtgacatgcggcccctcgaggggagcccattaactaaaattagagaacaaacacaacaactcatctctcaaatggacatgtatttggacaacatgttcggatatgatccggatctttcaagttcctaaaaagatagtttaactctaaataaaggcaaatggcagaagtatattgggaatagataccgtcaggggtcatctgagagtagaatcaaagggggttaatcaaaacagtctaaccttctagatactatctcaagaaattcggcaacctttctcctctgtcataccttagaaaggcatccgacaaaaaggagatcacttttttaaggaacacccactactctgacattcctttttcccaacgatggcttaggtctcaacatgtcaccgtcaatagtactataatatacaatagactgatccttggaattaggcctcaactaccgagcccaataattcaaattataatattaaatagtgtattataccccgtcattggatatttattgtacaaaatcccaaggggcctagatccatctggcccattaatcatatcccgtgtactgataaattgtgggactaaagtttaatcacataatcttgattacaattcactgtatagacaacacaatcatgaataacaatgtgataataattcaaaagaatttatatatcaaacaaatgaccatgaagcaaacatgtgaactaagcattatattaaataagtaataaaataattctgctccttcattgataaaaaaatgcaagataacattgagttttagttaggacacaaaaactcaacaaactcccacttgcactaacataaaacaatcaacatacatttcaattaatcctagattctctttgtacttttcaaatgcagtc

SEQ ID NO: 164857 - DNA, 1862 bp, Cannabis sativa
agaacctcaccgctcctcagcctcaggccaagcctttctctagaatccgccgccgtccatagctccgagattctccaaacacgtaagctcaaagcatatgttactgtttgtagacctcatatcacatacgtagtggcatatgtatatggtttttagtgttggaagaaagaaaaaagaacaagtttatatgctgcgtttgattgaaagagttaactgtgttcaaattcaattcgtacttgaaattgtttgtatttatactatattactctttttcttttaggatcttgcaacgctaataattgaattactggtaaagtgtttttaaggttgaatgatattttttttcctcagttttggctgtgcgtggtttgtagatgcacattcttagtttcattctgtttaaatttcccttttgaccaaaatgacaattggttggccacttgagaggctaatcttattcttacgtatttaccatgatttcttaatttagccaaataaatatctagttcatatgtagctaccatgatctaaaatctaattattactttaagatgaagtataactgttcatttaaaataacaataaaaagatttgctgttgcttgacatggtatcgttaattgtatttttttttctcttttcacttttgcagattgagcatctctgatttttattcgtctcttggaggaaacgttgtgtttcctcaaagaaacaggggtcattctgtgatttctcgtttttctgggtctggtggagtggattgtggtctgaatttgaggcttgcttagggatctatagccatgggaatcgaaattaggaacgataacgtggggtatcgtgaattaaacaatgtcgatatcactgattccgatttgttctatcacgttagagatgctcttacttctgtttcaaaggtaaagctcaagatttttctcccaaaatctgaagcattctttgtggattgattgaagggtttcttaaatatgggtttatatcgttttttccccagttgcagtgaaaatatttgctgtgagaatctgaattattgttttcttttatctttttctggtttagggggacagtgacaagtataaccagcttgttgcagtcatgcaccacaggggacgtcttgctcctgatgaggttgcactgctcgtggtaagctctctatctgaagcttttttcttgtcaagttcttttgcttctttgtcaaaaaagttaattcatttgtttcatggggtttattgtgtaaacctctcttttctcatctccttgtcgttccctttgaaatatgcttcatttgtacactattactgaatagacatcctgtatgaagcctgttaaaaccttctgccaaatctgactttttgtttgttaatgcttgatagacgagtttgaaggcgctgtctgttgcagtgtcacatattgataatgttcttcatcactctcttcttgtttctgtaagttgataaaagaactttggtttgatgttagcttttgctgttttcaattttctcaattactgatttggtaattctttccagatattctcaatgaacatgtggtcctgcaggattgatgtgatggatgctctgattgaactaatcatttcattggtacacgacttcttcttatggtgataaacattgttttttagaactactagatttatttcaaaagtgctgtatgtacaatgtcaatcttgcaggctgcttcaagtgggaaatatgttgattcgtgtttagagatgctggttggaaatttcacacccccttcttcaatgatagagtttctgaaacaaccacgaggtatttcaataaagtaccaagttctatctcgggtgcattcatctctggaagtctt

SEQ ID NO: 164858 - DNA, 665 bp, Cannabis sativa
gtaagttatatgtaattttctattatgtttcctttctttttccaaccatgattctctatcatcactcagttcttgtatttattttgttcaatacctctcactagaaggaaaaagctccattggaggtctcctcgtggttccaagctcattactataagatttaagaagaggtaagactatgttgtcttcttcttctccttttcatctatagggctgaaaccctaatcatcattttctcttatgtattctgagttgttacattatctttgatagaaaaataccaagcttggggcataggtaaaatcatagaaagatcaacccaaaagatccattaaaaccctacccaaaaccttagctacaagaggtaaatctttagattttgagagagttttagttagtgttcatggatgttttatatagtgagagttttttcatttttagttttatatttcaatgtgttatatatctttctactttttatgttagatgccatgctaggggttgtgtacttggtttggtagaaatccaaagtttctaccaaaccgtttgatttgaaagtgttttccaacagttttgagacttgacttccaacggatcaaaaccaccaattatagttcgtattattattttaggggttttttcatttttatacttcaaaacagttt

SEQ ID NO: 164859 - DNA, 3140 bp, Cannabis sativa
agcatggttgatgatttcagtagagtagtgtggatacatctattgaaaagcaaggatgaggcaatgcctacttttgacacttggaaaaggctgctggaaaatcaaacaggatgcaaactcaaggtattgaggacagataatggccttgagtttcgctcaaatgagtttaatgaattgtgtaacaagttggggatccaaagacatagaatagtgatcaaaacacctcagcaaaatggagttgctgagagaatgaacagaactctgcttgaaagggtaagatgcatgttactgagtgctggaatggatgtcattttggggagaagccatcaagactgcatgctatctaatcaatagatctccctcagaacctaacaactttaaaactcctcaagaaatgttgacaggtaaagctcctaacctagatcatttaagagtctatatatggttgtactgcctttatgcatattaagcaggacaaactccaacctagagcattaagatgcatgtttgtgggataccctgaaggggttaaaggttacacgttatggtgtctagaacctggatttaagaaatgcatgattagtagggatgtagtgttcaaggaagatgaaatgggcctcaagtcagtaagcaactctaagaattgtgagactacatcagataagaatgtacagtttgaggtggagcctcaatctgcaccaacacctgcaatccaaagtgaaattgagacaacaagaggtgatgaaagaggaagccagtattatctaagtgagtatctgttagcaagagacagagaaagaagacaaaccaaagcccctggcagatttggatatgctgagttcattgcttttgcacttatggttgctgaagagatagatagttcagaaccattaagcttcttagaagccatgaggagtaaagatgttgcagcttggctggaagcaactcatgaagtgatgcattcacttagagagaacaaaacctgggtagttgtaaagaaaccagaagggtacaaaccagttgggtgcaaatggttattaaagcataaagaaggatcagaaaatgaacctccaaggttcaaggcaaggttggtagcaaaagggtttactcaaaaggagggtggggactacacatagattttctcaccagttgtcaaacaagcttcaataagagcaatggtggcaaaggctgcaagtatgggtctagaaattgaacaaatggatgtgagaacaggtttcttgcatggagaattagaagaagaaatctatatgcaacaacctgaggggtttgaaaatggtaatcctgatgatgtttgcctactcaagaaatctctatatggcctcaaacaagcacctaggcaatggaatttaaggtttgacacctacatgcagagcattagatatatcaaaagtaagtatgactcttgtgtatacttcaataatcaaacatatctactgctctatgttgatgacatactgattttcagtaagtcaaaatcagaaattggtaaactcaaaagaaaactcagtgaggagtttgaaatgaaggacctaggcaaggctaagagaattctaggcatagacattaagagacccccaataggagtgattgttctgtctcaagcctcctatctacaaaaggttctttccaaatttggtatgtctaagagtaaaccagtagctacaccaattgcacagtatttcaaactatctgctgcacaatcacccaaaacagatgttgaaagagaaaaaatgagtaagattccttatgctagttgtgtagggagtcatgtactctgtggtttgttcaagaccagatttagctcatgccatgagcatggtaagcaggtatatctcagatcttggttcagattattgggaagcacttaaatggaccatgagatacctgcaaggtacactgaatacatgaattgtattctgtaaagacagtcagtttcaagaagaaataattggctatgttgactcagattttgcagctaacctagacactagaagaagcttaactggatttgtattcaatgctctatgaggctgcatcaattggaagtctaatctacgaaaagttgttgctctatcttcaacagaagctaaatatatggttgcaactgaggccattaaagaagctatatggttaagaggtttaacagaagaactaggcttcaaatctgaggacattacagtctattgtgacaatcaaagtgctttgcacctcatgaaaaatctaatgtttcatgagaggtcaaagcacattgatatcaaacttcactttattagagacattgtgtcatctaaacaggttcaagttaagaagataagcactcatgacaacccaactgatatcttcactaagagtgtcacaagaaataagttcctacattgcttgaacctactcaacatcagaagttcataagcttcatctctgtcattagctctttggaacaaaccaggtggatttgttgtatgatttgtcccaataagctaatgccacttcatcattctaacctactcttggcattggttagctagttaagttagttatctaacttgacacctaagaaaatctaatgacttgttaaaaccaatgtctataaaaggaagcaccaagacttcattcaaaggggtccaatccaagccactctcacctagaattctttctctctaatttctgttcaagatttgtgagtgtttaggagggttgtaaatgtagaattgctcatcgttagaggtgtcttctactatgtgaggtttgctttgtaatgtgttcaacacttagactcaattgagtactttgctcggattgtaaaagtgcttgatgttggaataaagttccatttaattcaaagctaagtctatttaatctttcattgtttgattctattttgtgtactggtttggagttgtttttgattacttattatgttaatggttgttcttgttgttttggcactatttttggccaacaattaagggtgattttcaccacaatatacaaaaatatttttattgtggaaaaataccataataaatataagagtaatttgcggcataaatacctaaattttatgccgagtaatagataaatacctaagtcatatttttggcggtaaaaatcccttccgt

SEQ ID NO: 164860 - DNA, 2531 bp, Cannabis sativa
  modified_base (1221)..(1221): a, c, t, g, unknown or other
aggccatcctatcttgacttcaaccaatttttgggaggggctgctattatctttgaaaacatatggagagagcggaatgggcgaattcatgatagaaaatccaaccccattgtcgtctcaatcaactccatcaacaatagactccgagaacttatgctacctattgattccgtccacgacaatccttcagagtggcagccccccctgagggttgggtggcttgcaattcagacgtggctatagggcagaatcaatcgtcgggagctgctgtttttcgagacagtgggggaaacatcctctgaattgcatcctttcgcctgaaccactgcgatcctctgccgggagaggttgcagctgtgtgtgaaagtgcagtattggcagtggagcttggatacaataacatagtgtttcaatgtgattccttaaatgcagtagctgctttgaaaaccgaatctcaggacatccacaacctgcaattcaacattcaagactatgttcacaagttcctctcttttgcaggtaagttaaatctctgagagatcgtttgggcccctagagcctgcaacggtgtagcccattccgtggctcaatgggcaaatcgaattaacaagtttgggtttatcgatttggccaattttggtgactccctacagctgtttaatgcagatggtcatggatccgtttagttagtttagttgcttattttagtttgtttttttcagtctttttttctagttattttcttttcagtttgttggttggccgtttgtggcctttgtctctttgcttgttttctggttgtctgcgggtgtgtttcccttattaaacactaatcaaaaaaaaaaaaaaaagaagtggctgggcagattgctcattggagattggttgaaatggattcaaagatacacgtgtcaaagtttcgtagagaagcttttgtagattgtcactacaaaaaaatagctaattttagtgacaatttaatttttagtagtcataacataattttttttttgggctaaatgtgacttttacttcacaataaaaaattacttgtcactaataatatttaaatacaagttgtcactattatgactaaaaacacatttagttacaataaattatgatttttgtgactaatacttttagtcacagactttttagttacaacataggaataataatttataattagtcacaatttattttacttttagtcacaanttttattatgactaaaagtaaaatttttatctggtgcgttaattattattcataaaaaaaagtaagatttttgataatgtgtattgatgtataatatttgggaggttaggattgtatgttttgtgggacaatatttagagttaatcctacattattgttaatgtgtggaaataaattatcataatatataaaatgaatatactttattaccaattaattttaaaatggaactttatatattgtaaaggttgtagtcaaaaacataaaaagatatgtttttaggttttttttttttttttttttatatatattttaaaagtgagaaattagtatgattgatagagagtagtttaaaactttaagtgaaatctgagtttggtgtcctgtaaattgtaaatagtaatttttgtacaatataattcaattatttacatatatttagtcacaaattttattgttgtagtaatattttttatagtaatcgggcataattattatccaatgtataatacttttaagttttatgcatttaattttatttttgaattcgaaattaaagaaatgaaatcctacctgtctaatattatattgagaagaaaatgtatacacgggtgatgggtccattgacttcactatctctccctctatttctaataataggatgaaagaaatattgaaaaaccaaatttagttgtgggaaggaagaagaagaggagatttattgtccaataagtcctaccctattcaacctcatttgtgtgcttaattaattttaaattgggacccgttattttaaaaagaaatgccacattaatattttggtattgaatgcacatattattatactcaaattatatttagataaaagcatcgatcctattattatgagcatttgacaagtgaaaaagttttattatataagggtgtataacattgaggcatctctaccaggagcatgattcttacaaatttttgaaaaatctagataacctacaatgtccaaaatagtattaaaatagtcaccatatcattttatttaaaagtactttttgattgagagaccaatctcgcattatggacttttcacattcagttaaattttaatcgccacaatattttgtacgcggtattaggtttttttatttagacttacattaatttttattaattttattaaaacttgaattgattggatagttttttgatgtgttaacctatattgttggtgatgaatagttaatgggcttagcatttctgtgtaaagtctaaatgaagcacaagtgtgggcttttctagttaactgaagcctt

SEQ ID NO: 164861 - DNA, 1061 bp, Cannabis sativa
  modified_base (1019)..(1022): a, c, t, g, unknown or other
aaaaaaaaactaattaagatttttttctatccagaactttgacatgtactaaatcatcttcgttaaaaataccccatgaactattgagattgttgaatttaaggacttttattcaattttagtaaaaaaaattctaacatggatgaaagtttaaggagcatgatttagtacatgtcaaatttcgagtggcatgatttggtagatatcaaaatctagagagcatgatttagtacataaacaatcacttaaatagtaaaattaaatgacattagacaaaaattcttaaatcaaacaatctcaatagtttaggggattttttaacagccaaaagggacataatttagtacatgttaaaatttagggaataaaaatcataattaaccaaaatatatatatatatatacaagtgttgagcgtgataattttaattagttcacacaatattaattatttaaatattataaaaattattaaaatcacttaaaaaataaaaaataaataaaattaaaattgtatttataatacataaaaaaaatcctccttttttcttcctttttttttaatgttcaacaacagtcaccacattcaccccacaaccaccactgttatcaccataactaccacaccagtaccatgcattacaccatcaccgtctcacaaaaggatggaacagtttgaccgggtttaacccgaacccaaccaatcctctcagacccaacccgatcaaacccgtaaaatttaaaaaatccgttctattcgggcaggtcgggtccaacccgatacactttcaggtaagttagcgggttgattttttatgaccattaattggatttcaagttggacccgaacccaccggccaacccgaccaatttttgtttttatacatatatattatataaggatatttttattaatatatggaatattggcggctaaaccacttgaactttaaattttttaacacttaaccacaaaaataatttttttaggggcaaaactaggggtgttcatcaaaccgnnnnaaccgcccgcaccgcaccacaccgcaaaaaaaatacggt

SEQ ID NO: 164862 - DNA, 1096 bp, Cannabis sativa
ttttataataaattaataaaaatcattaaaaagttaaggatattaatagtcttctctttctaaataatgagttatgtgtgtctatgaactactacagtttatttaactaaaacatattattaaattgcgggctttgggttagattaaaataatatactagaaataaattgttttattattggttagcagtaatattcttttaaccaatttgtaacttgtaagtagtaagttgaaaataaattagatataaagttgtaaatttctatttgccattaaaaagattaaatatgataaaattgtcttaggctatttcaatagaaataagttatattagaagaatatttaggttgttttgggattattattaaaaaaaaaaatactcacttttaattcatgataaaattaaaaactatttaaattctttcaaatccattcatgttctacaaatttatccattgagtgcatagaaaaagagaaatgtacctctcacattgttactagagtttaatttcatagtctagtaattaggtgggtgtgggtggtgttcggtaatatttttattttttaattttttaatcataaaaataaaaataaaatttatttttaataacaaaaatgtgttctataaccacttttattttttaattttaaaaacagaaaataaaattgtgttctataacttttattttcatttttattttatgattttatttaagtcgggtccacgtctgggtctggagctgtggttcgagtcctgaactgaggccgaggttgatccgggtcccaaggtctaggagtccaaaatattgattaagaaataaaaaatgtttacaaaaattttaaaagtgattttttttgttttcaaattttttaaaatatggagtcggggtcccaaggtcctagtaaaattccttattcatatggagaaggtataatcatgtaaggatgtacaagagaattaaaattataaaatatgaataaaactagcaagtagtgtattaaagtatggtttgctatacactatactctagtgtgtgtgattttgatttggatcacatatgtggatagacatgtagtaaagatattgtgtataatt

SEQ ID NO: 164863 - DNA, 1125 bp, Cannabis sativa
attcttctcttggaggggagttgcattctacattcgcgtatttccgcctcttccccgtttcggatggccttttggactttaacttggttgcaaagaacaggatccttccctagtctcttctgcaatacccaatcttggaaccatttagctaatggggtggtgaatgtggatttttctttggcatcatttcttagccaggttccatacaatggatagaagtttcctaggctgtctttgaccacagtaggagctttaaaacaagaactctgttcatgtgaaagcacaccacatttgaagcagagtttcgggagtttctcgtatttgtattggatccaaagatccttaagtttttgtctccgaagaaaaaagccgcagaagatgggtttgttgatgtcaatggttgctctgaaccttaggttgctcattccaatagcatcctctattcctgcaggcagttcgtggacaggtgaggctttggcggccatctcctggaggttggacaggttccaatagaagggtggaatactctccaccgtaacccacatcggcgttttatcgaaccggacctcagctggtgtgagccaagcgggccagggcattagcaccatgagggcaccacatacgaaccagggtctgcgggcaaggacattcattgcatcctcccttctggcgaaagtaaattggagaaggccctcctctatttccttccatttccagcctttaacggctttccaagaaaggttcaatgagccctgtatcgcagcttttccgaacttatatctgttgattatcctccctaagagtacttggtttgtttcttgtggttcatcaacctctcccggattgagggtgaaggtaatgtcgttgggagatagttgtatagagtcttcaaagaggtcactgattcctgaggaatccattacgttgatagtgaaaatcaggacagtggtggtatagaacagagcaaatctctatgaacttccaggaagtgagctcctacagagcatgagtatcccttcgcattaaatacggttaattgagtgtatgaacactcagttataagtaagatatatgattgtattatgtatatttttcttactaaatttatcgacttacagttgcttc

SEQ ID NO: 164864 - DNA, 1934 bp, Cannabis sativa
tacataccttgagagcatcacaaactgcattatgctctttaacaaagagggcttgcaaagttgagagtccactccaaatgtttgttacatctcctgagataggaataccatcttggtcatggagaagaagcccgtcttctccaatcttaagtttcccatctttgaaactccttacttgttgcaatttttcattgttacttccgtatacaacacttccatcccttttgtttacatacatatataaaatattatgtatcttcctactctaaatcaaaaattcaatctaaataacaaaataataatatatgtacttaattagtacttaccaccaaggtgtacgagtgttgattgaaccactcttaatatcattagaaccactagtgatggaaatttcctttgtcttgaggaacttgaaagacttcagcgggcactcactcgccacttctgctggtgcaaacagctccacctaattattgcaatcataattaataatattcgatcctttaaataaaattaagtagactagtggccggctttacacctctcctcataaaaattagagatcccacatgcaaatttgaatcttcccaccccaataaatatttatatctataaagtcctcaatcaatttctcttttaatttggtccttaattaaattttttatttatttctttacaatttttttttttaattttttcacagaaatataatatacaatttataattgaaaaaggttatttaagtaatttaattaattttttatactattgagacgagaagggtattaaatatgaaaagttttatttatactctataaaattataagttcacccgaatcttagaaaaataattaagttaattctaataacccattcttaacaaaaattttattttgtgttaatttcaataattcttttaatatttgtatataatttttattttatttatatgtattttttaaaaaaacaattagtataaatttaatataaaaatgaattattaaaataaagtatctttataaaattttggtatgcaaataaaacttcctatatttgcactctatttattaaaatttaattaagttatattttttaacactgcttctatgtttttctagaaagattctataattttaatttgtcttagtttttttttttttaatcctgttcccatttagtaaattttttataaattttttaatttaataagagcttttcttcaaaaaagaaattatctctaaattatcaaattaatatatttaatttgtgtgtatatttttttaaaaaaaaaacaagaaaaaaagaaaaataattgaaaataatatgagaaggaatatatgttatacaaaatttttagggtgtaccaattaataaattttaggatatatattatacgtttggaactttatttagcatttaattttaaaaaatgacttcaccatctaattttaacttttaataatattttgcttttttttagagaatattttgccatgtttgaatatcttttattttggcataacttttgatgatgatctttcttttttctttttgttaaactttaaaaataatttctacccatatcgttactcgttactcggatgaccttaaaagaattacaattataatctaactcttcaatgtgaacatttcaagatatgtaaattataaattttttcgctattaattacgaaaaaaaaaccatttactaatatataataaagttaaataattttttcaaatcttagttatcatttatttaagaatttttttaattgaatatattataggatgattctacaatgcaccttttaaaagggatgcactgatgcaccttctacttatttcggcatcaaacaacaaattagtctaattttttttcatattcatgtatgttatagctatttaagatatcctacaaaattttgagaaat

SEQ ID NO: 164865 - DNA, 1198 bp, Cannabis sativa
ctaattaaataaatatttgtaagataactataaatttttgatcataaactatatcaacaaattattttttaaaaaataaagagagtgcaaatgaagatgcacattacaatgctataaaatttttgataaattttgaacaatttcttatactaaaaatataatttatctttatatatttatactattaaagtaaaaaaaaactatcactaattaattaatatattaatgtaattttttatttttaggtgcaccacaaaatttttcaatatataattagggtctatataggtacaccacataattttccaatatatatataattaagttttatatatatatatatatagggtgatatatatatagggtccacaaatgagtatactcgcatcttcattatattttatataagtatgattttatttttataaatggtgatctattgtatgcttatttaaaatattatgtaattattattttttaaaagaaatttagagtaatttatatttttagaaataagatttaaataaactattttacagaagtattaaaaacagcaagtagaactgtaacaatatcatgtctttggcgctaaatttatttagaattaatatatgtagaagctaaatagctaaagtgtgcattgtcttataaaaataatagaataataactatttatgtgctgaaaacacgatatagatatatattgtacaattattttttggggtgtatttttaattttttttatatatttatatatatattttagtggggatatgattctcatcttacaaatagttaacagtgagaattaatatttaattaattataataatagcgatataatatcttgtagtaatattgaatataagtagtattttttttctcaatattcatataatcatgaatattttgctccacgtgggtagaacgtataactttcactagttccaaaacaaagatagaaaaaaaaaagcattcatgaaaataatgaagatgatttttccttatagaaggctgatcaactcttagtacatttagtagataatatatataaatatagggtttatctactgtaagaccacttatttttaccttatgctatgggaaagttttgtggcccaattacaataaatttacttgatgccacatgttatgattgtgcatctgtatgcatgtgattttttattttattttttta

SEQ ID NO: 164866 - DNA, 2280 bp, Cannabis sativa
ttgaatacttatgccagtatttaccctaaatttaaatattagtgaaatgattttaaataataacgataacatgacattgtagcttcaagtatagttatatataaatatatattaaaagaaattaaaaaaatcttaaaaaatatataaattttctatgaaattataaaattctttaagtttatgtaatttttaatgagtaatttgcggcataaatacctaagtttaactttcagttgcaaataaatacctaagtttaatttttggcattaataatacttaagttatatttctagaactctgtaggtacctaaccgttaaatattaagtcattatatccatgtgtcatttttttattggtatatttgaactaatttttttaataataaaaattcaatgatttggatcaatcagggattgccacgtggcaatttatttaactaggtacctacaaaaattttaaaattataacttagatattattaccgtcaaaaattaaacttaggatatttatgacgtaaattacttatttttaattgttataaaaactatgcgaagcgtagtatcatttcttagtatatatatatttagattcttacatatgttatgttttttagagaatattttttaaatgctacattattaataaataataaaaagatcaataatttaatagaaaaagatagtagtagaagaaatttataaaggaccccacatcacttccttaagtttgtgctgtagatagattgaaagatagataggaatattgttcagcttcattaccatcaaatgattacatatacataatacattgtctttatttttttttttaatgggagaaggtaaaaaaataataatgtccttttgtgattattatatatattatttataaattattatgataatgggagaaggttattatttattatattattattataaaattcttgtgacccttttgtggttggtttaagaattatgatgagaagagttgtctaacattcattggtgaaacaaaagtagtgtcaccatcaagataatggtttgctaagatgacattagaagcctcagaaggatgaaatttatcccaaaacacatatttggatctgtccaaacacacttttgatagaggaacacatgaaattagatctcctaaccttccgggaaggtagcagcaagaagagtttcgatattcaaaacctatttttaaaaaacaaaagaaaaaaaaatcataaagcatgaacacacatcaaaaaatgttgagaaaaaaataatattaaaacataccatattttatgtagttgtcaaggatatcttctagagcatggtaagtatccccatacacaaactttgaccctttgagattgagattgagctttgcaacaaggcttctcaattgggcattgaatgactgagctagctcattagggaatgctacacaattatctcttactttgggattaatatctctctccaatggcatgcacccaataggtcccacattagccatacaatcttcctagctcccaagttgtatagtctctacaatatgtgacaaatataaccaagttataatggttcaaagtttaaatgtgatgaaaataagaaaatggctatttttttatgttacattaagttgttgactcaattttgaaatcatagatcccacaaacttgtctggagacaccaacttctgtttagaaaaagagggacgtggtgtcacgtaactattgaggtcatttgccccaattgtaattgagaagagagatttttcaaacaatttcatggtagctggaagaccaatttgggagataatgtcttgctttgtatttgcaaagttatcaatctgtgcatcaaaatttattcttcctccctataaatcaaatttgaatcatccaattattgagacaaaataataataataattaaaaaaaaaaacttgtaaaacttactaaaaaacacaacacttgattgttgaacaatcaacaacaaatttgtaaaacttacaaacattattccagtttcattaagtattccacttccaccagaagcgtaatttacaccatcaagaattattggtccagaagtagtgggagctaagtaaggtggagaaaaatgcttgaaacccaattcttgacctattaaaacaaaatcaaaatcttaaatatgaggagaaacacaaaaagagcaaactaacaaaagcttaaaaaaaaaaagaaacttgcctataatgtcaatgtatgttcttccatttgtgtatctaccacttggtgaaccgaaatc

SEQ ID NO: 164867 - DNA, 1012 bp, Cannabis sativa
cattgtttttatatataatataacaccaatattgatccacagataattgaccaagcatagagagatggcttcatacagttgttatttcacaaaagttttggtactactattcttgattatgagctattttatatctctaacaagttgtaaatcttcaacttcaaggttaccacacaacactataacagaagaagatttagtttctgccacgtgtaagaaaaccctttactttcaactttgtgtatcttccttaagatcagaccctcaaagtcaaacctcggatctaagaggtcttgctgtcattgctttgaatctcagcatagaaaatggagtcaaagccctttcttacatcaataatctaatgtctgaggctgcttataaaggctctcaattagcgtccactggtctcagtgactgtgtagatgtgtactctgatgccatccaaaatctacaggactctgttcaagctctaaacgacatgtcgtttgatactgtgcagtcttttgtgtctgctgcaatgacagattctgagacttgtgaagatggtttcaaggaggtgaatggcttcagttctcctctcactgaacaaaaccaccatttctctcagctctgtagcaacttcttagcgattactactcttcttcattgaattttatacaaatgtagtttttctctcttggtttttctttatctactttgtttaatttaaatttaattttagtttattttattttatttttcgttttgagtttagtcgtaatctaaagtaatataaataatttataaaagaaaaaaacaaaatcaagaggccattaatttaaaaaatatttggtgaaaaaaataaatcttgaagctcattatatattattatatcgtctcatagctaattaaccaatttattaggagggatgataactcacaagatgatgaaaagttttgaaagtatggtggcttttggtaatatttttttaattagttttctgtttttaaaattgaaaaagtaaaaatattt

SEQ ID NO: 164868 - DNA, 906 bp, Cannabis sativa
  modified_base (864)..(880): a, c, t, g, unknown or other
ttaatttccccttgctcgatccattggtgaatcagattctttttcacaaaagaaaaaaatgtgactcagattgttttattccaacttattcagtaaacaacagtgacatccaatagtagatcatataagtaatgttagtgaattatatattggttaagaaaactatatttatttagtacccattaatgagtaatatccattaaaaattattttgtgtatatatatattttttcctttagtgtcgctttacaaccgaaactaattggtagcatttttcgaaaaaaaaaaaaatcattaaagatagtcttaagtaattccaaaattaccaaactttagaacaactcattaacatcctgttcaattttataaaatataacgacggtaaaatgaagatttttcatctttaaaaacttgttaaaatacataaaaaaaatattccaaggcattctagtacaattctcataaaaaattatcaattttaccgccaatacaaaataaaaatgcctacagtgaactcaatacaagcaaattaattccaaaaatataatagctaaatacagataattattaaacaaaaaaaatccatcgtaataaaaattataccgaaataggcataatcctccactatagtggtttcccaaactctggagtttggatctccaccgtgcacaatggctgtctctaattaaaaatgatgcatggagacatgaagctcgggatctagaagcccacgacgagtggaactcgtttctgccactctttgacttaacataactcaaaggtggctcaatcggagccgtggaacttcagctctgacgagctccaccaagacagcagaaatgtgttggattttatgccctaaannnnnnnnnnnnnnnnntaatcagatttgcttattaatataga

SEQ ID NO: 164869 - DNA, 2400 bp, Cannabis sativa
ccacatgattcaattgctgccacagttaacaaacattccatgacaaccagaggaaaatcaattattcgaaaacccaaagttcttacggcttctctaacccctgcatttgtcaaaagtgctttaaaagatcccaaatgcatgatttgtggcaatgtctgatgaaaataatgctttaaaaaaaacctatacacaagtcaatctaccgtcaaatagagaacccataggctgtaaatgggtgtttcgagttaaagagaataaagatgggacagttgactggttaaaggcaagattagtagcaaaagagtttcatcaacaagttggcttttactttcataaaaattttagccaagtgattaaaccagtaacaattcgtgttgttctcaccatagctctttccataggatggttagtaagacaattagatattaataatgcattccttaatggtgatcttcatgaagacatttacatgatgcagccaccaagatttgttgatcatgagcatcccaacaaagtttgcaagttatacaaatttatctatggtctcaaacaagctccaagggcttgatttgagaaattatctacagtcttactacaacttggtttcacttcagcaaaaatcattccttcacaccaactagtgtcatatacattctcatctatgttaatgacattctcataactagcaatgacaatcaacaagtctcaaacttaatcaaagccctcagttccaaaattgctttgaaagatcttgggatcatgaatttttttcttggcattcagttcattcacacaacacaaggcattattctgtctcaacaaaagtacatacaggatcttctttgcaaagctgaattgttgggagtcaaaactcaaaattctcctatgactattggtttgagattatctaactatggcaatgaccctatcactgatgctactgcttgcaggtccttggttggtgctcttcaatataccactataactagacctgacattgccttcagtgtgaacaaagtctgctgatttaagaagaatcctttgcaatatcaccttgctgcagtaaagaggatcttaaggtatcttgcaggcacactagattatggtcttcacttaaattctgctgatttaacctgtgctcttcttctttgcatcttaaagctttttgtgatgcaaattagactgctaatcgagatgatcatcgcttaaccatacattactgcatcttctttggtggaatcctcctctgttggcaatccaaaaagcaagctaccatctccatatacagaggctaaataccgcagtttggttgttgttgtcactgagttaagttggatccaaccattgctctcctccactcctcctttgatctggtgtgataatttaagtactgtgcacctgtctgccaatcctatcttgcatgctcgcacaaagcatatagaaattaatcttcactatgttcgagacaaggctctgtccaaacaaatcattgttcaacatgtttctactgagcatcaaattgcagattccttaactaaaccaatctccagttccaggttctattttcttcgagataaacttggtgtggtttgctcaaccaccttataagtttgaagggagttgttaagggtaagcttcagttgtttgttagtgtttgttattttctgttagcttagttagttctgttgtaactaactttcagttagttttatttcctgcacgtgtgcttattgtactgtatataagaagttttgtcttctcctttggtcaatcaatgaaacaattcctctttcttgcttacttgcttcgttcttatctttctttgagagttaacaccccctcctcaattttgtttttttcataaatattttttacaatttagtatctttataatgaatttttttaaattacattatttaatatttataaattttttgtgattttttttttatatatgtttatgtccttgatgaataaaagctttgggcgtgtcactggtctttagtaccatggaaccaaatcaaggttgagttgctgtgcgagtttttgtgtgagacaatgcgcatatatatttcagagaaattatacgagtacttaattaaaatagagaatattcaaagaaagtaatataaaatatatgaccgtatgtaaataatataaaatagacttagaaaaatatagtagttcaacatgaattccatttacctatagtttatttttgaacaaagcctaacaagcctgaccttgggctaagtgggctaggccttggccgaaatatataaagggattatttcacaaaaatataaaagcaacaaaaaattacaaaaatacgatttcacagaattttaaacatttttacaatttttttgattttatttatagaaaatacggtctttttat

SEQ ID NO: 164870 - DNA, 1323 bp, Cannabis sativa
atatctttggggaggtgatctagacttggagcatcttcgaaatcaagaacgtttaagaacttcaaatttgtgaagattttacgtacgtgatgattaagaattttctctttatcaaagataaaaatggagcgcacctgagaaatcatcgaaacattactcttaataacatcataaccgccattgacaattgaaatgcgtcgagtttctcctttgaaccttgaatcatttggtgacaaaacttgacaaaaattcaactcctccatcttcttgaggacaatctcacgtagaagatcatgaattcgacatgttctaacttttccatcaaaatttacttctgacacttgaatgagatttctttttatcaaatctaccaagtattcgtttgcaatcacctctaacgttttatccttttgtgatttcacaaacccttcggcaatccattggcgaattaatcttccacacctgattgagtagtcttctggaaaatatcccaaatacaagaaacacgatttaagatagtaaggcaaatcattgaagctgagggaaagaacctttgttatgctttctagatgttcattactttgtaactctgaacttagagttgtaagtagttttctccactcactaattgtcttgctttttgttgataaaagaccagctatgacaacaatagcaagtggtaatccttgacatctttcaacaatctcacgcgacaagttacctaactcgggtggacaacaaccgtagttgagttcatcgcgaaaagcccttttgcaaaaaagttcccatgacttctctggaaggaggcgctgtagataatggatatgaacacatgatgatactttacaaaagtttgcaacttcagcatatctcgttgtgataattactcttctgttattttctttgccatcatctggtaaaacaatttgtatatcaccccaaaatgttggctcccaaacatcatcaaaaatcacaaggtaactcttttcacataagtaatctctaatctttgttgtcaatatgctttcttccattgcatcaagtgctttgggaacacattcttctctcgactcgtagaatttcttcactagaattcgcagtatctccgcccttttgtatgtttgagaaacttcaatccaagcataacaatcaaaactattttttgtatgaacaaacacttgattagcaagagtggtcttgccaagtcctcccatccctaacaaagagattacggttcgcgttggggatccatcttcaacctttctgatcaattcatctctagaagattcaatgcccacaagatcactttccttaataaagcat

SEQ ID NO: 164871 - DNA, 1098 bp, Cannabis sativa
ttcaccaagaaaattcctacaaatagtataataaataattaaataaataaagaccaattaaattttagatatattttaataataaataattataatatggagtttaaatttaaataataaaaatttaaattataagtaaggctaattatgaagtctctcactacaagtttacaaatgagagatcgattctcaattggtaaatgacactataaaagcaaggatactaatttttgtagaagagtattgatatatggtcactagtggtatttaatatttctagacatattgttttgtgattgattaatgatattttctaaaaattattacattaaactgtatagaatctgatacttaggtaaactaatagtgatattaatatataagatggtgctagtaattactagtatattttagcatttgtcttgaaaacctactaatttgaagttgctattgtactgttttacattaaattaattgttaaagtagttgtactatttgattgtaattgacattggtgttcttcttattatcattgttttaacgctcaaatgcgattttcattagcggcagtcatagtataaattaggcggtcgatttcacggataggtgattttagacaaaagcattagtacaaaaaataaacagtaaagtttaataaaaagtaacaaataaataacctaataagtttgaaattttttattttaatatttaatattaaaagaaaacaaataaagtgtgtaatcaatggtaaagaggtaaatgctttaagaatcttagctattttgtacctttgattcatgaagttgacacaaataatataacaataaaattcattatattttgagtatacaagttcttgaaaataaaataaatgacttaattttatgtagaacctaaaaatgacattatacatcaagcaataatgtaataaaagactacacaaacatcaatattattcttgataaaaaaaaaaaacatcaatattatttttactaaatagtaacaaatagaaatagcatgactaatcttatatatttttagtaaaaataatgacaaagagatagagatggagatggtggtgatagtgaagaaaatgaa

SEQ ID NO: 164872 - DNA, 780 bp, Cannabis sativa
cggcaaacccccggcgactctagcacagttcagtctccaccacggccacaatgccgcactttcgtcttacggagtgagcctcgtcgacggttataacgtgggaatgaccattacgccccacgagggaagaggggtttgccctgttgtgggttgccgtgctgatctgctcgcctcgtgtcccgaaccgttgaagctaaagtcacatgcgggtcatgttgtaggatgtaaaagtgcctgtgaggctttcaatacagacgagttttgttgtaggaaccattacaatagtccccagacgtgtagggcttcgcactattctcagttctttaagcattcttgcccagccacgtttacttacgctcatgatagcccttctctcatgcacgattgctcttcgccacgtgagcttaaggtcattttctgtcattagctaagtagaggtagaggataatgtgcttggttggttgtcccaacttcaaacccctttttattttaaaataaaatttggaaatattttaaagtaacaaaaaaaatggaaatatggggttgcagtttgtagttttattatgatggtttggtaatatcttgggtttcttttttaggatgtgtagggaaaatgggaaatttgaaatgaaacttgtctaatgttctgttgtgcatggataaatgtaattgcttattcccttttctttgttttaatgtttattttgtagttaaatgcagtggcggacccagaatttaaagtgaggggggcataaataaatttaaaaagaaaatataaag

SEQ ID NO: 164873 - DNA, 1035 bp, Cannabis sativa
aaaaatttgctcattttcttaaatttatcctcaatcgcaatttcctcatatccaaacaaaaatagcgttacagtatttttactcataagctcatagtattagattgtaaatgattttaattttaaatttgaaattcgggcatgattttaaatagctatctagatcatggaaaatttctaaattacatctaaaacaacgcataatttgatactggaccataataatttcgacgggtttttgagtttgaagtttgaattttaacagcaaatccaattgaaaatttgaaattgtgtaaatgcatataaaaaaaaaataaaccctgtttcaaaatctacaaaattcaataattcaaacacattattataataacaacaaataccaaataaacctagcaaaacccaaagatcagaacgaaccggtcgcgcgaactcgatcttaatgggattcccacgaagaagtgtcccttgcagagcgtccttggcagccttagcgtcctccatgcgcttaaaaaacagaaacgcatagctccgtgccgagtatgatgtgacgctgtcgagcgctccgtactgagcaaaaaggtccatgagatcggagtcggtgacatcgctagccaagttccctacccaaagattattagaggggttctcggaatcatcctgcttactcgatttcatcggaggcgccattagcaaccaaaacctaggtaataaaaagatgtggctaacaattagggttagggttttggagaattaggagtatgagacaggcaaaatcataataaggaaagagatgggtcgaggatattgtggggtactcagtgtgagagagagagagagagagaggaggaggaggagaacgtccgttattcgtgaatctgttttttttttttcttttcttttgagcggtttagagcatctacaaggagctcatcaaatttggttttacactatcaccaaatttggtatcaaaaattatttctactccaaccacaacaccaaaaattacactaaaaaaaatatttcttattattatatt

SEQ ID NO: 164874 - DNA, 1192 bp, Cannabis sativa
  modified_base (1151)..(1153): a, c, t, g, unknown or other
gtttggaatgtgtcaataatttcccggtaaagtttgtctttctgtcttatataactttcaattatttatgctgtatgcatgtgtcatttacatgtatgtgcctctctttcttgcgcaatttaatttagactcatcaggacttccatcattacatgaccaccgcatcatggtgataataataatattttagtcaggtgccatatcatattctcctaattaggtatcatatggagtattatgatgttaacatatgatattggcaatatgttacagaaatatgcaagatattgcaactgtatgattaagctccatcatgtttctatgcaatgttttttaatttcattttcggttttagataaagtgctgtttactagtgctaatatgtattgccatacatgataatcctttcgcctatgtatcttaaggcacatttgacttagttccagcttcataatggtaaattgtaacagtttgtttaatactgttatgtaaggcaaacagttaccttagtgaagacttgttttttgatgcatgatatttagtgcatcatatgcatcttttgtctaagatagatggtaaatatgtgagccatctaatgttgtttattggttcaaaatgtgctcagttttatctccagttataatttgtaggtttttaatacatctagttcctgaggtgctttctattttgacagcaaagaagagtagtagggtgtatgaattgtgggctggggaaatgtgataatctcgtgatagctattgaaatttttccagtcttccttctggttggaatattaagtattacaatacaattgttaccaaagtgctttcttgttgtcctgaacttttttggtcctcatttgtcccccataaatagaaaatttgacaaagagcacaattttatatctcattttgtggtagtggaagtgatatcttatgctttgattgtacttcacattatggaaagaaatataatattagctcctcatcaatttgagcaaatgtttgttaggcttgatgcacgagaagaatcaaaaccatgaacaataattgagcatacaaatgaataggtatgattatgaaggactgcttaattttttctaagtaaccatacccgccaaagaaagaaaaaaaatatattattattattannnttattattattattattcttttaattattattattttaa

SEQ ID NO: 164875 - DNA, 2000 bp, Cannabis sativa
cacttaaaacctaaaaatttctcactaagagaagactcatctactcagtccaacaaaataagctccactaatgaacactgaagccatacaaatatcccctgaaaaaaaaaaaaaaaccttataaatacaacatcaacgtatatattaaagtcatacacaaatctagcacaaaaatcaacatcctaaccctactcctttaattcaaacccatcaatctacaaatacatattaattatacaagatcagtcataaataaataaaagagaaaaaaaaaaggaaataaaaatcaagaggaccagtataatttagatctatccaacaaacaaagttcactaaaaaatttcagatctaaatataccccataatcttaatgtatcaacccatctttttcttttcggtacaataaaaaatccatgtcgagatttctcctcaacctcctctgttgctagaggccaagtcctttgccgtgattttttctccaaatcgatactggaacgtaaagtcatcgttatgggtaccgttggtggtttcggccaaccactctccctccccacgaagcttaaccctctagtctcgagcctctttctatgatattgttgccactgttgctgttgccgcccatgtcagccatacaaacaccagatctcgttaccaactctaatgagcaaacaaaaacccatctcgcacaatcctaaaatttttattcacgatagaccttttgcacagcaaaaaaaggcaaaatgcgctgcaacccaccggagacaactcagaatttcacatttgaggacccatcgagacaaatgatgtgatcggggtagatctaggctgaagatggggaaggaaaaggaagaaaaaaaggggtgggtgcatctgagttaacgatagggttttttaatttaggtttagtttattttttaattcagttttctaaatcttgtattttattaatttatatttttatttcattaaaaaaattacgtttttatttaaattaagtttttactaatttttttaatctttaaattatttctaaaaaaattaaataaaaaataaataaataaatgatgtggactaataaaatattaacacgtgtgtagtgacctgacacttaacggccaggtacctacagaagttccaagacccaaacataaggtatttttactgccaaaatttttacttaggtattatctacaattggaagataaccttaggtatttataccgcaaattactctaacatttacccccaagctttggaaacttaagggttttcagaggcttgtattcaatcttccagatggcatgagggcatgtggacgttaaaaaagtggaaacttttttgaattccaaataaatttacttgtggttgacaacttcttggtttttgaaaggaagcgacgcgtggaattatttgtttgggttgtggggattactttaattagtggagcgtgtgcaatattgatttgtgaaatgatggttgatcatgtgagtgagtgccccgaggaaaatatcatcacttgaatattgagattccaaacaacccattaaatgcaaatctaacatatcttctggatcgtttgatatattttgtattttcttgaatatcatcttgtagccttttgcttcatctttctgatcgagctttcaactatttcatctacccttatagcgatatcatcttgtaccattacttgtacccgcataatgtaatttggcgggtaacaattttactggcaaaattttttgtcaacataactgttatctgccaaattatattacatgggtacaagttatgtcgatgccaatttgcgttggtaaaacctttacctgcaaaaaaaaatacgccaactttaatgggtgcatcattgcatcgaaaaaaaaccaatgaaaatttagccgagacataacaacagcatgtcacctttagggatgtacaaaaaaattcgtaaaccgcccaaatcgaataacccgcccaaaccaaaccgaaaaaaccgataaaaa

SEQ ID NO: 164876 - DNA, 1132 bp, Cannabis sativa
tttttttttttttatcttatattatgtatattgttggtatcttcataatatatatcttcatattatcttagtgaactttttttatggcttccacactaatggcttttgcaatgtggtggtggtatcagcaggaagcattgatgaagcatggtacgactcaattcttgtatttgattctgattgtgatgaagattaccaaagtgttcaagatggtatgatttttttttattattgatagaatattagttgtaaaaaattaggctaacttgtatttagtagtttcctatttagactcatagccttgtatataaatatatactattcaatggaatataatacacaattctattcactattctctacatagtatcagagccatatttgaattagaattgtaatttgaaatttgaaattagggtttataaaaaaaagattagggttttagtttaaggttgttatttttcggaaaccctatttggagtgaaagtttattttcaccgcccacatagaagggctgcccagctgtcgaactacaaaatcccaaattctggcatccatattcactacgtgcgggccctacgcgcctctatttaccactgtccagattcccacgcgtcggtgcatgagggcgcgtctgacatcttctacggtgatggtcaatgcccgtcacactcccaacccttccccgtcctccttgcatcaatctccggcagttcttggcattttatggtttgatacttttgccttcttcatgtttggatgttcattcttttggtgtttgctttcttctttttctctttcaattatttttgctttcaagattatggcagagataagattagattcaaaatcagttgttgtttctgatgtggttcccgtgatgtctaaaatcacagaccatagattgattggttcgaattatttggaatggagtaagacaattcgactgtatctgaggagtattaaaaagatgattacttgattgacaatcctcccaaagagaaagataattcaaggaaaatagggctccatgaggatgctcgcttattccttcaaattcaaaattctatctgttgacttcgcttttagccaacaacaatgagtctttttttataagcgataaatgatatgt

SEQ ID NO: 164877 - DNA, 658 bp, Cannabis sativa
taaaggaaatttttagtttatttttgtatgatcttatatattctagctatttaagaaaatttataaatataagatttacaaaatttattgcacgtgcttctattttttttagacacataataattaattatttaaattttatttttagtagtaaactattcatatttttaaaaatttataagtaaaaattaaactaaatttcttatatataaatgcttttttttttgcatggtgtggttttagtgttgttgcttttgatgtcatatagaattaatgaaataaagctgagagtatattcaatgaacatgaaagtcgtacatgcagactaccccacctactatgaatcacatttacttaaatcatgcatctcaatatctcattactaatgtctttttttttgaatgataatttataaaaattattaattaaatcacttattttattaaatgataaagtaaatactgtaattttaaaaaatagtaaaaatagtattctcgataattttttttaatataactaattaaaaaataatttttagtacggacatatgcaaaaaatataactacttttatcatagtagctctatatcgatttattattaaattttattttgacaaaaaaaatcagttcaaaattctaattttacaattttagaaaa

SEQ ID NO: 164878 - DNA, 807 bp, Cannabis sativa
ttaattacagtaaatatataatagtagcaatactgaaattgtagataaattaattaaaacttgtttaattagctagttatagagaaggagtagtgaattagtatgtacacataatacgacaaaactatatatatttatgatctttcttttgtatggtctataagtatttattaggatgagtttgttatataagtgtattattaatgttgtctctattttaattgaatatatatataagatatagcattaagaatctttaacttcatcaaaacctaggtcaatatctctcttctttgaatttatattaatgtagtgatatcttttaattctatcattgtacttatgtttttcggttgtgtgtggcactggcaggcgagacagtttcataactcacagggcattctgtgatgcattagctgaagaaacagcaagagtaaaagcagcctcagacatgaacataataaatccgataatgggagcagcagcagctggaaacctcgcttatcatttcatttcaggaccaaataataattttaacaacatgacacaacattttccctctgttttcaaaccaataatatcatcatcatcatcagcatcacccaatgataatcatcatcacgaggccgcaagaagccaacaactatctctatggatgagtgaccagcatgatcaaacactacttatctcatcaccaaacaacaacagtgatgccttattccacgatcatcatcaaattcgtcatcatcatcaccaacatcaacatcaacttggtaattcgtcgacagtgagttcagctagtgaaat

SEQ ID NO: 164879 - DNA, 4840 bp, Cannabis sativa
  modified_base (2535)..(2540): a, c, t, g, unknown or other
ttttacaaacagatgaaaggcagtgttaccctgcatcgcagaaagggaatcaagaccaccatgtcttgcgtggggataatcgcagggttagtaaatggaaggtgaggccattgagatgctgaaagacgtaaagtccctattcgaaccaaattcaaccgtgcaaacgtatgtaggtctgattttgtgactcgcgagatcagatcctcgcatgaaaatggttcgtcagttgagtgttatcaactgaatttgtctcacttccctcagcatctccctcctcctcaaactcgcaatcaggtacgtctaagtcttcccccatttcttcgacctcgatgtcaggggcttgtctcgagtgaacgagatagtcttgggctgacaccgtagattcactattgcaaatttcaacttttactggttcagcgagttcctgaacaatcctatatatctcgtcgatagatagaaaaccctgacgagcccaggtagcagggttttcttccttagaaatcgaggtgggtataaagttgtcgctcttctccaactcatcagcgaaagccccacctctagagtcgagcatttagctattcgataggtcgctcattagaaagatagaagatctttttagtgtggtgaaagtccgagaataataaagtgccctcacctgcataaaattttgaaaatataaaagattagcaagaaatctcaagaaatggctgggtgtatctcaatagcatgacgatcaagtcgctacctaagaattaaggtagtgagacacacccactattttgacaattcagacaatcctcaaaaagtataagtcgcacatatacaactaattgtgtacctcaagaaatggctgggggtttcccataattccaagggtcatgcatccctcgcatgaccattgagttaatgggacacccccaccatttcgaagaaccaggttagtcccaatatacgactataaagcaagaaaagttaaagctggccgcatgtctcaaatggttgggtgtgtcactgtaacccaaggaacatgcgaaggtgtgcatgaaaattaagttactatggcacacccaccatttaaaagactcagaaaatttcataataaaagcacatataatctaaaggctagaaaataaaccctaagaatatttaatttctaatgggggttaaaatagctagtgtacagattaaataatttctagatattcagaattgtatgagagtatttgagatgttcatcacgaaactcgtgagtattcgaaatactcaacgagaaatatgcgaacatcaaggtgttcttcttgaaactcgtgattattcaagtttcaggtattaatttcccgaagaaattcatattttttcaaaagccaaatcaatttcaacacatatatcctaactctcaaaagaaaaggaagcagttgcagaaattttcactaaccttgaaaatgcagatcttctttgaacgattctatagatatcaagcgcttttaacttcttttttgacaaagaaaagttagggtaaaatgtaaaggagatttctgagaattcaaaaattggagaagatagaggagaaaaataaaaatgagaggaaaaagaatgaaggatcatttcaatcagggggtttaaataccattatccctcattaatagggatgaagacacgtggcaagggaatgcctaaggtctcacaatcaaccggttatccataaccacgcctgtacggactctgaacagtttcgataacgtggcaccccaaatgggttaaaaataatgattacaaccgttttttcgaaaccctcaattagacaaccaaaggtgaccatctcgtgacaacctttcacctacctcttgcttatagtttccctcgtaacatagctatcgatttcaaaactaggggcatgtgttatagtgagaattttccacctagaaactcgagaccaggctcccataaaattgacatgtggactaaaatccctcgaggagggttgagatgtcaacaacagagctcttgagtgtaaacctcgcctgaaccacactcagcaagatgatgtgaccttgaaagagtctagtcgcattcctatagctcgcgcgaagcagaaccgaagctcgagcgttagacttgcacataccgagatatatgcgagaactgtaaagatattcttgtgaagtagtaaagatcgattctctactcagcgagctagtctggataatcgaacgtccttgataaccagataaggactcgcatgtcctaagttatcaacctgttaccaaatgtccatatatgcgactcagagaggtgcagacatcctagacatgatttgtcctgtgcgcatcttgagcctgcgagctatgcgagaagatgaacagacaactcgtaccatgaaggttgcatacgttgttgtatttagtgaattgggtcgaaacttttcttcgtttattctatttacgtttttattgatttaaatgttatattcaatgtactaacggattgataattaaatcaatctctgtgtaatcaaaggacacttgctttgtatannnnnnagtgatccaatatgaaatggacaagacagaacaacccttgcaatagtggactaagcaaaccatgacctgactgaaccattatattctctttgtgttatttatatttccagtacgtctgtgtatccataatttaaatactcgccattctgggtagagtaattgcataaccttgtttaaattttaaatatattattttatttggtgttgtctaaattcctccaacaataaaaatgatggatgatccacaatacaatctccagaaacacaagttccatccaacatctaggaagttcaacgatccacgtgcatctccacaattaatgctctacaaaatcaaggcataaatcaatgattaagatgccatttttcaatttttgtgccagaaaagtgaacaaccatcaaaatataaccgtttttggaaagcaactccttgatggtcgtgcccttccaccatcatgcgattgacacgaggatgtactacaatcaaggacagaagtcagcatttgcaattgagtaacacctaaaaagtcatgatattatcgttcatccccacatgtccatattgaaggagtgaaacaagcttccaccatacgcatcattctggaagcttgggggtaaatgttatccacatttttggcagtggacacggaatctaggttgaaatcaaaggcccattagtaggccccacaaagaagataaagtgggctaaagcccagttggacaagtccttccagaaacgtactccagcttcgtatccacagatccttttgccattgacaacacgactgtaagcaagtctaatagcatgaggctagaagggtgagattgtgtgttcctagaagagtaatccggtttcccgttttattcattcgcataaataagaaaataatagccaccagatcttgatagaggatcgtatcatgataattggggaaacttcctaaaacaaacatcaagcaattaattcacagttaattacccacaatcatagtacacagtgttgaccaaatccaattttccaagtcagaaaatcctctcctttgtgggctggatttcacaaattagcccaagtgtgttattcactataagctccccaatagagggaaaatgaaaactaaatgtaattatcaaactaatataagtacccatcaaattctatagattaacggttcaattctcttgcaaaactagctcaagaaaagttttgaacatatattcattgtactcctaaaggcttgtcaaggtaaagaactactgaataacactaactcatggactaaggctagttaacgcccaaaccacataaaaaattgtttgtgtccttttacattttctcttttaattatttgtttcttgagttcttattatttataataagtttccaaaaatcttggtaaacaaacataataatacaccttgaatttaaatttctccaaaattgcaaaaataataatttaaagcctatttcttacaataagccctaattatctacaaattcttataataattttgaatatgtctttcgatgataatctttatgcctttaatgaaatcataattggtttagctaatctgaaatacattttagatgatgaaactcaaactgtgattctccattgatctctaccagctacataccaagaactaatggctatgatcaaatatggaagggatacccttacacatgatgatgttatttgagctctcaatttaaaggaacaacaatgaacaaggaaaaggacaagatgaaagatgaagtgttcatggctagaggaaatgatcaagctacaggaaaggatcaatctagaggaagggatccaaatataagagatcattcccacgggcatcacagatctcaatcaagatcaaaacccaaaggaaaataccacaaagacatgaagtgttattttgtaaaagattctatttcaattgcagaagatacatacaaatgttcctctaatggtgacttacacatggtttcgaatcaaagaatcactaaagaatgaattcttgattctagttgcacaattcacatgtgtccaaccctagtaaatttcattgattatcaaaaggttgattgtggcactatactaatgagaaataagaattcttccagggtcattaacataggcacggtggccattaagcactttcatggtactatgaggatgttgaataatgtcaagcacataccagatttatggaggaatatactgtcacttggtgtactagaagatgtaggctgtgttgggttttatgccctaaataaaactcatttcaacataatcagatttacttat

SEQ ID NO: 164880 - DNA, 737 bp, Cannabis sativa
  modified_base (674)..(675): a, c, t, g, unknown or other
ggtagcaacaagaccgtagtggcgtaacaactgggtggtaatcaactccttaactcttaaatctcccttagaaagaggcttataaaaaagtaattccttgtctcaattcctccgtaagctttgttctgggagtagattctgcaaggaaggaaggcaacaaatgaatcataataaggtattgagacggaaccaacttacaaaccatcaaagcactaaaagtacaagggagtaaaagatgatacctagatgtttgaagtccaaggagagtgttggaactcgcctggggaagctagttgggaaaaaccagtattcacggtagtcttggctatgagaggaagtgcttgtgggacatcaaacatattttatttacggaggcgataaaacccaatcttagtgggatgtccttgcataggttgagattttaactcataaaagtataatattacttctagggctagaaaaaaattttcgcaggacctacagaatgtaaactatcctgcaagcagcttgtatgccaccgataggagctggaagggagcaattccaactttaacgcaaaactatgtgaattaagttctaagtggaagatgggatccacaagagatacgggcccaactccaagctcaaaactgtccacactttgtgacgttaatattgggttttatgccctaaannaaactctatttcaatgtaatccgtattattcaatatctataaagaaacataagtatttttca

SEQ ID NO: 164881 - DNA, 1209 bp, Cannabis sativa
taattaaaaaggagaaatattattaatgattcaaatgcagacattaacaatctaaaataatatctcaaacattcaaaaaaaaaacaataaaactaaaatcaaaagacaaattaatgtaaactaaatacttataataataatagtaaattagaaagaaaaaaatctaattactaattgttgttggtgactttttcggaagacttgtgcaataaggtagggtattttgggttaaaaatggagagcactgacacttgtttgaaacgtcgattatagtgtcacaacaatcttgagaaagcggtcttttattgttaaaaaaatatttaatatctggataatatttacgaagtcgagcttcttcttcgcaattttttccacaataactaaaagtccatgaatatactggcggtgttgattgtgttggcgatggtggaatatttgttgtgggtgattttttcagaagacttgtgcaataaggtagagtattttgggttaaaaacggagagcactgacacttgtttgaaacgtcaattatagtgtcacaacaatcttgagaaagcggtcttttattattaaaaaaagatttaatatctggatagtatttacgaagtcgagcttcttctccgcaattttttccacaataactaaaagtccatgaatatgttaccggcggtgttgattgtggtggcggtggtggaacgtttgttgggggcgcggtgcagtgaagttgagcttgagagaaggcggaaagagataataaagagtggtaataaggtaatgtgtgggaacaaagattagcattggaagtgatatcttcaactttggcacaacatgaggaactaataggtttattcctatatgtgaacccaatcaactcaccaatgcatggcttgaaattcatgtattgattcatgcaaactatcatgttgttgttaccattataatatggccatggaaatccttgggttgaactcatcagtgtggtcaataatgacaataccaataatgaataagtgatctccatcttctttgatcttccaaatatgtgataattaatataatagattggtgtttgtatgtcctcatcaaaatgtaaactatacgataatataatatatatagatatatttatataatagctatttatccggtgaatatcaccggcctcaccgttaatctctctattattgtttcattttcaaattacaatga

SEQ ID NO: 164882 - DNA, 1469 bp, Cannabis sativa
aaatataattacctttctttttagattatttttgttagccacgagtagtattttacattaccaacagacctatataaagacaagaagaagcaaccgctcctcattgaaaaaaaaatcttataaaaaaataaaaaaattaatagatatatattagttaattcttgtatatattttaacttaaagtaaattactaatagcattccaatagatgatttataatagttaaaaggtaaaaaaaaaaaaaaaaaaatagctaaagcttaaaatttttttctccatgagctaaattcttctctattttagctaaagaagttttgagctatttacgtagttaaatgtaactacaaactattattcatgagctaaaacgttttgttattgattttttaatgtaaaaaattaatttattattattattattttcacaatatttaattaataaaaaagtttaaagatataatattatttaaatgatataaaaaaatatggagaatcgaatgtatgatgtatgaagtaatataaatgtgtgaggtaaaattaaaaaaaatagtatttttagtgaagtattttaaaaaatatagtagagtagcttacaatttttttttttattttacctcacacttttatatttcatcatacatcggtttttttttttctttacttcatttaaatatatatattaatatattatatttttaatatattttatttattttataaaagaaaaatataataacacaacacacatatgtaaaaaagataatataataaaatatttttagttcaatgaataataatctttatatttagctaagtactattattcattgaactaaaaaaatatgtataatagttaagttttacttcacttggtgaaagcttaaaattgtaacttttttttatatataatttgaaaattaaactattttaacttatttattgagagtgcttgtccaaggaatttaagtcctcatatcatttattcttccaaatatatgcattttatttttttaaaaaaaaacacatttattgtttttgtagttgagttaaactacaattttattgttaatttttactttttttttactattaatactatataactataaataaatataaacaaaaaaggtcacttaaaaaaaattatatgtgactcacctaatacttaaacacaccaataataatacaatatcaaacctgggtaaccaccaataatttttagcatttctcttcgttttaagactttattcgatattaaacattaaacaaaaaagaaaaaggaaaatagttgtttgcacagctcactctagcttaggagtggcaattcgtgttcgcgggtcgtgttcgtgtcgtgttgagactcatatataacaggtttatgcttgacgcgaacacaacccgtttaataatcgtgtcaaacaataaaacccgaacacgacccgtttataaacgggttgacacgacacgac

SEQ ID NO: 164883 - DNA, 1139 bp, Cannabis sativa
  modified_base (327)..(330): a, c, t, g, unknown or other
ggatgatcagtaaatctaatgattaaagtaaacttgtatacgtatatttatacatgtatatggatttataatctattaaaatataaagttaattgtaatttttctaaatgaaattaatggagaataatataattttataatacagcaactacattcaaatgtgcactttaaatgaaatatatatgtatcagccagcccccaactgggttgctttcacatactttatgtttgtgcctaacaatgttatggctgatttgttagtaaattgggcaatttgttagtaaattgggcaaggagtactacaaaaaatcttatttttagtcacannnnaatttatgactaaaagtaaaaaaacgttgtgtttaattataaattatcattcttacgttatgactaaaaagtacgtcactaaattattagtcacaaaatcacaatttattgtgaatatatttttggtcataatacatgtgactaaaattaaattagcgacaacttatatctaaatattatatattagtcacaagtaattttttgcacatttaattacaaaaaaaaattatgttgtgactaaaatttatcaatatgaccttattttgttgtgaaaaaattgtatttcatactcggttcacttggggaagtagttcttcatgtagctactaacactgtggtcagttcctttgaatgaattgaatgaagttttattaagaaaaaaatgtatatatatgttataataaaagattttgtataatgtactatacaaaacgtacaatatatgaataaaggattgtaacgactcaaacaatacaaagacccaaaatgtcaaaaataaaagcttttacttaagttcatagaagtacttaagatctaataagtatgaaaagtccatactatttttctttccgaacacgatcttcaaaatcaacccaaggttaggtaacatgtacgtcaacgcaaatagattctgacgctcattgctattgtaacgccctaaataattaggcacgctacccaaatcacttattgaaccctaatcccctaaacgcgattactaataaaaaatggcgcggaatttaaactttaataacaataggaatgaaaataaatttgtaatactttaaactttataaactaaaagttac

SEQ ID NO: 164884 - DNA, 918 bp, Cannabis sativa
tatactctggtagctttggggctatgtaacgttgtggagcctccacacataaaatatgggtttcaaagggcaagagggttgacccctccattcgagcccattcgctatgtattcccaaatggctttttgcctccaaggctagtaacttattccacatcatttcctccagcttttctgcttctttactcgccgttgatgggctttcgacagccattggtttcgtggtttgcttttggagtgccgtgcggagtgcttttgcttcagttatctcctccacctcgtctctggcccttctcagttgatctcgcggatgaatcggggcctctagcatttctaagttccattttctctagttttttcatgcatgcacgggtgcggttgcctgagtggttattattgttggcgtgactctctttctcaaccgcttcttccgcctggcggttactggtttcttctgcatgcgggggtcgctggtatccctcaaggacaactttcatctgtccattttcattttgaagcctttgaatatgctctttttgaagagcaatttctgtaccctgagttgccattttcccttcctgttgtttcagcctttcgaggatctcttgccatggcgtaatcgggtttgatacattttcactgggtttgcctgtgttcgtttgagtttcgagaacgttgtctgggttgtattgaggggtgagatcttcctgttcattcgccatctttctcttgctctcgatcgatcgttctatgaaaaggtctttttactgaaaaaaaaagaagttcccacaaacggggccaaactattttggtcaaaaaacagtcactgtttattcttttgtgagttctctctttttttcagttcctaatccccttttcttttacgtgatccttctttatatatcctctacgtctttt

SEQ ID NO: 164885 - DNA, 1314 bp, Cannabis sativa
acttacttccctatcctccgccctgctcagctccttccatcgagccccctccaccattggcacttcgtcagactcatttaagcgatcttctctttgtcaagccatactctgatcgtaagcaacaaaacagtttggaatcggatcatcatgccttaaccacgctccgtattttgggacatgactgcctgttatactaacctccactgccaattcctttctgcaaccaatctgatcatgtccccaatagccacacttaaaacagagtagtggtaatttatcgaatttgaattgaacccaccgtctaccaccatccactggaatatatctcccagcgaaaacctcaccctggatcgaaaagccaatcttcacacgaacatacatattaaggaaaatctgctgtggattattccaaacagtatcttcgacacccccgccatgcttcgtagtcgcttaacattattaactgtcaaagctttaagaggaaaacccctcatcttaacccaaatagaaactttatccaatctcgcatctctccattgtccactacttggccattcttcaagtactagcactcccccattgaaaagccaagggttcttctcaagtattctttttgcatcacttccgctatgaaaagacaatccaaagtagttatgctctttatcttcatccataatcttcacttttcattccccaactgatttccacatcctggtaaaaatcgttctaaacagccccggagtcatgctttattttgatacaattcttccaatcaatgacttctccccaaactcagtcacttgttcttcgttcacttcctagtcttcttcctaatccattcccaatttatcagtcaattgcacaatctcatcaacagtactatccgccatcatcgtagccatgaacccgaacatcacaaaaagatcaatcatagtatagagtcacagagaccattaactgtcatttggggtcatagagaccattatagtaattgagatgactacttaaaacaaccaacaatactcctttttcattgtatatatttatagttagttggccaaagttccaccaaaccttatgcgaaaacatagtttaatgaagtagtgttttgtaagaatgtggtttaattatattagttacaaaatattattaattaatacacttattttctttgtaatagtttgtcaaacataaaaattagagttattaaatatgcttaaaactttatccttatatctaaaattgttttctaaaataatttgatgccaatctatcttcctttttagttaaaaaacatctctctctctctctctc

SEQ ID NO: 164886 - DNA, 754 bp, Cannabis sativa
tagtagtttaggatatagttaggtaaaacaaataaaataaaacctaacctctaaaatagaaaaagacataatacttgctttgtccccaatgctttgtttggtaaaatagataaaaaaaaaagccaaaaatgaagttgaacactatatagtgagaaaaaaaaaaaggagagaataatcctattatttcaaataataacaaatatttaaaaaaacttattaaaaaataaaataaatctcaacaatatccacgatctgcctatgtagattgtttttttttgataatttgcaatctataactataatttcttattattttggccccttctttatcttattaattatcaagcaacaataagctaaaaatagattaatttcaaaataataataataataataataagctaaaaatgatggtctcaaatccatggtacgaaacaaggtgtaaaaaaatacatggacggatactacaaaaattattactttcagtaacaattttttagtcacaatataatttttttgtgactaaatttgatttttagtcacaacaaaaatttacttgtgactaaaacacagtatttggatacaaattgtgactaatttagttttagtcacaacaaatattgtaactaaaaatacatttgaacacagcaaattgtaatttttgtggctaatacatttatccacagaccttttactcataacaccataataataatttataattagacataaattttttatctttagtcacaaa

SEQ ID NO: 164887 - DNA, 1549 bp, Cannabis sativa
gggaaatagatgtagtcgctagattagctaaaatatgtttgtctgggcatggtgtaagaagacccaccatgaaacaagcggcggaggagcttgtgggacttaacacaaagcctcaacaccaacaccaataccaagaagaaacaggtcagatactcgtcgaccatggccaaacaccatcctcgtcattttctattacccataatatggaaataatcgaatcatcatcatttctctagctacgtacctatgtatataatatttgtctatctatatatatgttacaatttctgctggtacaattttttttttttatgaattttcattgcactcaattatgtgatattattataatatatttctttttgacacaattataattattctctaacaaaagtaaaactttattgaaggcgtatgctatatatatatacactttgcttaattatgtgatttcatgaggcttaaaaatgtgatatctatatatttatatagaaaaaagtataaagagttaagtgaaattttatatgttttttcttttatttttgttaattttgaggcttttatattttaagaacaagtgtacaaatttgatataatatgatgtttgttttaaaaagaatctcacatagtttctaaatattttgggtactatatttgtatctataagtaaaatattttttttttattttatttgttacaaaattaatatgtggttgaatgaatttgtgattaattcaattttaactaactaattatattttttttattttattgttttatcaaaatttaattttataagaaagcataaaatatacgaatgtgtataaaatattcattatttatattaaataattaattaaataaaaaaatattatgacaaatcatagaattacattttcaaatttttcaaaattttaaaatttaaaaaaaatattatatatttttaacaaataaaaatattttattaattatttcttgtttattactatttgttttataaatattataattatggagaaaaaattcaatatttatgtttacatataaaagaaagtagtaaaaaacatatgtgatgtgatatattaaaaaagtttaattaaatataattactttttaaagttttagtaatttcactctttagtgagttattttaaaaaaaaaaattacattatttagaaattaatgtggtgttgtacttagagattatatatacaacactatttctttcacattggtttgtgctaaaattaatattgcatagtctttgtatgggtaattgatgactcttgctcaattaattgtaatattttagatgaatgcaacatatattattgcatttagtcaaaacttaaaattttaaattaattttttaattatttttaacaaataaaaatattttattaaatttttataagtttagttttttaaattatatacgtctttatttaaaaatatttgttctaagtggcattttatatatatatatgggtaaataccattttggatcctctgttttacaaaagttaccaattggaccctgtgttttgtt

SEQ ID NO: 164888 - DNA, 2321 bp, Cannabis sativa
aaaaaaaaaaaaaaaaatggtgcgaacaaagcagaccactagaaagtcttagcatccgacccccatattgcctgtttgttcaatgcagctggagtggaacaagcccgacctacaggcgaggaaaagaatattactaatggggatactgaggtgtaggaaattgaggactagggcgaggtccgttctactactccattcgaggctagagaagaagatggagaggaggaagagggggtagtccggatgctgccttttggtgcgttcaatgaagagggagaacatgtctctaagatgggagaagtcttggaagctgggcaagagtacgtagaggaggagtacactgaggcttgccctataagcaggagagatccaaggggagctcgatgggtttctttaccatccatcctaacgttcaagagattgaccattctctttatggaagacatccttaggcgggttgaatgtttccttccttctcctgggcagctggaaacagaccctagaaatgattattatgcgtggctgggtcctcatgccaagtagggtgcaatgttgccgttgcatcagtactttaaggagattgtcaactactatcatctcagtctgacccaattcactcttaaaggcattaaatacctgtataccttatttgggttgtatgcttctcaaggattcggccagccatccgcctacaacaccaactggttttttgacctgaagtccagccctaagcaaaataagtctggatacttctacttctcctagatccaagattggtggttttatggagaattattattttatcaaggacatggagaccaatcacacaatcttccaacacattcctttgtactgccaacctcccttcacactagaacttaggaagagggcttaagaaatactccaacttccctcagatgctcataatatttctctcttggctactgaggccaatttcataaagtataaactctatccatctgatgatggacaagggggcgagcaagtagcaggagagcctgtgcccgcccaacaagaggaagttgtacccaaacaggaggctccgaagaagaagaagaagtagaagaaagcttctcaaagaaaccaagtacctattgagcagcctatcaagatcagggatggtcttgaggaggctgctcattcttccgtccaagtggtgggaaagggaaaagccattagggttgagtaggaggaagaagactcttttgatgaggatgttccttcctcgcttgtccaggagggtgcccatgttcacgtgcagggtactttattttattcttaactttgtctgcacttgtttgatttacactgttctgacatctctattttactcatgtgcagttatgtctcagagaatgatgcgtgcactaaaaaagaggtcgagtgatgcctctagccaaaagtctcaggtgaggcgtcctaaggttgacgatataccgccaaaaagaattgttccaagcaccatgactccttaactatatattgagaatagctctactgtctcttccactgaggttcctgaggtggcagtttctgacttagtccgaccgtccaggaagaattcaaagtctcaatccacggttgtcccatccattctaaggggggaatattgaagggcccagtctacccaatcctctagccactcctcccatgttgaatccaaaagcaaagaaggggaaggagatgcttcaattctaccaagatcgagtgctttcgaaagtgaacaatcagttggttagggggaggacatgtccgtagagccttttatgggcagcttgatgaaggaatgtacccaagtatgtaattttcctttgattttcttttacatgcttttaatcgttcagactttaattttatcttattgtgcagctcaatctgaagatgtcatatacatacccctgtgccaagtctgcaaccttaaaaaccatgaccaccactaacaacttaaagaaggagatggaggaggctaaaaatgaggttgagctgaagagcactcaactgtgaaaggttaacaaataattgctggctactaagaagctcattaaggacttgaggaagaagatcaatgatattcatccactactcagctcgaagcgaatagataggtcttggctaaggatgtcaactctcttaaggatgagagggaaagcctccacactcttctttatagtcttgagaccaaggtcaaggatctgaccgaagagaagaggagtttgtaggagacccttgagtctaagtggataaattttggtgctgaacaggaggtgcttcaaaaggaggtggaaagcttagagacgatt

SEQ ID NO: 164889 - DNA, 531 bp, Cannabis sativa
ttttatgattaaaaagatgaaaaatagtattttgtgggattaatatttattgttatgattattctttataataattaattaaaaatacgattgtaaagattaattaaaaatctgaagaatttctagtatttttttttttttgagagttttgtgatagatattttttatttgagtaattaatgtataaagttaaataagaaaaagaaagaaaaaatgacaaaatagaaaaattaagtgaaaagttaattaacttacgaaaatttaaattaatataagaaaattatatcatcaatataaatatattaaaaaaaataattagcgaaaattattgtatattgtaatccaaaatattacgttagggagtgaaaactaaatatgacactaaattaattatcacgtgtatgtagaacttttggatgaacttttggattattattgttttattaaattactttaatcaaataggatttgaattatttttgattaatgggattaatatatatgaagaataatttgaattaatcttataat

SEQ ID NO: 164890 - DNA, 918 bp, Cannabis sativa
acaaagattaggttccaatttaaaaccaacagtaattattttaggctattgtgtattcatattagtgtataacgtaaactatttctaatactaattaagtttctgtacattgatcaacaatggcaattgtttcagtacaaaatatatatagatatagatattaacataaccagaatcgaattccataccgatgatcactaatctaagctgattattaattaatattaaaaataaaaaccttggaggcgccaagacggtgggcgaaagaccgggtagagagctcgccgagctccctctgccaaacccctaacagggcctggtcgacgcaagaccgagctttctttctcatcgccatagccattggaaggtgcttcatcgctgcgaattggctttggctgacacacaaattagtttttttttttttttttgttgggttttcacttttcaatcttcttcttttgatgcttaattaattttattattatttgatagttttttcaaatgatacctttattattttttaaaaaaaaatatctaaagttttaaatttataaacacaataagtttaatatttttagcggcataaataattaatatatgtgaaattgtaatttttttaattgtaaaatgtgatggatacaaatcacaactagtgctttatatgaaggacatctatagtatctaacatctttgtaaaaatttctaaagaacatcatcttatagtagcgctaaatcccgataacaatgctctttaatttaatgagaaatgctaaacggcaccagtggtgcctagcatccttctgtgtcagtatagttattgtttcaactaagtatcgggtcccacataatttaatataatagcttttaaggaatatcgctagtcttctgtacaaaataatttccaaagttctcactaac

SEQ ID NO: 164891 - DNA, 781 bp, Cannabis sativa
tagagctagtgaaagctaattagaaggtctataccacttatatattcctttcacttttattttacaaatctaaagaataaagatatacacattaatgagaatttgcatatcaataatgggaggtacttaattttttttttcgtatatataatccataaagttattccgtacaatataagattgctcatagcttataattaatttattaattttaaaaattatatttatgtgtgattgccacttttgctttaatatttatgtgtgattgccatgaattttattttatctatttttttttttaagttcgtggctttcaaatttttatgtatataatttgtgttttacttataatgtttgatacttataattcactttataaattcataatatttgagcaataaaatttagattaggcgtcatatgaaatgttatataaggatgcaccatgcaattatatatgtttttttttcttctgaaataatgtttggttgcacatcggctaggccctaccatatatatagaaaagaaatattgttagggcttatagaattagattataattacaattctaaaggggtggggatgctaatctagtagttggtttgactattgcctcctcatagattactatattaatgtagtaaaatttaattatgtggtgatatatttcaaaaaaataaaaaatttgggtgctgtttggtaacactttaaatttttgcttttaaaaattttgtatttgaaaaacaaaaatgcgttctgcaaccacttttgtttttcaatt

SEQ ID NO: 164892 - DNA, 6323 bp, Cannabis sativa
ttttccttcaaaaattattttgaaataccaaatggagagggtgagagagaaaggttgtttgggagaagcaaaacctagaagaatgttttctaattttgcttaaatcaaattttgttgaataatgcattatttggtcaaaggaccaaattgcccctaaggcacacttattagcatattcacatcaaaggacaactttgccattaccactcatatgcatatatcacataattcagatttcctcatttaacatatgaagccataactaaattctgaaaaatgtatttttggccccgaacccaattcgacccaaaataccttgttgtgactataccgtgtcgacttgtcataaaacacctacagaaagatagaattaacgtaatatataataatatagtctataagcacaatctataatagaattacgactttacccatatcattttaaattacgaaaattcccctaatacatcaatagggttttaaaatgcaatacatcataattgtttcacatgttaaatcatataataaaataatttctcattaatacttaattagcttacttaggattgctaatccggttattaaaccttaggtttttacaattatccattgcttataaaaattttgtcccgaaatttacctgaacaactccggatatttctactgcaaatctgtctctagttcctaggttccctcttcaactttattattcctccataatactttaattagtgcaatttttttgtttctcgaaacttttgctcctttgtcttgtacttgcatttgttgcttctcgtatgagagatctagatgaagttccaatgcttcataactcataatatgaaatgggtctaacacatatttctgaagaatcaaaacatgaaacacatcatggacagctgccactactggaggcatagcccttctgtacgctacttaccctatcctttctaggatttcaaaggatccaatgaatctcggtctaagttttcctctcttaccaaagcgtttaatacttttcataggagataatcaaagaaataccatatctctgacatgaattttaatatctcatcgctttggatatgcataactattttatctactttgagcagcgagcatccgcactctaatctcgtcaactgcctcacttgttctctacaaagctttgggacccaagaacatttctcacttacttcatctcagtgaatatgtgatatgcactttcggccatagagcagttcataaggagccatcccaattgttgcctaatagttgttattatacgagaagtcgattagaggaaagtactttaccaagattcttcaaagtctaacacacatgcctgtagcatgtattctaaaatctgaatggtcctagttttgcatactgatgaatggagaagttcatccaaataggtaaaaagtgtattgactttgtaaacctatcaattatgacccagacagagtagtacttcccatagttctaggtaatccaactacgaagtccatggcaatatcttcccatttccattctggaaggttcaatggctatagcaaacttacaggcctttggtgttcagcttttacttgctgacaggttaaacactttacaatgcactctactatatcgttcttcattccagaccaccagtacatagacttaaggtcttgatacatttttatcgtccccgaatgaacagagtaaggatctttgtgagactcattaagaatttctctcctaataatttcatccataacaacacaaacacggttcataagctgtaacacaccattactatcaactataaagtcattggtcttccctgctaaaatcttgtctcaagagttcactaagtctgggtcttgatattgcgcttctttaattctttccaagagagtgaactgtagagtaatgttagctaatcctcccacaataatctcaatattagctcgggtcatttcatgagccaaattcttggagatcttgtttaattttattcatctagttttgacccttccaacatagggcatcaactacaacattggccttccgaggaagataaatgacttcacaataataatcctttaccaacttgagctaacgtctttgtctcatgttcaggtctttctgggtgaagaagtatttcaaacttttatgattagtgtaaatctcacaatttttgccatataagtaatgctaccaaatttttagcgcaaagactactgctgggagctctatatcatgagtagggtacctctgtttgtactcttttaattgctgagaaggataagttattcccttttcagtttgcataagtacacaaccttgatgctttcttgaggcaatcacaataaataaaaaacattttcttatcagaaggaagagttaacaatatactacaaatatggtctttagaggaggttttttctgcgttagtttttgcaaactttgctaccgatgctgatccaaacgattttgtaggattgaaatcaaccaacgctagatattaccctatggcgtcggttattatcaaagaacctacgccatactgtacatacaccatcaattatatacaaaaaaactgacgttatatgccagcataacggatgtggtaggccttaaaacaatccccaaatcattaataatattttttttgtccaaaacctaatataaatcaagaaatttaatttatttaaattatatatttattaatttatatacaataatatttaatttaaatttaaattaaatatttatttttttaaagctaaattaaatattatttaaattaattttatgattagacaatataagtaattttatttcatataagcaattaaataaattacaattataaattacacaaatattataaaattagtccaagtattaataatttattaaatttgattacaagttaaactaaaaaataagctagggaagaaaaattcttaggcctttcagcatcatttgttcaagccttcgtgaatcaccgacattaatcgttctatctactgtcgacgtaatggtaataattcggtttttagattgtatgtctttttttctccaaactataaaaagaagtaaaaatttatattagtttatatatatattattatttttaaatatattaaatactataattaataattaaaacttatagctttttgatcttgtatataacggttggggtttgcacgtgcgacgatgtcagtaatgtatttcaaaacataaaaaccacattcttagtttttaagttgtcttggaaaatttattagtgcaattcctggccacgacccaagatacggatttgatgccccaataatttggtatgctctgttttaaaaattatattaacatttcaattaattagttaattaaaaatttatgttacataaagagtaattaaattattacctttccaacattttattaatttgttggggaactttgtggccacgtataaggtctaaatcgataatttttcctagtgcaatgatctctagcatccaatgcacactaaaaaaatttattggaatgtatgtaagatcgtatagaaataatttcaaattataattaatattgaaaacaattatcactaaagaattgaatagtgtttacctaatattccaaagaataaagaacatttagtggttgttattcatggatgataactaaagggccaatcgttgggacacattcttaaaagagtcactcttctcttcatcatttataccattcactgcgagaagcttaatttgggtcgtaaaacttaaaaattcttctcaaatcttttatgctccccacgatatgcctgcattaaactatttaatgtaagtgttttataataatttcatatatatatatattataaatgaaaaatgtatcttacatgttatgtttggttttattgtttttattgttagaaaattgtcatattcggttggtggtgatcattcaagtccttgtatgtggctatcactttcaaagagaaaatgttgccgaaaattttggccttacgagtgcgtctactagctataaataaatatatatagcttcatctttaattatttggttttttgttttgtgtttctcactgtggaaattgaagtttgatagatagtgattttacagatttgaaggaataattaatgtgtacctgatcgatcgatcagatcaccttcatttgatgtagaatattgaatcggggtgtgactaaaagtttaaaagatcagtagtagaaggcgggaggggagggtccttatccacaaaagtactgtttggtgcactcttgtcccacaaagtgccccaaaaataaggagacactgttcatgatgcctacgcaacaagcaaatcccatgcacgactgatcccttttatgaccaaatagtaataattgttctctctatagtcaccgattcataacttaaaagggaagaatatcaccctcacaataatagtgtcttatataattctacatgtttttcttgaagttttttattttaatattataatcaaaattattaggggttggcatacagatacaaatacaaatagtatacaagtctttctccctctccattccatagacatatatattttgtatatgtatagatacaaatacaaatagtatacaagtctctgtcgcgttctctctctatattatttgtagggaacattattatttgagcattaatattggtgcctagcaccttctagacatgtcactttgcgagtgattaacaatactctctaaaagttattacattaaactatatagaatccgatacttgattacacaaatagcgatattgatatgtggaagagtgctagatactactagtactagcatttctcatttgtaagtaattacaaaatatagacaacattttgcaataatatttaatgaatattttttaaaaaattgtaatatataactataatcttagtaaactttagttacaaaattgtaattgattacacagttgtaaattatggttcacagaaaaataaattgaataattataagtttgtgtatttttaataaatatataaatatgtgatcataggtataatatagtgatttcacactttttcttactaaaagaagtctcacgtttgaaacctcttaccccaatttcaatagtaaataaatattttatttttaataatctcctgaaataatgcttatatatgattaaaaataaaatttaataacaaattgtaattaatacatacgtttataatgattaaaaaaattttgtctgaaaaatatctttatttaaagtaaattataattttttatgactatttatttatcgaaatatttgaaaacggattaattaaaacttaagtaaaatataagacaaaaaataatagataaattcttttttacttgattcaagcgttaataatccttagtccacgagttcatcgtattagccttgtcggcaagtatttatgtaatacaagtgtttacagtataaatgtaaactctgtattcttctcattcctcttgaagaaaaagaatcttataagaatttcggtagcgattttataggtaaaaattgttcaccccttgcatataaaaagtaaagttatatataggcacacatgtgggtaagggcatatcctttacccacctagggttacttactcaacacgccactggggcttagactaaaacaggaagatccgatcgctggtttggtaggtagcttttccatcgtgtggtgcacgaccattgcaaggcatgttgtgggagcgttgtcgctcaatgatttttcctttaaaagttgttgcctagacaagccgttggagaaaaaggactacaaatccaagtatgcgcactactagggtctgacacagaggacaagatctaattcggtgtcagagggcatacaaatgtctcctagcgctctagatggaatatagctagatagggtccgagattaattggttacatctatcccaaactatatgaccctattatccttctaggacgcccgtacatcctcagaggactgtatcttttccgactagtaggtgaatggtaggagctttggagccttctccgtctttattaacatagaggatctgtgattcctcctaaaatactgcttcttcttttaccctaataaataaagggttcatgcaaactgtaaatagtacatagtttaactgccacgggaaggtacataaccctatcatttttacatatagactttttagtaaaaatataaatcttaatattttttagtcacttttttatgggattttttcatttttactttttcaagttggttttttttttttttttt

SEQ ID NO: 164893 - DNA, 1685 bp, Cannabis sativa
agtggaagttttctcttccaataaattatagcactcaaagtcttgcaaatagctgggcggccgagacattcttgaacttcttctaggtacagcagcaggagtgggattgtcaggggcagattgtgtgtcattttgctcgttaacagctgctgctggaggttcattttgttcagcaaagtctgctgctgttggttcggtttgttcagcaaattctgctgctgttggtgcgttttgttcagcaaattctgctgctggtggattgttctgcaaaataaaatgaggagaaacaaggctatggtcttgtatagggtaatctgcaataggagtgttagttacatggtcatttggaaaaataataggcaagaaaggatcaatatgttcagtagcagcattaagtttgtgaaagggaaaaacatgttcatgaaagacaacatttcgtgaaataaaaatctgcttggtgttaagatcatataacttgtaccctttgactcccctaggatatcctaagaacacacaagttcttgcccgaggctcaaacttagttctatgagaagtaagagttgaggcaaaagcaagacatccaaaacatcttaaatcagtatattcgggttgcttgtcaaaaagaatttcataaggagttttgtttgcaagatttggtgtaggcgtgcgattgattaaaaagacagcagtaagaaggcattcagtccaatattgaatgggaatttttgattgaaaaagcaaagctctagccacatttaaaagatgttgatgttttctttcagcaacggcgttttgttcaggtgtctctatgcaagaaaaatcatgtaaaatgccatgtttagagaataattctttgaaagtaagttcaggagcattatcggacctgaaacgtttgaaaacacaattatattgagtttgtatgtaggaaataaactcaggaataatagcaataacatcggacttttgtctaagtagataaatccaagtgaatctagaatgatcatcaactaaagtaaggaaatatctatgattagaatgtgaagtaacatgataaggtccccatatatcacaatgtatgagatcaaaacaatgagtagtaaaatttttattattgggaaaaggaagttttctttgcttggctaaaggacaaatatagcaaggttcaacatcatgtaaatttttagttttacaatgcaaagagtcactaagcaagtctaaacatttattggacaaatgtcctaatctcttatgccaaatctcagcagaggcgactgcattgatgtaaccggttgtggtgcccaaaaaatagagaccattagccgattcacctttgccaatcgtcttctttgtgtgtgtttcctgtatgagaaattcattagcaaaaaacttgagagcaaaatcattgtcttgagttagacaactaactgaacaaatattgtattggaaagaggggacataaagaacctgttttagaataagattatggccaatgtgaacattacctcctttgtgaaccaaaatattattgttatttggtaaaatcaatttagttggactaataggatgaatgctttgaaataatttcagatccgaacatatatgtctagtggcacccgaatccactatccaagatttatctttaggtaacaaggtactattggacaagataatacctgaattatttg

SEQ ID NO: 164894 - DNA, 1817 bp, Cannabis sativa
tctctctaacctctccattcatcatactcttcctccctcccaccaaacatagtctaaggaaaatttatggtatactcttatactttttttatattaccgtatactcttatactttttcatcattttattcttcttcctgtttttgatttttcatcaacgttttatttcttttaattttttacttcatttttttacacagaaagttcattgtattattaattaaaaatgtagattcgctaataaaatagcataaaaatcagttgcgacaaaccttccattgaatcgatgacctgaaaaagaacaaacaagtcaaataattgattgtcttattcgcaaatcgtttaataaagataatagaaacattgtttaaagaaaaaaaaagtagaagtttacaatcaaaaataatcaggccaaatagagaaaatatttggagagtgtgacgaattgcatgaacaactacttgacagtcagtttcaataacaatttgagaacaattattatatttgatccagctaagaacctctttgactctcgcaacttctgccataatcggttgtacacaactagacaacaactttaaatcagcttcaatgacatttccttcatggtcatccgctacccaaccaatctcaaagctatcatcccattaataacagaagcatccacattgatcttaatcatgttctcaacaggtaaaattcaatactcgctactaccagcagaggaagaagtagactcccctacaccagtgttatcttttcgagcattcttccattgattaagataagcaatagtagatgaaacaacttcattagctgtagaactttttccttgccaaactaacctattacaacttgccacaaagtccaacaaattattgctacctaactagcttttacttttgataaaacaatcataacataagaaaaccatctaaaaaaaattagtatacagtgtccctagaaccgaaacatcaaactactaccaacaaagtgaagcaaatagacattcaaccatgatatgaatgacagactcgtctcctttatgacacacttgatacatcaatagaacatccacatgtttcccctgaagctgcgtggatgtgggcaaaataccttagcaagctcttcataacacatgatgtacctttggtgggatttccaaattctaaagattcctccaaaaactagaactatttctctcatcccacttgtcattcaaactttgaagatacttgtaggcactcttaacgttataaatacctaaaccctacttattacaatgtcattggtcctcccctaaccaatcattaagaacaatactctgaataagaaatttgtcctgcttgttaaaaagatcagacaataatttaacatcccgaatccgagcaccttgaaccataagctgagccaccttagtggtttccaaaccaggatgagtcgaagcaataaggattctcctcacttgttaaccaaggttgatttaaaatatcaactgaagcactattgacaatactccaatgacatccttcctttaacaaactttgagatttcataatagaacgccaaaacaaaaacttggattatgacccaactgtagccgagaggaaagaaccaaaaagataatatcgagcttgaaaattttgactaataaaagaataactatggactaacaaccgccaaccttgtttcccgagcatagttgtgactattagtagtcccatgatccctaaggaggaaacactggataagctgtgcaatcccacatagcttggggaaagtcaagtgtgatgtttctgagactgtgtagatatggga

SEQ ID NO: 164895 - DNA, 1124 bp, Cannabis sativa
aaaaattccagaaatctttgacttcctactactgttcctccgccgttgtcagaccaaattctacagtcggacgacatcaacttctcgcctatcacctttgtgtaagtctttgtgcacacatttttttttctattttctctgcatgttagggcaaagcaagaatggtgaccttctcattttattcgtgtttgatttctgtggtacggtggttatggcggagaccattgtacgctgttgtatttgcatgcaaactgtcgtttttctttggggctagaaaatgatttccttgtttgggttttgtcgagtgtttgaagcgactttcgtacttctatccttcttctttccctttttatttttgttttctggatgtttgcacccggtgtttgcgtaggagaatctatggattccctatctttggcaggcatccggagggggcctctttctagcggttaggggacccccattcctcattttgtcttatgatttggtttgggggctaaccgctggatttctttttcagatgagtgggattctttaggatcttcacgaccacgattttttcagctttgaccttgaaatgttggaacttcatggagtccaggccatgtctatccccacttcaactggagcaaaatcttctgaaaaggtgcctaagaaactggccactttagaaaaagtgatgaaaggctcggtggtctatgagaagttcacctactggttcaatggttgggaggcaaatgagctagactcgaccctgacatgtgcccaccaactggagaagatcgtcactattgttgagatcaagccttccgctgctggggtttttcatcgccttccgagagacgaagaaacgtccaaccataactatggtagttttggggcatggagtcaaacccacttgatgtctggagccatgctaccacttcaagattattttatagactttctagtttttgttggccttacgccttatcaactcattcctcaagcctatcacctgctcttaggcttgtacattttttatgtttcctggaaatgggccccgcccagtccggctgagattttgtatttttatgaactcctgtccgtcccaaaaaagggggacaaacttaaggatggttttt

SEQ ID NO: 164896 - DNA, 1138 bp, Cannabis sativa
  modified_base (961)..(993): a, c, t, g, unknown or other
taggaaaagtaattctttagtttatatgaattataattcctattagaatgagttttttaatgacaataaacaaactaaacacttgaataatttttctttagaaataacaattttattcctatatttatttatgcaaaccaaatactacctaagttgtataagaccgatactgatataatattaatatgacactgagaaaaatagtaataacatgtactacttaattttatgagtcaaagatacttttggtaaacacatcaaccgatgatgcatactcattatttatttaagtgaataaatggtctgattaggttcagaattccatattttttttaaattaattaattatatttataaatagaatttataatgctttattcatgcataaaccctcttaaggcttattcttcttcttccaaaaaagaaagaagaggatgtgtcatgtgtggttgccttgaaccccataacccctagctagctagtactatcccctaatccctacaaaccctaaacaatggccctagttagtagtagtattttcatttggccattacctatataatccactatgctacctataaatatatcctactatctatatatacatgggattccacaaattttcaagtttggaattgcatgcattcaatatataaataatattaatgaaaataaataaataaataagaaggtgaattattcaactcaaatatcaactggtcttttgaatgcattcattccaaactaataaatacatatttatattcattccctacaaaacactactactaataatttactgatttttttatgtagtggtaatttttttgtcaccattaatttgtagttgtacctactacaaatttaaccataactataagttaaaaattaatgccggttattttaaaattgaattgtattgaatatagtgttcttaactcataataataataataataannnnnnnnnnnnnnnnnnnnnnnnnnnnnnnnntaataataataataatgagttttaatatgtcacactgtatattaattaaaatattaagagcatatatatatttataataaattattagatatatataatataagtctatatacattaagtctctatatatatatctttatatatt

SEQ ID NO: 164897 - DNA, 623 bp, Cannabis sativa
gaagaataaagtccagctatataaccagtgagtagtcacccatctaaatatatatgtacagatacatattcgaaacgattatatattctcaatggaataaatctctcacaaatttaattccacacaaaattatgtatatatgtgctataattaagattgaatcagagaaatgaaaaattcccaacagcaaacacatatatatacacaataatcaatgattacattcaaagcaaatacatatatattcagaatgaatgtttaaccaaatatttcaaaagcaaataaaatgtaatgaaagatcaatatattctccacaactaatttagggatgttctttaagaacactgtaaaatttaatttagccctaatgaattcatgagaattaaacaatagcattattaattagcggaagcgtactggtatccatagaatcgacctttgattggtatgatcttccagtttgcatcaaaacctttctctaaaaaattttctcttggtgatggggatacaagagtgaaaacgatgcaaatagggaccattacctgttatattaccaacagacaaaattgttggtaacatttatttactatttctatttggcccctcatcaaaataaaaattgt

SEQ ID NO: 164898 - DNA, 1396 bp, Cannabis sativa
  modified_base (294)..(305): a, c, t, g, unknown or other
tttttcttatttttcttaaccaataccacatgaaccaaaatcactaccgcaaccacgccaccgccgccgccactaccctcgcaaccataacattgccaccagaatcattgcatttctaaaatctaaaagtcaacacctaaaaaccaaaattaaagaaatccaaaaataaagaaatccaaaaaacaatacaaaacaaatctaacaaaataaatgaaaactcatagacggatccaaaatttttactttgtaggggcttatttatcattaaaaaatatttatacttatattatagtnnnnnnnnnnnnatttatttaattttgtggggggtttttcttctattttagcctataattatcaaattaaaaaaattacatttaattttttaaaaagataatatttttgttagtggagactatagccccacatatatatgagtgggtctgtcactgctcatagatcaaactatcaacaatgattatacagtaaaaacttgccgtgtgtacacttgttacacagtgacaatcttatctcgatacttaacaaactaaaataaatgagaagactaaaacaaaattaaaatttagagaattttacctctaaaacttcaaacaatttaattgtataaaatcttaaagttaaaataattaactgaaaattactttaaaaaaaagtttagagtaaaagaattcaaatcaatgagtcttcatgggtggttatcttaacaaatttggttaatgtaacacaaatggataacatatagttagttaatatgtataatgtaagtctaattagcaagtgtgagggtatgatagtaaattggatagagagagaagaatgataggtggtttttttagttgattggtggtttaagttaagatgagtttaaggggttgggttttggtactgtcggctgttgtaaatataatatatatgtatccgtacaataaaggacaaacttttgttttcttttcaaaattatgtaagagacatttaacatcatacaataatatctccttattattgttgtgtttaattaccttgatttgattatgatatttatgagaattagtgtttcaaaaatattattttaaatgtagatatttttaaaatattttacattaaaaaataatgggagatgaaaaaagataaagggttacaatctcctatattgatatgtggctctgtcactatctgtactttaaaggagcgccacttttaaggcaaggttcaaagtatccttccttatttagtaaagataagtgggtcaaagtatctaagttcgacactatgattcatctagagttttgttaggggtgttcataaccgaccatcaaaccaaccaaaccgtaactgaattttcggttccacgtcatcaccgaatttggcagtcggtttc

SEQ ID NO: 164899 - DNA, 726 bp, Cannabis sativa
atcatcatcataagtgatcatgtgttacatttttgtcaaaaaatttcatattttgttctttttttttgttatacataaagcttttggaattgtaaattgtgtttgtcttaattacatgattttgtgtcaaaaacttgaaatccaattaaattagtcattaaacttaaccatatattgaatatgtacctaattaattaagcttggcttcaaatttaatactttcacttgaacaaaatgtggtgaagtgaatgcaaaccttgtaaaagaggaaagttcttctcttgattttttcaattaccacattccaatttcgattgtgtctcctcctcctaagaatgtattgagaggcctttcaagagtttagctgcaatgcttaagtcggtttaaccaatctttatgtatttttttattcgtagagtacattgaatgtttaaaaataactataatagtgtatttgttattcatactgagaaattttatttactctacaatttgacagtaacaattaagaaattgaaagtttgagatttgggtaattgactactaattatagaggaaggtaacaagtgacaaaggatttaagaaaactttggtccacatggcataagtctctctcctccattcttgtgtgtaggggtgttcactaagtatccgatccaatccaatccacacgatctaatccaatccaatccgcaaaatgcggatatccgcacttgcgcggattgg

SEQ ID NO: 164900 - DNA, 1464 bp, Cannabis sativa
  modified_base (677)..(685): a, c, t, g, unknown or other
  modified_base (1317)..(1336): a, c, t, g, unknown or other
aagaaagtaacaactgatctttgcacctccattagctaaaaatatgtttcaggtcgccatttactaagaaccgaggaggtttgttggtgttgaacaagaaattatcaagatcataacctagtagggacaattgcaatttctaagacaagtacttagctcgatcgagcttgattgtttaggaggagctcaacgaattcgtgaagggattccacggatgatttggaaaaccaaagtttggagcagagactattgttgttggagtgtcattaacatcaattttagattgaggatcatttgaagagtttgccatgaacgttagtcaatagctctaatacaatgaagaagtttttctagagagagagagagagatatgaggacgactttagaaaagtttcaccagattgaaaactggcaaaaaactttagttatactgaggtgttatcttatattgatcaagaatacaaaacaattagttataacaatcttgactttaacaacctctaacctgagtaaaaatttgaagctaactaattccaaaacagctaactaacactaatgatattaactgctttatgactcgtttggtatgtcgtattgtattgtattggattgtattgtagtagtgttatttaataaaatactatgtttggtattaacttgtattaatagattgtgtnnnnnnnnnatatattttcaataaactcaacccaaacactgactatgggtagggtctcggtccagttcgagtcagggtctaggattgggtccgatttgggtccaatttcgggtctcgcatccgggtttgggtctcgagtctagtctcgggtccaggtctgagtcccggttccggtcctgagttcagttgctgttcgagtctaggttcaagtctcgagtctcaagtcacggtttagggttcgagtttgggtcccgcgttcgagtccgggtatgggtccgggtttgagtttcggtccttggtccgggtctcaagttccaattcgggtccgggtcggagattatagttgactcctgatcctttgtaaatattataatacaagctaatacgaaccatttgttatgtattaaataatacaatttacattacattaaatttttttgtcgtaataattaatacaatatattattttattatttattatttaatataatacgatccttatacaacttaccaatatggtattggctaatagtcctgtgttttttttacttagtaaaaagtaaactcttattaattgtcaaatcagaaaaaaaaaaaaaacacatatatacgattaaattcctttattattattattattnnnnnnnnnnnnnnnnnnnntattattattattattttaaagagtcaaagtgctgtaatgtaatagaccagagacgtttggttgagagaaatgaaaatataggaataggaatgagaatgggaataggaataggaatggaataaaattt

SEQ ID NO: 164901 - DNA, 1570 bp, Cannabis sativa
ttaagtaactatttaaaactgttgataaaaatttagtattcccaacagtttaaaatcgtagtaaacaaaacaagcaacgttttttcactactacaaataacatttttcatgtctctttttctagtccaacaaatatagtgttggacattaaatttttttaaatagattttaagtccaataataatggactaattttttttttatattatgtccatgaatattggactagaaagagaagaaagacgttgtatatttaaaaatctcattaaatatttttttattattattgggttacattttcgtccaatgcaatgctggacgtgaagtgatttttttttctaaactagtatatagaaattaaattacttttaacttactatattaattaaaataaaaaagaaaataaaaaacaataaagcaaatgtaaatgcttatgataaaatatcaattctctctccttataacagatatacacttctctcattgtttttctaaaaataataataaaataaaataatacttctctcatctgctctctttttaaactatgaaaaaccctagcctcctaatctttcaaccttatcttcttttctcatttagacgacggctgggttcagtggcttgtggacggcggctgggcttcgacggctcgtgaatgaaatgcagggtcttcgacggctcgtgaaagacacgcagggtcttcgacagctcatgaacggtgatttctttctttttttgggatgacggtgatgttggtgggggttgaaggtttgcattctcggatttgggggttttgtaggaggcgcatatgggttatgtcggaggtggatatttctcagattttaagggtttcgtagaggcaggaggtcgtggtttctcagagttggggttaatcggatttgggggtttcttagaggcgaaagttgtggtttcacagagctaagggttctttgattttggggtttcgtaggaggcggagctagattctcgtaggcggagaccgccgtgcaagaagattggccttcgattatttttattctagatctgattcaagggcttggggttttttttttatttatttaatttgtttattttatttcttttaaataaaatatgatgtatatttacttgttgttattaattttttagggtactctttatatttatatttattaatttatgtataattttttttagtaaatttataattaaaattttaaaataaataatttaatattattttaaaaaattaaattaatagtatttcaagtctagtaaaattggactagatacatatgtttgggttgtgtcccactttcacttctagcctagtgggactagaaatatttttctagtccaacattattggactagaaaaatacattttttatgtcccttgatactatgtccaacacaaaatagactagtaatacttatatagtccaactttgatggacttaagaaggtgtttttgtagtagtatttaataaaatgcgattttttaatggacccttatacccgatggtttaaaactgtcgcctataagggtccattaaaaaatcgtcaccta

SEQ ID NO: 164902 - DNA, 987 bp, Cannabis sativa
aattcacattttcaaaactataattttgaaatgagattgttagatagtaaattttttagaaatatttgagtatgatcagaaacaaagaaaaatccaaaatgtcgtagctgatgtggcggatcagaaatagcatagaattgctttgtaaggtaattcttatctcatcatataaaatatatataaaaatcatagtgtggaacgtgatacacgagcgcgttgttgtcttctcaaaatggactttatatgcagccgtttcaacagttatataagtttgaggaatcataacttactacgtgtcctctagtactatattaattttttttttaatatttattatgtcgttttggttgatgacgtgtaatcttgtagttgcattatttggctattggaaataagcatatctgtctatttctatactgcacaacatttctcattttcttgtaaattaaactagagtgatgcatcggactggagtataagtcatgactcatgatgccactcaccaatagccaaatattaatatacttgggttcgcaactcaggtgacagtaatcgaactgaacccaagctaaaactttgtatgtacatataaatggtaaatgatactccaaaggtggtgatgcaagttcccgcagattagtgaaagttgttgtgttgctttatgttatttgcctgtccttattccgttagtactaataaaaaataggatttaacattacaattatactaatgaaaaattcaataatccaatagtatataaccaaacgtatatatatcacttaatcttgacttatatataatatataatatatagtccaatcaatagtatgtgatatataaaaccaattatatgtacatttatttatataaataaatatacatatataaagtgcggttatattaaaaaaaaaaaaattggttaacaaatgtcttttagttttctttattagtttactattatttaataaaatatttttaattaatttt

SEQ ID NO: 164903 - DNA, 1598 bp, Cannabis sativa
aaaaaaaaaaaaaactattcattccagggtgcagctgcgctatctgtatattattccaatgtgagcgggtgcactgtattctagctgcgtggacaaatcaaaatcaaggatccaaagaagcagaaaagtatgaaggatatgggacacgtgtctcagacagtggatagttccacaggtggtaacaacaaggcaaatcaatcacgaagaacatcgttggtgagtcgttcagacttcagaaacacaatttcttgccttccccagattttctctcctactctttgttttacttttcttcttcatcgttttggtcaaagggatccttatacgacgtcgctttattcacttcctacctcctgtctcaatctccacttctagggttttcctttccaaatttcttttttacgtcctcctatggtggatttaccactcctacatatccaattttaaggtaattttgattatttttcaatcttaatttatgttttgctgtgatggttgttaataggcgcaattctcccatgaacttttattttcccttattcatcgaaatacatattttagctgctttcaaaaagaaaaaagaaatatacattttagctatggttgacccagtgtcaaactctcatcattcaagagaagtttaattcttaaagtttgcaattatctttcgttatgtgcatcttcattcactaaaaccttttttttttttttgagagaggcatgttgaatttcgtgatgatgctcataatgtattcagttcaaagggtagttatcacattacatcacattattaaggcatgtgtcagattggcaaagttttgaattgctggcgttgctttcaactttagggaacacagtttgttttattctgttatttattaacaaatagggtgggatatccattttttgttactttttttttgacttgaggagggttttttgtttgatgttaagatccataatcatggttcgtaagggtatttttaaagcatactgtaccttcaattaatttcattaaatatattggaaggggtggtggggattgtaggtggctgaaatgattggtgaacatggctagaacaccaatcattctgtgtttatttttttattttctttgatgaatataagacattattccctcagttaagctaacaaaattgatctattgatctttcaactttcagggtactgttattcactactttggcttcaaacatctcagcatggggctttgtgtgaccaaggtcggtgcattcttagaagttataactttctggtctttatttatttattttttgaaatttttctgttttctgtgtttattgtttcattacttttggcaacatttctttttctggaaatttcaagttaggatattgtttatttatggtcgttcttttaggaatttgttcagatagcctttgaatctgtatgaaactaattattgaactccttcactgaaagaagcaaaactgaagcaagaaaccattatttttttttaaaattaatgatatgtttggattggaatgaagtcaataattttgagagatctggatgatttttatggattattattgttattattttattattaattt

SEQ ID NO: 164904 - DNA, 1505 bp, Cannabis sativa
atatagcccgtttactaccgcgattacagtgtaactaattgggtgacatccatagttattaagaatttatttaactgtgggtcctagtattagaaatgggcattagagttataatttctcaattgtagagattttattaaactctacatgtattatttgtattatatatgaattaagctatttttatgattttacacggcgacaacaaaaaatgcgatggatgactattttaatcacatgggtaagcctagaacctttctcttagtgagatatatattggagaaaatagaataccgagtttgagcggggttgtggtttttgaccattttaaccctaggcttgaattagcttaagttaaagcaccatgggcattttgataatttggcaagtggggagaataggtggctgcttagggaattcacacctagcaaaggttaattcagcatgaattaattaaattagaaacctttattcacttaagaaaaataagaaattaaggaaaaagcaaaattaagagaaattccatctctcgttcactctctttgttcggccaacccaaaccagaaggaaacaagccctaatttttgtattttctgagtattgagcttagattcaagtgattttgaagcaaaggtaacccctagaactcttaattcttgtttctgaagctttggttttggtttgaatgtataattttgtagtataggggttgttagggtttgtttgtcttggaatttattttctaaggttaatttgagttagaatgttgttctagcagctggtttagggtcgtgggtgatggatgcaaaagtttgactttgaaaactcaagcttggttcatccataacatgttttaattatgtatgtctttctggttttctgttgattgggatatattagggaaggtcattataggagttctggaaaatttggtggaatttgtacatgttttaagtaggtttagaattgtttggggaaacctggtgcaaagcggtcaaccggtttgccaggatctgtaaaatcgattaacaagttttggcagattccccgaacaattgatttcctcgattcgtgtctatttcagagccttggttgggtgattccctgttttgtagggtattatacttaagttagtaatagcagaaccttaagttggaggttcagatttcccggaataggttttgggattttatttactcggttttattatgtgattagggcatccatccagcacgagacttttcgtttaggtcggccaactgacttgaatttggaaacgagctaagaatagtgtagaacatgttatataaatgtgactgtatgtttgtgtgaaatgtatatgcaagcttattacggttggtacactaccaacacttgtacgagaatggtacagagtgcgttataatgtatattgtttaaaaaatacattacagtgttaccagcacaagtacaggaaagtatagggtgtgtgtggtatatcacttagtggtactcagggtacgaaa

SEQ ID NO: 164905 - DNA, 1566 bp, Cannabis sativa
  modified_base (180)..(181): a, c, t, g, unknown or other
tgtctcctagacactaagtgctctcttctttagtgcttcacacgaactcatcaactcttggtctgcatagcattgttctcactattgtactgttcaaagagagccatagctagaatcataaggttcttacctatgatctacatggtattatctctagaatcaatacaactaaaaggagannaggtcattacccgctaaacaagggagacgaacttctataaatctttgtctctcttttatcatttattgttcataattacatcgtggtgattatctatcataaatacgactctatttctggttgaccaaattctgagtcaacactaaggatgaaaaataaattttatttatgttcagatcaacttaagttattaatatttccaatacgatatatctaaattactaattttaatcaagtaaatatattgatatttaaataaatagattaaaataaaatagtaaaaaaaataatacttacgttgtaagttaattttttaattaattttagatccagttaagttagtaattttccattcatttattctggtaaaaaaattaatacttaagtattgaaaattaagtttggcaattaattttctggatacttaagtaataattttattaaaaattttatttgggtagaaaattaattttagacccacctaaattaaggaaatttcatagtaagattttaaaaatttatacttaggttcaaaaataatttatttattttcaaatctacctaggaattttcattaatatagattaaaatttatactttgaatataaaattaattttataatgattttattttcaagttaataattttaataaatatattaaattaaatagttaacaaatagtagaataaaaatactactttgtacaaataatgagctttatttttataagcattcgatcttaattgttggtcttacaaggtaaattttctagtaggacctcaaggcacttgtcatccccctaataggtggtcaccattaaacaatttaacatcgtaagatatcgaaagataagtacttcatagattcattttttagtagactcatccctatagatgactacttggaaaaatatttgtgagtatgaaacaatgggagaatctcatgaagtaggaatgagcttgattctcacataaacgggacaacgttagatttttttttatcgataaaaggttgctaaaatagtgtccattttagaagagctcactactctatttaactagtgatatctttaactctcacctagacgagacactgtatatcatttagttgataactttagaaaatttaaaatatgtttagttttagtatttttcttatattttccatacttgattatgtgttaataattttccaaatacatgtgaatagaatttatattgaatattgctttaatttatgttattgattatgaagtatcaattttgaatctttattgttggtccaacttaataatttagatggtcatgttggggattattttactaggatctagatttactaccatgtatattacttaacatcctaaataagaatttctaaaac

SEQ ID NO: 164906 - DNA, 3339 bp, Cannabis sativa
aaaataatatagcaagaattgtgagactcatttgtaatcaaccaagttttcttaggccaatacattgactcttggactagagttcattaatacccaaactatgtaaaaatctccatcatattatttaattacttatttaatagctcttatttgacttaatttttacaaatctcggtaaacaattaagtatgggtactggagaaggcctctcctaaactctgcttggaaaggtcccttctgaaccagtcatccaaaggatcagcatgatcctcatgaagctataattcaggataactggtcaggaacgcaagaataaacgatacaaatctagacattttgtttggaaccgtaatgacaatgaatgaggaaatttaggtatggttcaacacatgcataattcatattcaaccaatgcatgaaaacacaccatgacccaaaatacccagagtttcacctacacttaaactaaaataattcttcaactttaaaattgcccaggctaaacacacccaatccttacattcgcatacaaataattatccataatcaaaactttggcatacatttctgtagcgtcaagaaattatacaattcaaggaataaatggaacttacttgtaagaggaagtggggatagatgagtgtggtgagtgcccaatggggattcatgtcaataccgatctggacgtcaaactatttcgatgaatgggggtgtctctctattgggttcagtggcggtgcgtttgtatatatttttggctttaatttgtagaagattatggataatgatgtcaaagttatcatacattcactgagggcaagaatagagttcattggtttcttcactctctcaaaaatttgaaattgaaagctcgaatatgtaaaaatggtaaaaggtccccctcactcctatttatagttgaagttggcgatcagcatactcatcgatcaagggctaaaatttcaccatggaaagcacaataatctatccaatggtcgaggagctagaaaggtagcatttatgtgccttactagactcgaggcatttgtctatcatcaatattctccttgatgtctgcgctgatattagatagatgtcattacaatatcctaggcaccacacgcttttgaaggacacgtgagattcacaaaccaagaagatagggacacatgtgcattgtaagttgtatccccgctagtcctcgacctttcacattctgtgatatggaatacaaaaagtccaatgtctcaaagtgatccatgtgtcaaaagtgcctgaagtcatccgaagaaagactgcaagcttctgccagcctcaagttttagaagtttaggggggtaaatgtcatctatgtttctggatgggcgagacgttgtatgatcaaagtgtagttggtttgtataagataaggcccaagccttccaatatacaaaagcccagtctaaattggagaaaggcctgagcccatctaaaccccaagaacctcgtcttcaaagacgagacccttttgcttctagaagcccattcttccttccaagagatgtagcaaataaagacctctagacaatcgatgaggtttatctggagaagaagtccaagaggtgcgtctgaaaggcccttgtagggtgacgtggaaaatcatctaacgcctagccctacaaaatctgaccttgtctcctatgtcagaacatgatagtacgagcactaccaaagggagtacgtcctcttttctaaccaacacctactgatattcttatctactgcagcagcccccacacgtgacacttgtatagactgcgtgggcccaatatgtacggatccctttgccgcacaagccaaacacttgtagtggacctcaaagtcatgtattttatgtatttacctcaacaatgggcctattttgcacaaagagcctaaactggtcacgtgtatgcttgaatctgaatcttagcctataaaaattctttttctccttcatgcaaggggggcagataagaaaactcctaatttctctctaagctgtattcttcttctaagagaaatcgagagagaaaaataatatagcaagaatcgtgagactcatttgtaatcaatcaagttttcttaggccaatacattggctcttggactagaattcattaatacccaaactatgtaaaaatttccatcttattatttaattacttatttaatagctcttatttaacttagtttttaaaaatctcggtaaacaattaagtgtgggtactggagaaggcctctcctaaaatctgcttggaaaggtcccttttgaaccagtcatccaaaggctcagcatgatcctcatgaagctatacttctggataactggccaggaacgcaagaataaacgatacaaatctagacattttgttcggaaccctaatgacaacgaatgaggaaatttaggtacggttcaacacatgcctaattcatattcaaccaatgcatgaaaacaaaccatgacctaaaatacccagagtttcacctacacttaaactgaaataattcttcaactttaaaattgcccaggcattacacacccaatccttacattcacatacaaacaattattcaaaatcaaaactttggcatacatttctgtagcatcaagaaattatacaattcgaggaataaatggaacttacttgtaagaggaagtggggatagatgagtgtggcggtgattagcctgaaaagagagtggctaatggggattcatgtcaatactcatatggacgtctaactactcggatgaatgggggtatctctctattgggttcagtggtggtgcatttgtatttttttttggctttaatttgtagaagatgatggataatgatgtcaaagagatcatacattcactaagggcaagaacagagttctttggtttcttctctctgttagaaatttgaaattgaaagctcaaatatgtaaaaatggtaaaaggtcccccgcactcctatctatagttgaagttggcgatcagcgtactcatcgatcaagggataaaattttaccatggaaagcacaataatctatccaacggtcgaggagctagaaaggtagaatttacgcgccttactagactcgaggcatttttctatcatcaatattctccttgatgtctgcgctgatattagatagctgtcattacaatatcctaggaaccacacgcttttgaaggacgcgtgagattcacaaacctagaagatagggacacaagtgcattgtaagttgaatccccactagttctcaagctttcacattctgtgatatggaagacaaaaagtgttggatatatttttccaggatctagatt

SEQ ID NO: 164907 - DNA, 567 bp, Cannabis sativa
tttttactgacttgtgttttttgtgtttgtttagagagaaaatgccagatattcaattaggtgctcataccataagatctcatggagctaaagttttgagaagttatatgcatgattggttgatactctttcttcttgctgctttggatcttggtctgaatttaattgaaccttttcatcgatttgttggggaagatatgatgactgatcttaaataccctttgcaagataatacagttcctttctggggtgttcctgtatgttttttttattttctttctgagaaaattcaatattgtttgtttggatagaaagaaagaaagaaagaaaaagaaaaatcattttgtttatctcttaactttctggtttttgtttctgcagataattgctgttttgttgccacttattgtgatcacagtatactattttatcagaagagatgtttatgatttgcaccatgctatattaggtactcttccttttcaaaaatatttgtttctttaatctcttaaactattgagattgttgtattcaagagattctgtcaaatgttgttcaattttacta

SEQ ID NO: 164908 - DNA, 766 bp, Cannabis sativa
gggaccatagaacagaacgtggggtatactctgaaaacctcatcccaattcatgtattaagacaggctaaaaacgctattgaccaattttagtttcaaaattatttgtattattattattatgatttgtcaaatgggacagtttctattgatgagaaaaatagaataggttaggaagaataaactgaaaccattgtttttaaaaatatatatataagtttttattgtattaaactgaaagtggatgtgagaagcggtcaatgggtgaaagctgaggtgtttcaatggtggacacattaaggtagtcaattctcaaaactatatttgagaagtcaaacgagaccgactgactcagaacaaaccaataatgattaatgacccacgatgccacaaagaagattagaaaagtttcgaaaattgtgtgattatcatcatccaaaccaattgaccttcttttagaaaaagtgcaaattttataagataataaataaacattaaaagcataaaaaagaaaaaagaaaaaaaaaaaaaaaaagagaaatgctaccatagtctctactctagcacaatctaagaccatcttcaatttcaagtgtaagtattatatttagaagaaaaaaattgatatatttacattgatttttaacatggtaaaacacaattacaaaacaatataaaatttattgtctagttaataattattaaaaatataaaaaataatatatttatcattgactctattattattttattatgtataataataa

SEQ ID NO: 164909 - DNA, 1193 bp, Cannabis sativa
  modified_base (1151)..(1151): a, c, t, g, unknown or other
aaactgattctttagtagttgtgattacaaatttctgaatctcaaacacgcaacaaaactgggaaaaatcttttcaatggaaaaggaaaaacacccacaaaaatgtggcacattaatataacataattatacattaaaatataccaacctaagcttctttttaaggtggtgtttagttggaggtaataaaatgacatagaatagaaataaaacaattttcattttattttttttgtttggttgcattttaaagtattgaaatgacattctaatgtaatgttctttccaccattttactagaatgactattccattttaaaaatgaaggaaagaccagtctaatgtaataatagaaaatgatttttttatcaatttttttatacattttaaattttattccattttattcctattcttatttctattcttattcctatttttatatttttattcctctcaatcaaacgccacctaagtatatttgattataataataacgtctacaaatattaaataaataaaatattaaaaattcaataatctataatatctttcgtatttcaattttcaacatcaaagtatgaaagatgacatgcccacctccacaaagtacaaaaatttcgaaaaaaaaaaatatttatgttatattaaatgtgattataaaattaaagtaaatattataatttaaatttaattttattatacatattttttttattttatattatattaaacgttcattatatttttttataattttttttaaaaatatattttcttataattctgttaaaaaaaaagtgtataacatttcaaaaaaaaaactataaaattaaaatattataattaaattaaaattataattaacaataaatttaaaatattattatattttatttttataaataactcttaataaaaaataatattatttattaaataacataaaaaaaatactaattatataactcatgtcttaatgttaatctaatatataggataagtctatggcctaaattgggtgtgagagccacataatcggatagttttggagtgaggatacattatacctgctgtgtatttgtgcatatgggaatctagccttaattaacttttatgtttttaggtttagtaatatttttttaattaantttttatttttaaaattaaaaatataaaaatatttttaaaat

SEQ ID NO: 164910 - DNA, 1202 bp, Cannabis sativa
ttggcagtgctcaatcaagaattgatgttgtattagagcttgctgaaaaaccaattgatggaatttcaagaacactagcgacatggtctcttggtgggatgttcctcttcaacaacgatggactgttagtcaccgcctcttgttgaatgtttcttgctatccacggatgcatcgataattactgataggggtttgttgggttgagggtgatttgtggtgatgatggtgttgtttggttggcgtgggcagttagactcttgagagactttagtgttaatgtggaggagcttcttcatatgaggatgagattaatgttgacatacccttttgaatttagtcttgctagtattaattgtgatttaactgtggatatgagttgggtgaataatctcattaaaatgttagtttaaaaatctattattttagatattacttttttaatatttgttttaggtggtagtttttgtaataccgttttgcattctgtgaatgatgttatctacttttattactaatatatataaaaaaaaaatgtatttagacaaatgcttacccaaaatctttcagttgatttatcttagatcaattttttttaaaaaaaaataaaaaaatttatagtatatcctataaataaaaaaaaaaaattacaataaatacataaagaaaaaagcccataatacttttggttttattttttgtatttttacaccacatactgactttttaaacttttttattttttaggtagaatttttttcaaaaatattgtgtaagttttatactatgtactgtgttacgttttcactgttgtttcacggatattttttagttgttccattgttgttttaattgttcaattttgttgttttacggttgttttataaaaatacagtatttttgtaaaaaattatgtgtgacagtaaaattgtaaatttttaccaaaaatctagtatttttgtaagaacctttttattttttgggataattaagttgaggaatacctcttttttacatccattaatcaaaaatacttttatataatattttattaaaatctactcaattttatgagtgagttgcataatatacccttgtcttgcacttaattgtaacacatgatttacattaacttaaagagtataatagggacatcatctataaaagtgaatatatcttaaagaatataaaaataaagataaaaa

SEQ ID NO: 164911 - DNA, 570 bp, Cannabis sativa
  modified_base (524)..(528): a, c, t, g, unknown or other
agggcataaaacctaacaaagtcaacattccaaacttgagagcccgagaccataagctgagccaccttagcgtttcaccaaacttggatgagtcaaaacaataaaaagattcctcttactcaataaccaaggttgatttaaaacataaacataagcaccattgacaatactccaatgatatccttccattaacaaactttgagactccatgatagaatatcaaacaaaacttggattatgacccaatgtagcagagagaaaagaaccacatgaataataatcttcaaaaattcgactgacaagacaattattatggactaacaactgtcaaccttgtttgccgagcatatcaagattaaaatctcttaagctgcgaagacccagtccaccattatcttgtgaaccactaacttctcccaagaaatctagtgaatatccttacttgaagagactgaccaccaccaatatttacacatgagttatttcatttcattacataattgtgttgggaatattttaccagnnnnnagatttactaacaagtatgttcattaacatcctaaatatgaa

SEQ ID NO: 164912 - DNA, 1447 bp, Cannabis sativa
tattttaatttgaaaaataacatacaaattagagtaaaaaaatatttaaactaaaataatattacgattaaaattatataatatttaatttaaattaattttatatgcacaattaaattaaagatttaaaatatacaaatttaaattttaatcaattactcttttatcagagtacttcagtgagatccaacctaagctcgaatgagactatatcatcatcttttcttttgcctaattaaggaaaacacaacttattgatatgttcacgtttttatagttcaatataaaatgattattaataacaagatttacaaacaaatgtgtgggtggttggtttaataggaagaaattacactaacacctcttttaaattgatgtctttaatttttattcttttttcaaaatttattatgtttactttttttttaattattctatcaattttatccctatcacttcacattagtttacatttttctctaattaaaattttgctccaaactttctcacgaacctacacattcatctccaaaaaaatacaatctatcatatttgaaattgtgtctttattatgtgagagtatgagaataatttgagtacaatactcataaaatgagatacatttgaatccaattttatttagaggtaaatttggttacttctccccttaattttagctacaaaaatgtaaaacataataaaatagatagagagagaggctctcattaatagggttgatcataaaataacaaattaaattcaatttacacgattcaacaaattaagttagaccaacaatgaagactcaaaattgaaactacaataactaataacagaaaacaaattgaaagttcaatataaattcatacacaattcaaaatttattatacatttaataagtaagaaagacatgtgaaaatacagaacaatcatatcttaaataatttctaaggtttccaacaaattgatacagtgtcccgtttaggagagagtcaaagatatcatttattaaataaagtagtcagcttttctaaaatgaatactattctagcaaccttttattcgatcaagataagaatttggtgttgtcccttttaggcgagagtcaatgtcattctatcttatgagcttccactattgttactttgtaagccctactcttagcaatcactattggggtgatcgttagcaagaataaaagacttacaataatatttatctttcgagattctacagcgttaaattactaatgaatgaacatctattagggatgaatctcatcaaaataataactatgtagaactaataatggagatcgaatatccttgtagtaaaactcattattttaaaggatcatattttcatttgatatgtatttaaatattaatatatttatttaattaaaattactaatttagataactctaaatacaaattttaatttaat

SEQ ID NO: 164913 - DNA, 1859 bp, Cannabis sativa
  modified_base (1831)..(1833): a, c, t, g, unknown or other
cctagtcgcctatgccacacatcgattttggaatgtaaagactcactgaccacaggtcggtttacatgaacattaaagacagttggactgacagaaacactagaagatttcatggtctttgttgaccttgaaggaaaggaaataagggcagaccgaggctgaggatgagggtgttggatctggtataggccatctttaagcaccccttggagcagaactttctttgttgttttgtccttcaccaaacaaacatcagaatagaattcaatcagaacattgttgtcagtggtgagttttaacacactaatcagattttttgctattttaggcacatgtagcatttgttttaacataagaagctgaccagaattagtctttaaaaaaccagtaccaatgtgagagatagcgagcttactgccatcaccaacggtgagagtttccttaccaccatattcacttttctggctcatagagttagtagccgaggtgatgtggttgctggcgccactgtcgacaaaccaagcatcactatccagcatcttcggtgtggcaataaaggcattgtgaccttgtttttgctggttttgagcattaggatcgtgtcccatgaagttttcatcataacgattgtaacaaacggctgccgaatgaccaaacttcccacaaacttggcaggtgggtcttgagttgttattataacgccctcttcctctggatctgccacggcttcctcttccaccattattattggtttgattctgtgaatagaagcctcttcctcttccttgaggcggtgttttggctaccatgtttgcttgggaagcaactggtggaggtgtagttttaggcccttcgagactttgcattctctctactttgctatcaaagctgaggagtaaatcttgtagcgcctgccaagtagttttcgatctagcttcgatctggacaatgatggtaaggtattctgcgcctaaacccgacaatacattagaaataagatgagattctggataagggtcatctgcgagtgcgaaggaatcaacccagcactttttctgtcataaatattctgccatagttgaagatccctttctgtgagtttggattagtgtgcgagtgtcgtccatctttgcctttgaataagcgccattgaggttctcaagtgcacgccacaactcagcagctgtagaggttcccatgacttcagtagcaatcgtctctgtcatggaactatatagccatcccatgagaagctgatcattgatgatccaatgttcgaattctgggttgacacttataatctcgactccttctgcatttgttcctgcaggtaaaaattcaagagggcagggtttggttccactgagaaaaccatcgatcctatagcccctgactatggtggagaccatagttttccacaaggtgaaattgtttcgatcgagttttagggagaatgcctggtttaaggtgctgaaatgttgagggtaggtgtttgggagttgagacaaactcgcagtggagtttcctgtggcggtagaattattaccagcagagctcatgactggagttgctggagagtcaccttgttttggtgtcgacatgggcggaggacgtcgttggctctgataccaagagaatttttaggtatatatctaatataatgaactcagctcaatagagactaaggcagagcatttcatttatagacaaagtcaattacagggtaaaaggcaaaagccaatacaaatacaatagatggcagtatacaattgttgggttttgtgccctaaataaaacccatttcaatgtaatcaaatttacttattaatannnatcagaaataacattttatgttccat

SEQ ID NO: 164914 - DNA, 1016 bp, Cannabis sativa
  modified_base (975)..(990): a, c, t, g, unknown or other
ttttgattatgtttttgaagtgccgagagagggtctagggggaggtccttttcttttttggaaagatgttgttaatattaattttttatcctattctagtaatcatattgattgttatgtaaatatggatggtaatataagttttcatctttcttgttactatggctccccttatattactagtaaatctgcttgttggactttgcttaatagactatgtgatgtagctcctttagcccattggataataattggtgactttaatgattatttaggccttaatgataaatccacttgttctaagccttctccttataccatgtctaattttcaatcttttgtttataagtttaatctttttcccatgccttatattggcaattgttttacttggaaacatggtaatacttttgaaacactcgattggagcatcgtcaataaggcttggttagatcttttccctaaagcaactcttactcatcttccctattttggatctcatcacaggtctttaaaagtttttctctctgaccctaggagtaaaaattctcataccaatagattttgctttgaaaattattggttgtctgagccagattttcatagcctagtcaagactaattggtctagtgagaaccttggtgggaacagtaatccccattcctcctttctcaaatgtcaatccaactgtgttgataaaataaaagaatggggtaataaaaaattccatgtcaaacacatcattaagaatcttcaaatttcattggataatatttaatcatcctttgtggttaatgatgctgatcttcagcgtgctaaaaatcttcaatctgctctgggtgctactctttataaggaagaagtctattggaaacaatgtttaagagcttcttggctcaaggcgggggacaaaaacacaaagtattttcatctcagagttctaggcgtcgaaataattgttggaaatattttacnnnnnnnnnnnnnnnntaccatgtatgtttcattaacatcct

SEQ ID NO: 164915 - DNA, 682 bp, Cannabis sativa
  modified_base (635)..(657): a, c, t, g, unknown or other
acattttcaaaccaattttcttgacaaaatagattgaatagtataactataactcatgccgaatgctacatatgaagataatctgttttaatccaaaacttgatacaatacaaaatcaaacaattacattacatacaccattctctactcatctacttttaaaaataatctataaaaaaaattgtaatagtactcttattcagttctattagaaggcaaatgatcttgatcaaggtcaactctaggtgtctcatatttgatagtaatagtttcatattgatcatcaccatctttcttcacacactcactaaaacaagcaagatttccaagctcctcaacttcatttatgacaatgtcaagcttggccacagcctcaaccaacaatgaaacaaaagcagctaagggaagtgcttctgagaactccagacttgttatggtgattttgcttatttgcttattcaacttcttcttctgatcagtaccatcagttaactcctttgatatttgagatttctcccttcttggaaatgtcaagaccccagaaaagaatttctgtggcgtttgttgtgcttgttcttgctgttgctgttgctgctgttgttgctgtggctgttgttgctgttgttgttgttgtnnnnnnnnnnnnnnnnnnnnnnnttttgttgttgctgttgttgttgtt

SEQ ID NO: 164916 - DNA, 649 bp, Cannabis sativa
  modified_base (558)..(563): a, c, t, g, unknown or other
gtaaaataatttccaacaaaaggcacctgacaacaataaaatgtgtagagaactgaaggctggagtgaagcaaaggatagatttattttggccaaaaaaagcatctaaaaaagattgtgtgtggtattcaacattgtaattgctgattttattcttgattattttgtgtatatacagaatgtatagaaacatatcaaaggcctgaaaattcgggtgcttttaggttgtaaaaattttgtgtgcttatacaatttactgattcatcaaaaaaaaaataattaattgctagtgtataaaaaaataaagaataaaagaagagaacgtgcaactgctcaactaaatgtaataccatcagtacaataaattattttattcttcaaaatatattgaaagtctattataatttcaatgaatacaattgtataacaaaattcgaattataatttcaatatataatagatttcattacatgttaaaataagcaacattttgtaaatataaaatattaaaaaaaaaacataatatatacttatattataggggaattaccccatatannnnnnttttttaacttttttttcaaatttacggtttgagtttctaaaatggttgcaacgctagttgcaataggagtttccatacgattttt

SEQ ID NO: 164917 - DNA, 1561 bp, Cannabis sativa
  modified_base (1505)..(1515): a, c, t, g, unknown or other
aagtcaagattgagtgatgtgatatgcaccgagtctcaaaattgcacatgactctctgtaatatgctgtgttgggccaatcaatcctcgagccaccaagtccacaagtttatgagagagcagttgtgaattaaccgtcgagccaacaagctcacatgaatgcaagcaagtttatgagagagcaattgtgatttgtatcttgctagacctagtgattagtatgtggcaaaacagaatctgaggaggaggctattggataagttaaactcaagcctaaaacttcatatattttaggctagccaggttgcaaaaattctaagctacacccaccatatctagatttaagtattttgggtagttgagtaaaagtttaaaattaagctctttatattgaaaaaataatttgttagaccacaattctattacctactttttttatataagatacgttctaaattttttttaatataaaaaaaaaaaaataggtcttttttttaaagaaaaaaaaaaagaaaagtttaagaggtcttgtgcaaagactcaagctgaccagtcctcccatattaataatcgacatccacagattctattttcctatcctaaagacatccaaagatgctctaagaaaattagacaataaaactttaaaatttgtagttataaaatcgcattaaaaaaataattataaattacataaataaaaataaattaataacaaatttttaagaaagacatcaaattacacattgattaaataaaacaaatatatattaggacacattagaagttgacaactaagcaaaatgattattagttattatatataactataattataatttcaattatttttatatttcttttaatataatttacactcagcagctaagttgccaagttttaattctagaaatttggtaattggataaatactttctttgagttgattaaatttatcaaagagaaaaaaaaaaatcaaaattcttactacaattaatatagttctaattttctattttgcaataatattgattatagaattataaataactaaacttatattgcactttcacatttcttttatatataagttaatataacataaatatttatttttttgagataataacataaatatttattattattaatgttaaattatcgagcttaattttaacttttaccttgatgtatttttgaactagttcatttatgttatacatgttgtgcaatatcttagtatttaatatctaggcactatgcgactcttttaatattgtgatgtgttaaattcaaactcatatatttttatatagtgatgtgtttgtcttataacttcgagtagaacttgtatcatataataaaattaggttattaattaattttgttaataagttgtgaaaaagaaaaaattcgtaaataagaacattttttttaagacaaacatttaacaaaataattaaatttgattttttgcgtggaaaaaaatgggtaaataccattttnnnnnnnnnnntttgcaaaagttacagattggactctgtgttttgttaaatgacaaa

SEQ ID NO: 164918 - DNA, 1306 bp, Cannabis sativa
ggaagaggggctccgttggaattactaatttctttgggcttgacattataccatggatgaggaaattgaggaggaggagcagaaaactctgatttggtctgaggtattgtcttgggcatcatttgaaattgtaatggaggatcaggagaacgtttgttactgggcccagaaggaggaatgggtcctttgggcttcattccgtaccatatcttgctttcagagctggatccagttggtggactaataaccaaggtatctgacttcacttccatcaattttctagcctcacttattggactagagaagaacaacaacattaagactatcatcaccacatcaaaataactcatcctcatttctttctttctttctttctttcttttttctttttaagaaatgagaccctgaaaataaagacaatatctgctccttaaataacaattacaaattctaattttaggggtttggtgtctttaccagaaaatgaatggtgtccatttataacaattaattagggcgtgctttctattatattaattgctaatttatattatttattttcgcgtgataggagacaattaacgttaatacgttatattgttactctttctgctctatttttagctttgtcacatattacaaagtacaaaatttcttttgggctttctttattagtctaccagaatagtaaaagaattaccataataatacctcatatctttatattttctatttctagtatcaaatctaaacgtatacaattttcatcaaggagaatataaccatccttttatatattttgctattcgttttaaatgggataaattgacaaggtattaaaataagactaaatatctcttttaaattaatgcttttaatttttacttcctcttttaaaatctattatacatatttttttaaatcattctaataattttatccctattacttcatgataatttctatttctctaattaaaattttgctcaaactttttcacaaatctacacatctataacacaaatgtattatttttaaaattattatatttaattatgtgagagtgtgaggataatttaagttcaatactcataaaaaaaaatatctttaaattaaattttatttaaagatgaatttgattaatgtaataaaaaaaaaaaaaattctcaataaaacgagtataacattctttttctgtagtttggtatctgacattgattatatatatttttatatttttatatatatatacataaaatacattaacgcgtttggttgggaggaatgaaaatataagaataagaat

SEQ ID NO: 164919 - DNA, 1604 bp, Cannabis sativa
aaaaaaaaaaacctatatataaatgtaattagaatggatcggtttttaattgaattttaaaattaacatctaataatcgatccaattcaattaaaatccaacttttaacatttaagtcaatttaattgtaattgaatgtccaatttttttataattagattagattccattcaattagattagataaaatacatgcattttcttactaaattaatatccatcttatttgattagtaaagagagcttctacaatggataggctttgcggcagttattcaagtgcaccgtaggggctggaaaggccactaggaacttcactgtttccttctttagaattttgtttatatactaaaatgatttttcctttgtttttgatggtttatgagtttagtgtattggtatttagttttagtttgatatatgtgagagtgggtgtagtatatgatggaccaagtatagttgatagtgtttgatgtttataatgggacaaaagagtttagtttatattggagaagagtggaaaggataataggctttctttaatttttgtttctagtttcttggtcactaactcaaacttaatatttatagggaattaaggttggtgctatataagcttctagatttttcttctttgttttacaatgttaactttataatacattttaagttataaaataatattaaatatagaaaaaaaaaataagaaaagagagaagagtaaaaaataaaaatttctcactactttattttaatggagtgatctcttatttatacaaatatgtgagctataaattaaaaaactaaaaagaggaatagaaattacaattaatagtaattaatagaaaaaatttgattgaattggacattcatatatataatatttcataacactcttcattggatgtccattataactgtcttattaaaaatactgccagaaaacttaataggacggaaattcggtcaaggaaaaaatagtgcagtatgaattaactccccctatttagacattcgtggatatcttctaatcgatgaagtccaatcttgcgaaccatcttctcgaatgttgatgttgataatgactttgtgaataagtctgcaagattgacacttgattgaatatgttggacaccaatattcattctcttgaaatgtattaactgaagaattgtgttttcattatatctccttcaatgtaccctctttttagttgagcgatgcaatagtattatcttattagagaattgttggtattgatacttatttattaagtgtaatccatatgtttccctgctattttggcaagattggagactgtggagagggagtagattgctttgagggaaggccagaccgctctgttaagaggacagacagagattatgggtcatttgaagaccataatgagactcctgcaagatcctagaaggccgacaccagatacacagccacagccacaaccataaccacaagaagagcctcattcaccgaaaaatgaaatcattatcccaaatgattatagaccggatgatgatatgttctgtacacctgagaacacgaagatcaccagcatcggggatgttagaaattattttaccagg

SEQ ID NO: 164920 - DNA, 1552 bp, Cannabis sativa
  modified_base (1495)..(1498): a, c, t, g, unknown or other
ctaatctactaacatttcaagggtgtatatagaaatttgcacaattatagccagtcatgttcacccttctattatacatatttatatatagggttccaaatgtagtttcgcttcgtgaccaatcatgtttcgtcttacaatcaatgtaatatttttttaaattgccaaaaaaaaaaaaatttgtattatatgtatgcataatgcatgcatgcgtctattaaaaaaaattgtaatttttgtgtttactatatgtacatcggttgggagaatcaactctaaaactacaagaattttgtatagtagtaatgttggtggtcttattcttatcctttcgaagttgtgttggtagtgtagtcagtagtgtggtatatgtctactcccttcgaattatgaagaggatagatcgataatttttttctaaagttaagttgtaaatgagcttgtatattaaagatgaattattgacatattttcatgtgttattaaaattgtatatccttaattaaatatgtaatagtaaaaaaaagaaaaaattaaacaagtgatgatctcataattcataagtataaataagtttagttttcaccaccgacattcataataatgaaagtctatataactataaaaattagggttttaccttttcattttaagagcaaaattaataaaaattaaaaaaaaaaatattagggttaatattttttttatttttattttctatatttaaagccgtgacataaggtgtttgattttgagtattggatataaaatataaatatggtggcataacaaatctaactctttttatgaaaagatttatgtggggtctctttaaaatgtgacccttcaacttaactcaaccaattatatatttagtataaagtataaactatcaagtaagagctatgtatcaatgtcattgttaaaaataggttaagaaaaaaaggtgatttgtcttctactattttgttaaagcaatttcaatattaattaaaagtgtcaaacataaaagtattaattaattctaaatgtgtctagtgggaaaatttctatttgcaaggacataatgtcaatgattaaattgggttatacaaattttgggtcacttaattaattatatatattttcatgaacttaatcatatgtttttgtacgggtattgagatatgatcattatgaatagtgggtaataagtagttagtggaggtaaattcagatttaaaattgatgaagaagacacttaatcattcgatgtacaccaagatattataaaaataatttacgctataaatatttaagtttaacttttagttataattttttacagtaataatacctatttatatttttggaacttccgtaagtaattagtcattaagtgtcgaattaatgaccacgtggcagtccctaatttgttcatgtcattaaatttttattttttattgaaaaattaatttaaataaataaaagggaattttttttttaattttttttnnnnaatttacggtttggatttctaaagtggttgcagcactagttgcaatagggggtt

SEQ ID NO: 164921 - DNA, 1736 bp, Cannabis sativa
  modified_base (1663)..(1669): a, c, t, g, unknown or other
gcgggtgccgccttcctccgccgctgctgccgacaatatcgaagagtcatcgggcgccaataatgaattggacccttcgtcagaaccaccactcccacggcttccagaaacgtacgtaatccaaatccccaaggatcaaatttatcgtgtaccacctccagagaatgcccgaacagccgaactacgtttacgtaaacctctaaacaattctaaagctcgtaagagcaccaaccgtgcatgcctattcctgctatgcatagtaataacattactggtggtgggccttgtaattgggctaactctgttggttatgttctgttctttgagccttaaacctcccaagttctcggtccaaaatgtgcatctcttgaatcaatcagaaaactctactaatgattttattaatactagtagtagtagtaataataataataataatttacaatcttacgctgtgtacgtgaaggtagacaacataaactccaacactggaatctcgtaccaacaagaaggtagcgtaacgtcgttgacttttagagataagaacatcggtaaaggaacgtatccttcaatgtttcaaacaggggattttaacagcaccaccgtacgcctcgtccttgatggatccaaaggagtgtttatccacgaggagaaattacgtgaacaagattttaataaggataagttacctattgctctgagtttgaaattagatattcctattcggatgtatgtttggatcttggagatttggaagaaagagatttttgttggttgcaagatcaagttaaccggttggaactccaaaaattctaaagtcatccagggtgcttgtcataccaagttcaggtcttgatcagatatatataaaatatatgcgtttctatattatataaatgttatttttcattcattagttggtgtacgtttttgtgatattgatgagagtattgatttggcaattcattttacacaatcgtatcttatttatcactatctacatatatatgtatatatttaaagatcgcatgtgtagaatttaattacaaggctagctgcacatactatactcttcaaaaacaatattcgacgttcaatgtctataattgactgttctcaggaatatgttagattattaaaattcacacaaccaaaataaataaataaaatgataaaagggcatgttatactcaaaaaaaaagcacgaaaaacacaaaaccaaaactataaggaattaattagttcatctcagcgctatagcagcctgataaaaaactaagaggaagtcccaattccaatttgcaatttgtttactagatagattaagccttttttgcccctaattaaattagcccctacgaaatttgtctcacgttcatgtggcttgtagttggtatcgtgatacccttgcattctcggatgacaccagcagctctttaatatcatgaattcaacccatcattaatatgatattgttaatagatacacaattagtagagtaaatatccgagtcaagaacaatgttgaggtatccaacacattacttatattgagcattgctacaaggcagtgccattaccatactgatataataagttgttagataaggtcttttgatttattaaatcaatgttgaggtttcaatggttacatttttattgtnnnnnnnatggttacatttttttaagccattggattactatttaatggttgtgattaatttggaaattaaataa

SEQ ID NO: 164922 - DNA, 1983 bp, Cannabis sativa
aaaaaatacttgtttttgagtaatgttttacttttaaaaaattataagggtagaaacttactataactatgtataatattttagtgcatataacttaaaaataataataactattttagtgatcatttactctatatatttatattaatggtttagtttcttcctttaacaatatcttagatataattaataaaaaaataataattactcactttttatgctataatttaattaatatgtagaagaaaaaaaaaacaagatacaaattagttttggtatacaatacaaattgtaaccattaatattctatggctatattttccttataaaaaataaacattttttttaaataaattaattaaactttcaattgaatttaattgtcacatgctcttgcctaaattatgatctgaatttgtggtaatatcattgattgattagtatattttgctatcactttattgctccaacaaaaaggcacccaaaaaaatcactaaaaattaattattttgatatcttttagtaaatgttggttagtgatgttaaaaaaaaatattgaatcaaaataaagtagataaatacaatattaataatgggaatatagaaagactagagtgatccacttttaatggttggaagttgaaagaggagagagcttaaacaccccataaggatcaaattgtaaacttttaactataacataatttttaatttaattagtttggtccttattaaattaactaattgccaaatattatttttgttgtagatatggtagctcacattttaattaaaaatcattattttcttaattttttttggtatttgaaaagtatgtatatatatatctcttttatattaaatgtagctatttaatagatattattggtttaagggttttttttttcattaaacttaacagttaaaactaacactattaaattaatcaattaattattttttttttttgaatttttattttttcattaaagttaacagttaaaactaacactgttaaattaatcaattaattattttatttttttagaaaaatatttttaaatattttaatttaaattaaaagtatccaaaaaattatattattattttttctatataaatcttagtttaaatttaaattagacgttaattcaataattaatcacattttataacaaatttattagtaatattatttaaaatatctaaacttatttacttattttattgtttaataaaattagttaaatatatattttttataaataaatttaaaatttgttaaattttatatatttaaaaatataattgaataatattagatttaattttattattatttttaaattaataattcaataatagcaattttaatacaatttttaacaaatatacattacatattactaataccaactagtatgtatagatatttgtaggagtttgaaaactatatattgagttattgtttgaggataaactataaaattttctatagtttatagtatatatgttatatatatatacatatatatataaatatggggagtaattatagacttatagtagggtactactttttttatcagttttaatattttttttaataatctagttatttttatatgacactctatagtatagttatgataggcatcacatcctattttttttttttaaaaaaatataagttatttacaaagtcaaaaatagaatacaaaataattaattatacatgtacaatagacactagtaaaattaaatgttccaaccatgtttggacactataaattattttaattttaaggtgaaatatttactataactataatatatattccatatcatattaaaaaaaattgaattataatttgttcaaactcccaaaataaacaaaaatagctcctacataaggtcaaagtactaaagtgacatttaacaaaatatcaaaaatagcatgaaaactttgtattgaacaaaatg

SEQ ID NO: 164923 - DNA, 910 bp, Cannabis sativa
ggcttaaatttatttcgtgtaactgcttaatttgttaatagtattgtaacagactgtttatatgagaatttaacaacaacacatagataatatatgtagttataatggtaataccgtttcaatctcaagatactaagttcgaatctccctttctccatatgtaaaaaataataactcgtaattaatatatggaataaatgataatagtatagtaaatttacctttaagattagatagattaattaaatggattatccaactatggttgattaactgaattttaaagtatctatttattaggttttttccatttttaatgttaattagggtttgaaaaatccaacaagtgaatattggttaataaatagaacaacttaatttaaggtttagaaacataccacttcattttgatcctatatttgaattgagacaaacaataacagagtagattggattgggctctttttttgtattttgagtatggtttttttgaaattacgtgtatatctgtaaagttctccaataattacgatggtccacacaagaagaaaaatattgtaacagtctccgccatgaaactccagtccgtctcttccccaaaaacccccaaaaccaatagccgaacccccagtttatctgacttcgaccgaaccctcctcttttccgacgaaatccttctcagaatcctagccaagctgcccgactcccaacgcgacgccaattcgctggtctgtaaaagatggctctttctgcaaggtcgtctggtacggtctctcaaggttttggattggggctttatccagtccggtaggttaacgactaggttcccaaacctgattcaggtcgatttgctttctgggtctctgatttcgactccaaattccgacattttgctgaaccacaaaatgtt

SEQ ID NO: 164924 - DNA, 1573 bp, Cannabis sativa
tctgtatattatcttgctttgatttgtagaagatggtggataataataatatcaaaaggaccagacattcaccgtggataacaatgaggttctctaatttacaggtttctctgcctctcgaaatcgaatttgaaaatttagaaatgtaaaattgattaaaggctctccctcgcttatatttatatatggatttggcgatctgcgtgcttatggatcaagggtccatatattatctagataaattcaatactgatctaacaattggggagctagaagggcaacattaaataccccttacagtacttgaggcatttcttcattatcaatattctccttgatgtttgcactgatagcagatagccctcattatgatatcccaagcatcacgcgttttccaaggacacgtgaaactcacagatccataaaatgaagacacgtgtgcatggcaagcgataaccccaaaagtcctcaatctttcacattccatgatagggaagataaatgggtcgttattccaaaataatccacgtgtccacggtgctaaaagtcatctgaaggctagactacaagcttccgccactctaaagtctcgaaagcttggggtaaatgttatctacatttctggataagcaacatgtggcatcctcaaagtttgattagtctacgtaattccaagcccaagccttcctgcgtacgaaggcccagtccaagtctaagatgggcataagctcttccaaactcccagagccttactttcgaagacacgatcctcccactcttggatgcccatccaaccttctatgagatggagcgaataaagtcctctaatcaatcaacgaggcacatccaaataggaagctcaagaggtacatctagaagcccttatagggtgacgtggttgcccttagatgtctggacccaccaaatcagatcatgttccctatatcaggacatggtagtgagggtactgtaaaaagggatcaatatattccctttgtccaatgctgttcatttgacattcctgtctactatagcagcacccttccatgatactttttcagactgtatgggcctcctttagtacagatatttctgccccacgagccaaaatcctgatgtgggcctcaaagtcatgtattctgtaaatttacccgaatagtggatccattttgtacaaaaaccctagcgggtatgcccagatctggatctaagcctatcaaattccatttatcccttcacgtacataggggggatgaagaacaacaaaaaagaaaatacttctatgttttctttgagctttcttcttctaagagaaaccaagagagaaaaacaatatagcaaaatttagggttcttcaaaatgcaagacccatttgtaacttcaagctttacaaggccaatacattgactcatggagtagggttcattaacacccaaatcacgtaaaaatcttcatctcattcagtggcagagccagcccaacattttagtgagggcaaaaaaatttttgaaacattaataaaaaatataatttttattaaaaaaaaatgcaaattctatgagaataaaaataa

SEQ ID NO: 164925 - DNA, 744 bp, Cannabis sativa
  modified_base (673)..(678): a, c, t, g, unknown or other
attgtaactaatatatatagataggttttagaaaattacagaaatccattattttaagattttagcttattcaatcatttggaatattgatctcctgattacagtgatcaaagttaatagtgatggatctcctatggccgtgcttgatgttgttgctttcgttgatgctttttgctcttctagtcgttatattattgattttctggtattaactaataatacgattcaaaattcgtccaagtttctttcagcaactatgttggtaaaattgtccgaatgtttcaattatattagataattaatgtgaaacgacaaatatattacttcttttgttttttcttttttccttcctagctcaataaatacttattggacattgagtacttttgaaagatttgcaacaactttgtgttcatgttttcagatttgaacagagtttaatttggtgtaaggagagagttataggttaagcattagttgagtggtctttgtaattgcaatgttgtgtaccaaaatttacgtggttttacacatgtaatttagattttaatcagggtggcatgcatgtcatgacttcgcctaataagggcaggccagggcataactcactgcgccatttattggagaaacaaagatgaaggtatattcttttaagggtaaatagcggcataannnnnnaaaattttaagtttgtaagcggtataaatccaatgtttatttttagcagcataagtacccaatgtt

SEQ ID NO: 164926 - DNA, 745 bp, Cannabis sativa
catccattgctctttaagagaacatatatagatttcataacctgcaatttttcccagtacttcattaattcaacatttttttttcaattaaaacaacaataaaataacactaaaaaaacatatttgttcattgatttggatgcgcatttattatcatcgatatccttaatttataataaaattaaggtcataagccaagagcgattatagaacaacgttgaattttgtaatgtacattattaatcgtttctcagggacgatctatattaatctttactttcttttaaatggcatgtataattatacatttttcagtttatactttattttttttcgaattcaagatctaattatgggtatatttttttatttgttatttaattgaattagtgtgagtttttttctttttttttttctttttttttttttaaattctggctttaatgaagttgttgggtcttaatttgtcgtcgatttctttttttttttttttttcaatctcgccgaaatttatgggtgttttcctgattttttatgttgttgtggtcgctatgtctgtcgacaaggaagaaggaggcttcattcttcctatttataaaagaaaaaaaaagtcttagggcagcataaaagtcattgcaaaattctacaatgcacacccttaaaagggaagcactgatgtatatctatctgtttggtatccaaaataattttttagtcaaaatttttctcatggtcatgtacgtta

SEQ ID NO: 164927 - DNA, 5468 bp, Cannabis sativa
  modified_base (2038)..(2044): a, c, t, g, unknown or other
  modified_base (2503)..(2503): a, c, t, g, unknown or other
gtattaatgaggttatttaattcggaaaaaatcacgcttattaattttaaaaagtattagcggcggatctgtaccggtgaggatctgccgctactactaatattatataaagttttatgttaataccagcagaaccccaccggtattgttcctctatataaacacacccacccccgtactcactattttttccccttcattattttttcaaattttcccctgactaaaaaaacaaataaaccccccaacccgcctctgcctccgccagtgagggagtccgtctccgcctccatctctgattttggtcccactctaaaaaggtaagtatttgatgtgtgtatatatatacaattctatattgtattattttttgaaatatttaaaaattttagagtaaatatattatttttattgatatttgttaattgtatttgttttatttttgatgtaatttttattttttatattttttagaatttatggaagaagttttatattgtttacttggattagagaagctcacaaattttcatttgtgtaaattatgtatttatttttgtacaaattacagtaaatagtttaattaataatttttatatttgtgatataaatctgaaaaatgtgagtaaaattgttggtttataaatctgaaatgtattgtagttatgatttttgggatatataattatatatgggtactattgaccgaggttttcggcaaccaattaaaaaatatgtataagaaagctgtaggaagcttaatgcatggaatttttacgtggttggggtattaacgagccttagtccacgagtctttgttatttatgagagtatttattacagagaatgtttttggtggatatctctcttatttactctctttaattcttatgaacccagaattctcgacccccgtctaagtgtgtttgtggggtatttatagtgtttttttttggaggatccctagaactgaatcactagtcttttcgtccaggttcaataagggcacatattcttagtagatataaaataggaaatacatgacctataacgtaggtatcttaggggttaggtggatataatcttttatcccctcttgattgatgtcattcctcataaattagtcgtcactagccttattaatcacagcgtaatagctgcaaaagaggggttacgccgtcagtcatatcgcttatggtagttccaatacattttctcccatgcggcattaaatgtgaggcttgcttagtgccttcggttgactcatcaatttcatggcacgtgctttaggcacgtgagctgcatttatgatagtcataattaacatttatttctttttgtaggaaactattcacttcccgtccattaatgatccgacgcatttaatcggtgtcagaaaagtactcaagcatttttaaccgtcctaatgagcatttatcccaaccgttggatctgcagaatgcgaatcgattgcgattcccaccgtacgatggcgcctgatcacagctgctttgcacccgttctggcctataaaagcaagcctttctccttcattttgttactttcatcactacgccatttcttctcaagaatactttcgagagaaaatttcggaaaccgtagatttcttactgctatttctccgtcgctatcaatccactttttaccgtcgatcaacaccaacccccagttctcaactttcatgtaagtttcctggatactttatgtctttactgtttatttgctagggtagaacttttggttaagcgtttgatttctgggaaatagttttggctaagtctgttatgtggtgtatagactctcctttatttgggtttcgttatttttcttccttatactttgcaatcgacccctctatcgaaagattatttagggtacggggcaatttttgttcccacgttctgcgtttttcacttttcttctgctttcactgcttttgagatttttgcacctaatgtttcctaaggaaaatcctttgggtttccatctttggcaaacatccggagggggcctcttnnnnnnngttaggggacccccattccctcttgtcacactagggctaactgctggattctttctttttacaaaaccataatgtctactcctgcatctggagcaaaatcttctcggaagggggcggttaccctggccaccctggaggaagtaatgaagggcccggtcgcccaagagaactatacttgccgttccaatggctgggaggcggatgagcttcgctcaacactgacctgcgctcatcaattggaaaaaattgtgactgtagctgtgattaagccgtccgcgtctggggttattcaccgtttgccttgggacgaagagacgcgcaatcacaactacggaggttttggagcctggagccaaacccatcttatgtccggagccatgcttccccttcaagactattttataaattttctagtttttgttagcctcgcgccctaccaactcattcctcaagcttacngtctgctttcaggcttatttattttttatgtagcccgaggctaccgcttcacctagcccggccgagattttgtatttttacgaacttgtatctgtccccaagaagggggataagtttaaagacggttttttcacactctgggcccatccttccaacgagggtccggtcccttataatttttcaaaaaaatgttaaggagtaccgccaccgtttcttcttctcttccggctttcaagccgtggaccgcccataactgctcacggagtgggtcaggatccctccaatgcattgcactgctcctaccaaatcttcctgtagcatgctaagatcttctccacctatgacaaaaatggccttaacgtgggagacttggtcacaacggtgaacttccagaaggccaagcttatcacggagagccaatctgtggacgacttcaacctctctaaggtcctctgccccaacatccgcaccctggacactgaaaaggcactctgggcggacatcgttgcctcagctgaggaccggtaccagaagtacctctttaggagggaacatgagttagcctacattaaggctcaagctgctgctgggagaatcctccggattgaagcgggtaaggaacgggtgccttctcggcctaagcttctactccctattcccaatactggggctcttgatgccagcttatctggattcggtaagtctcctttaacggtccatgatgttccttctctcaagactattctcgatgtaggcctatagaatttgacaaacgtctccttatatttagaatgccccctactcggcggggtgatcatgccaagggtttttatttttccaacttaggtcattttctaagccggtcccggatggggtctgggcatcctgcacctatcccattggatcatttagcttatctgtcttccagctggtttctcctctcaaacagctttcttagggatgacgaagccagtattatagtacaggactttgctagggctgagttagattgtatgggtaggactagttttactgctttgtttttgtgtgcatattttctcgtggccattctgacacttacttgttcgtgtttttttttgaagcagccaagccgatggatgagcttttggcaactctcgcccaaacctatagtcccgactccgctctgcctccggcgcctgaccagatggtgaccccagggaggtcttcttctagcatccccttaggccagattgtcttgttcgatgaagacagggaggtcacggaagaagagtagggcgagatcctggcccctggaccgaaaacagaagagcgaaatggtggaggctgagtcttccaaaaagcccaggagggttgatactccggccgtcagctccgactcggggatcccacttgaagcggaagaatacactgtgcctcccagcattgtcttgactcccgttcccaccgatgtggagagacaactgctccagatcgccaagcacaactattttatggctgaatatacgaaggggaaagacgaggttgaagctttaaaaaaggttttaagggaggcccaggagaattccttgcgtgacgaggctttaaggaatgcctaggacctgaaaatggaccctctgacagactggttcaaccgctttgtcgggcctaccctcactccatttgcctcaaagttgacgagccactttgtctccaacctgacccaactccgggccaagagatatgaaggcccgggatgaggccatgtctaaggcgagatgcgagcttagggaggccaaggaggctgttgaggatctgactgccaagctgaagttcctggaggagctgcactagaatgacttgaagacgaaagccaacctaaccgttgaggtgaaggaccttcgtgatttcaaggatcaggctcaaaagaaggcgaaaagagatgagctcctggcccccgttacctgtcagcactgcaccatacgctttgatgatggcgtctttatggcctagcagactaacggtcaaaaccttaagctagacatctatctaaagcctgaggaggttctcgtccgcttctgggagaagaagaagagacttgacgccttgctggaggagcgcagggggcctcctcttccgccttgaattgattaagctagtcgttttcaccattaccatcatcattatctctctttttttcttttttttatatatatttaacccttctcccctctttaagacaatttacttatgtttttatacatatatttttcttctgaaaggggagacacttaaggcctgtccccaggcccttatcttttttagagcttttctttaagatttgaacactttacattcatgttttaatagatattctgctttttaactttgttaaatttggtctgtttacattttcccgtgtggtatgccttactacccccctgagtgacatgaaaattgtttttgggtcactcagtgttacaaattttaatttagagattgcatatatttgtccggtacaaatttactttacagagcataaacttttatttttctgactattggtaatactttcagaggtgatcggcattccaggccctaggcaccatagttccgtccattctttttagcttgtaggtcccggagcaaatttcatcctcaacttcgtacggtccttcccaatttggcccaagtacccccactttgggttcttgagtagctgagaagacccttcttaggactagatcaccaatagtgaattttctatttttgaccttcgagttgaagtgtttggccaccttcttgtgctaagctgccattcgtatttgagactcatccaagagttcatcaatttgatccagcgcttcttgtaataaagcctcgtttgttgctggatcgtaagtcattctcctgtggatgggaataacatttccaccgggaccattgcctcgcaaccgtatgccattgagaatggcgagtggccggt

SEQ ID NO: 164928 - DNA, 548 bp, Cannabis sativa
tagagacttaaatacccctcccttagatgtgtaaagaagttgaaaaattattcttgcaactaccatattgagagtaatagaattttttttaattttctctctgttatgagatagacacttgaattcatattttatctttttattcatcttagttcttagtttcaagtagagtttgattttccagcgaacaaattagttgacgagttctcaccgtcaacattacggatttatgcaatatgcatgttataagagcccaaccaataataatttggtacaggtataatattcaactctttataaacttgatatttttattggaattacttattaattatttatttttatcaagtacatgcacaaacaattgcttagcattaatggattgaatgtaaaatatgcatttctaaatcctggtgcctttggcactcagacaggagattgcggtgcctgttgcagtgcacttgtaacgccctaaaataaataggcacgctacccaaaaatggttatgaaaccctaatcccctaattgggattactaaccaaaatagc

SEQ ID NO: 164929 - DNA, 726 bp, Cannabis sativa
ttttttttttcatttttttttcatctttcttcttcttcgttttttcccagaagtcaaaccccccaaaaatcgaaccccaatcattcagcccaagccacccatccccgactgtccaacctcaaccgtctgaactcttcttcgtctctcctctgtaaacgtcgacatcttctcctttctcctctgcaaatgtcaatggtagcccaaacgaaccacttcgcctagacgcctccgcccagaccctctttcttgctctccataactacggcgatggttacaacctcttctcctcactcccttcaacaccaactccgctcctctttcaccttgaatctcaacaccaccccgtgccattgaagattgccaaggagaagaagaaagatcaaaaaactctgctccttgaatcgtttaatccaccgcgttgtgggcattgtggttttcagatctaggaaagttatttatttttttcaaatatttttgttaagcttagaacaaagatttgattaggggtgtgttagccttatttttggtaaataatattttttttttcagatttgataaaatttgttgattgttgtgtgaaggtgataatggtggtggtatggtgcttgtggttcgatttttggattgggattcgatttttggttggggttcgtgggggtggggggtttgatttctgggaaaaaaatgaagaagaagaagaaagatgaagaagaaaaagaaagaaaa

SEQ ID NO: 164930 - DNA, 1793 bp, Cannabis sativa
  modified_base (1736)..(1751): a, c, t, g, unknown or other
ttaatgatttcactgaggagaaaaagatcttacaagagactcttgactctaagcagacaacttctaatgttaaacgggaggcacttcaaaaggtggtggagagctttgaattagctgctttggatatcttctatgagttttggaaggcatatctagaggcaaactttgattatcccaaggagaacaaagatgattatcttagtttttatgaggtaaaaaaatccaaggaagaaactgagatggctaacaacaacacttccaccatccaagaggatgaggctctagttgttgaagatgtgcccgacccttacaaagagcctggaactcctgcattataaatttttctaacttttctcaccagttcgacttacgggcctattgttaagtacaatatggtcgaccaagcggcttttgaacttggaaaaaaatttcattttgtttagaaaatttgttgaatgggtagcttttaatcctggacttatcctactttgttatcttaaaattagtattttctcttaagttaaaatgtttttcgttatttttttcttcgagcttgttgtttaccaatgcctgtataggtgtatagtttaccccaaagttaccgagtagaattttgacacatggtcacttgcatttcacaagtttaattttgtctgtctggctattaggtttaggcaaaccctttgtacgcattttttggtaattacataacttgccatattttgcaaaaatgtacaaagatagacacaatttgaatgattaaaatctttattcatttattggttgatatatgttgttactgtagtaacgtgcatttattgaattataaagctattagatgatctaacaaatcttttagctattaaaacataaagcaattgaacaatacattctgtccaaaagacactgttcaagagtaatgatttgtgaacataatgtactttaaaagtggtcatctgacctgagtactaattgttttccaaacctttgagtgaggtccactcagaaggccacccacttaagagtaagtgttcgagcatcgtgcatcttgtggggtcatcgaaccttgtgcacttattggtagtattttcttaggtgttcaccattccagtaccttggtacttggactacttccatgttttcatcataccgactaagttagtatgctctagattctgtaactttagtagttaactttatggggtccttcccaattaggtctaagcacaccaactgcattgtcttttgtgttcaggaacactcttctaaggaccatatctctcaccaaaaacttatttctctcacttgtttgttgaaggattgaacagccttttgctggtgggctagtagctttagggttgatgaatctcttttttctttatcttcatcaagtgattttgccaagagggcatgcttagtctcttggtcgtaagttaatcttttgtgggatgggagttctagctccactggtagcatttcctcatagccataggccatggcaaaaggtgtttgcctaattgtcattctttcagttgctctatacgaccatagttcttttggtagctccttcgaacagttcctttcagcttctttgagccttttttttcttggtgtctttcaatgtcttgtcgactgcttcgacttgtccatttgcttaggggtgtgccattgttgagaagctcttaaatataccatgtgtttgttgggttttaaaccctaaataaaactcatttcannnnnnnnnnnnnnnnttattaatatagatcagatataacatttaatgttgcatggtt

SEQ ID NO: 164931 - DNA, 832 bp, Cannabis sativa
taaaataatttccaacaccaacaatgttggtccttctacctcaccatctgaaccgcaaccttggcgtggccttcccttcttccgagctccttttgatgccataacttcagccactgttgagagaaaagcacagaagagagagaaagtctaattttataattttggtacctaccttattagtattcttgtttggttcctcaaatttttaatgatattttcaaatctaaggattgggggaggagtgaaattacctaattttaaagcctcgttacatttatctgaggcttccatgaagtaagagaaatccctacgaatttcttcttccctctgaagttgctgtaaggaggagactggtgccaaagcatctgcctcatcgtccttgtccacctttacttcgaacttaaagaagtcgattgggtcaactccgatcagctccgacatcgacttcgtcttcttcactgggtctcacgacactggtcccttcatcttcaccgtctgaatcgcaaccttgcgtggccttcccttcttccttgctcctttcgacgccatagcttcagccactattaagagagaaacgcagaagggggagaaaatctaataataaaattaatcttaataaatctttgtaaaaaaataaagtattatgttactatcaggttacaagttattttttatttaatttctaaaaataaatgtaaccatcatggttacatatttgatgtaaccattgaaacttctatatataaatattaagataaaaaaaatattagggtgcatttggaaagccacaatgtaattagatttgtgcgtaattggaggtaattacacaatt

SEQ ID NO: 164932 - DNA, 1330 bp, Cannabis sativa
aaagagattactctacattccattctgtgtaatgttctaaaggataagcaaagataaacttataaagaaatgttaaaagattctgaatattattatcaataatacaataaaataaattaagtgttaactcgtatatatataatttaatataataattttaaagatgttattaattagttataaaagaaaaaaacatattaactacctcataataatactcaaatttataataattagaagaaaggaaaatcttaattaattattttataaataaaataaagaagagtctctctttctttaaatttacatatacagacacataattttagtatttaagtgcgcatatgtattattatttttttttacatagtgggcgcatatataaatattattaaatttgttgataggaattattattaaaattaaaaatgtgattaagtaaagagtaaagcgtgttttcttctggtcggtcaaatataaatatattccatccaatatctaaggttgacggtccaatttaatatattacatatatatgtataattattaactaataattgcacaataagggatatctttagttgctatatattaacttaaatattgaagcctaaatatatagtgtatatctgagtttgatcactagctagagctccatcacaaaattaaataatgaatattatctgcctttcactttctatattcctttaattcacatatatatatataaatatattctatataaaatgtgtctatataactgaaattcttatattgggccaggaccatcaaaatgcagtgaagtggacttaaaggcgacagaggcggacttaatgaatggaattcacaatcaaactacctagagtatcgattgtaagtcaacttctccgtctgtaatcgctgaaggcccgaatttctccccaggttcggtggaagaagccacgatcaaaaggaagagaggcagaccagtatccaggaagaatggaaaggttatgattgagagtccagagccaatccaagctcagcggagaaggggaagaccctcaaaagcaaactctaacgttagtatcaaacccacctctttcaaaaggagtaaaaaaaatagagcgaacaaatagagacaatcaattaaagctcactgggataatgagctctttgacttgaaagtggatctcgacaaacatttcgtacttatcgatcggagctcacagaaaaagtctacgtgcaccattcaggagatcaatggggagactgaagctattgttggggaaacaagccaggtttttcattttggggctgtggagacttgcccgaaaatgtctcccaatgc

SEQ ID NO: 164933 - DNA, 1265 bp, Cannabis sativa
tcgagccagctcgtttatcataaagggttagccgattttcttgtacgagctcaaatttggactccatatttccgttatttcttacaattaataagttactcactaaattatatgtattttttatagtttcaattgtttatatataatttttaaacaataatttacatataattatttaaaatgattagaatttgaataattattaataaatacatatttattatcattattaacatgtcgtacttttaggctagtctattcttgtttatgtgttgagccttggggcttgttgtctcgtgcttaagtctatttttttttttcatgtcgtgctatgttgatttgcagcatcgtatcgtatcgtgcttaagctcatattatttttcgtgttgggtcatatgcatgtacctcctgagctcgtgctgtatcaaaacattcggcctgtattgacaggactaactcaatattagtaaaattataatttttgccagttccgtcgacaaaactgagcaaaaattatacaggtttactaggtacttttgttgttaaaaaagtattgtatttatactagttaaaactcaatttttaggacacttataccgcaaatatccctacattaaataaataaaaattaaattattcttattgactacataatattcataccaaagttcagaattcaaatcatttatttgagagctcatttttgttcactggaagcaagattggccctaacaatttgggagttttgggcgaaaaattaaaattggaccttttatttaaccaaaattatcaatcaatatttcacaaattcattttttttaaaaaaataggtagaaaaaatttgaatcatgtgtattgggaccacaattttttttttttgaagtgttaagtgtatatttgctacatttcataaaaaaaagtacatatttactcttatgaatatttattatattatatattatacactatataaaaaatatttattatatataatgatgataaaaaaggagcctttaaatatagaaggtattgtgtaatggcttaagctgtcctatacttgagccgactttgcctcgaaatttagtcaaattaaaattaagtcaaaaataaaaaataaaaaaataaactcataatttttaaaaaagaaaatatagaccaaaatttaatattttataatttcgttcattttatatgttacagataaatatatatatttttttatatattttaatatgttaattatttttaattaataatgaaaaaca

SEQ ID NO: 164934 - DNA, 837 bp, Cannabis sativa
ttggtgctttcattgagagcttgataaatatctgctctcaacacaatattcgtgtttcatctatttttgaatcatctttaattcaagagcaatggttcaaactaagagagccgcatccactaaatcacgtgaccctatggtcactgacccaaatgtccaaatatatgcggacattagcacaaataacaccaatttgtgcctcccacctcacaacaatgccccaataggaatacaggtcgatacctcaatttcaataggggcaagagccaggagcacgacagtcatcaccactgagatccctagagtcagtctcagtgtccaagaatttgaaaacaccaacaagtaatacactggagaaattgggactacgactagtcaaccttctattggagaatcccgtgtcgacttgggggataatagaatgatagaaaatctcaaattgaacctaagacaagtgcaaaaccacaccaacaacatccacaatagccaggagggaactcgtatgacggtgaactaagtgttcgacaaacaacgacacaaatttcaggagtggatggatcgcaacacccaagagatgtgagcccaacatgaagatatcaatcgtcgagcaaaggaagccatagacctaatccagtaatttgctaaaaaaactaggggcaaagaactgagatttagccacccaggcctaccagtttaatatcccaagactaaaatcttgaccaacctcccgatgagcaagtgttacttggccattaccttaagagagatgaattaggttgctaaaataaaagggttgagatacaaaatggccctaaatttggaaactaagttagtaaa

SEQ ID NO: 164935 - DNA, 840 bp, Cannabis sativa
  modified_base (773)..(781): a, c, t, g, unknown or other
aagtgttaccaaacggcacctaaagaatcaaatcgagaatcactaaacccgtaaaggattctacttctattctcattctcattcccattgcaattcctaatcttatttccaacattaattattgtaagcaaagccaccgccttagctttccccttggctgagccactcaccgccacctctctcatcccctataagtatgacctctatactctataaatacacattgaatccttcttgcaaagggttggactttcttagctcacaagtttgagaagagaatagagtcttcatattcattgtaatcccttaggcttttttctagcctatttgatattaatagtgactcgtgaggctcattaacacttcaattacgtaaaatctctgagtgttatatccatatttgattattttaattatattttctttagttttaatattaaataatttattttttaaaaatctcgataaacaataacaaatggtatacagttaaacagaccttttacaacatatagcttatttgttatatatgtattatgaataaaatttactatattaattacccaaaatatttaacttactaaacaattaaactaccctaaaaaacacagctatgaaccataattattattatgttatgttttaatttttgagaatattttcatattgttatttttatacgctataaacctattatctatcatgttaaatatatactttgcaaaataaaattaaaagtctcataattacttagggtgcgtttggaagtaacnnnnnnnnnactaggtagggtaattactagggtagtaattacacagtgtagtaattacactatatttt

SEQ ID NO: 164936 - DNA, 847 bp, Cannabis sativa
tttcttttctcttaagttcaaactctctaaatcaaagaaaaaatgttttgttctcataacaaacttcaagcaacatattgcaatttatcactcaatgaaaataatcaactcgttaaaatactccaaatcaaggaacaatcctaacaaaatccaatcagctttttacaagttataactcaaatggaaacaataaactcaaataatctgcaaaattcttataaatcagacaaaaatatttcacttaacttcggcaaacaaaacgaattgaactcattcaaatcaaagaatcgagtggcatatccaaaaattcatgtttacttatgtgaatttcacaactttattcaaaaacaaacaagacccaaaattccttcatgtaaaaaaaaaaaaaaaaaatctttcaatcaatcggaaaagcaaaacctccccaatattcatcaaaatccccaaccctaaattacatttttgaagaaataaaattggcccaaataataataatccccaatccaaggcaaaattaacttcacacatcaatagtagaatagaatgaaagataaagataaagaggattagagaagaagaggaacctgaaggaggttgttgagaattagagtccataggacttgagagaaatcgaattagagtctagtctctctcgatttgaagaagaaccagaaagaaagaaaatagaagaagaaagatcccaccgtttctttctgggcccacaccgacacgctctctttcctatcgatttatttttatcactattttaatttctaaataataatacagatcaaatgaagatatgctttttaaattcaaataactttttgtttcaaaaaaaaaaaaa

SEQ ID NO: 164937 - DNA, 725 bp, Cannabis sativa
gtatgctggtaaaccgcaaattctatcctagttttaatatctattggcttgatagtgatctcattcggcaaatcttgtttatggatttatgagaaacataggtagctacatgtgatatcaacgatttgactctcatttcgtacatattggtataataaggtcttattgatgattagcataacacgtttaagtgtagaagaatttaatgagaattagtttcggttggttgacagtttgttgaaaattcaatttgttcatgatgtaagttgtcgagttgaaattatagtgtttgtcgcgccacaaactaacattagatcacaaacaaactgcagatgtgcaacttctttctgcagcaaagatgtcggtttggtaacaactgccgcttatcacatggtatgctgcaacaaaatctatttgtaacctgtaattatagctcactagtgcttagagtcctttgttcgggtatggaatattgctagcaatggttgtccagtttaagaaatagcatgactattaaatgaattaaacaatgtttgattcaaatgatgattctggttctggctcagcgttcaggaaatgtactgataatgtttgcttctcctagagagcaagcattttatttcgctcttctaccttttcgttgccataaacgcaaatggcggtttgagaaccatttaggcacaagctgtggtctattaccactcacattctctttattctatttc

SEQ ID NO: 164938 - DNA, 4027 bp, Cannabis sativa
gtcatcactgaatttggcggtcgggttcagtttcaattttttttacatggcagtcgatttcagtttttgaaataaaaaaatggttaaaccaaaaaactgccaaaaacgtcaaaaaccgtccaaaactgccaaatcgaaaaaccgccaaaaaccgtacggtcggttttatacggttataatttctaaacggtcggttataaaattgtaaaaatcgaccataaccgaccgattttcacccgtagatgagatagaatgaactcgttctcaacctcttatgtcatagcaatggtggggtcagacatgctagctggccccgcacactgtcataaatgatatgctcttttcccattaggtaatgtaactttttgaaccttcttttctcttttgggcttggcaattgaaggattgtttgttgcttcatattcctcccattttggtaaaatgcagcgcacgtggtcttgtaaccatttccatgttatattttgaaagcttgtgaaagaaaattgcctcagccatgtgagcttcgtctttagcaaaaggtgctttggtagctgtgatatgaacgtctttttcccgattgtgtgccttgacacattgatgcattgtcgatggcatgtaatgatgtatatgaatccactgtcatcccaacaagagatggtatgaagtgtctgcttatatcacatggaaccgagtgggtcctctgattggtctaacctctagttcaacaattacataccccatagtttgtacaaacttggcagcaaatctagtgagcatgattggttgtaggatcaatcccccttttacctcttttatagcagaatatatttcaactggcatgagatttattgaagctctattatctactaaagcacgtttcacttccattgatttttgcctcgacgtataacggtcaattgtgaaggaatagagaagtttgtatgtcagcattggtgaaacaatcgctccttcaaattttttagcaatattaagcattgggcgctctaccatataacaagaaaggtcgtgttgttgggaaattttaagcaaaacttctgtagcctcagttcttgcatcttgcttgaattctaagcaatcaaagaagttacaaaataatttagtttttaacaacagctctagcatgctgtctgttttttggtggttcttctataatttccttgatatgtatgcctcgtgatatccctcttgaaatgaggacaaactcttatgtgatgtcatagtggctccttcgttttgatgttggagaaacgacatttgttccacttcattttgatccaagataatttccccttttgctaatcgctcataaaaaatcttccttagagtgtagcatcccatggttaggtggttaatcttttggtagaagtgacagtagagtttgtgtttcttttcttctagagtaggtagttttgtgacaaatggtagtactacttctccatccccgatccatgcttccagtagactacagattctttctttgttacaaagaaactccgtcggtttatcattttgttggccttttttatgaacataaaagtttcgtttctcttgtgcccgtgctatgtcaacaccacgttttgaaccttttcatggccaattttaatcgttttggtcggatggcttggccagctgacaaacaatgccttcattattccttgatttagctataggctctacaaaattatatatagcatggttttcgatatgtaggcgatattcatcaagcacacctttgatacaagttttgactagatctttttcagccatggtttcagcacaatcgagagctttttctcaaaacttttgaacataattaacaagcctttctccaaagctttgtctttctcctaacaagtcaactatgctccatttgtcttcaatcatgaagaatttggcgcagaattgagagaccatatcgtcccaactccttatactttctgaagtcaagcttgcgtaccaagagtgagtgtaatcagtgaaagattttgaaaactctcagatccttagttcaaaatcatgtgcgtagactcccaaatcatcaatgaattggatgatatgttctttagcattgccaaatttctcattgtactttcagaatacgggattcatataaccttgtgggtaaggtttcaatgtaacttccaaggggtaaggtgggtgaaaatcgatagaagttaccaattatgatgactttcctctttcagctttaagaagaccgataaactcgacttttgtgacaaaatcgaaagaagattgggcttcttcacaaaccctttcagcaatctcagaagtttcgattcctcgaacattatcaggtgttgcttaagttctttgttcaatagtatgtacttgccttattggatattcattcatcacacgctcttcaggtaagccgcttctgtcaacagatgcttcttagtgtgtttgtggctgaagtgaactcaacagttgcatcatgccgtcttgggatttttgaagcttttccaagctagctaacacaacatcatctgtgtttgtcagattagtactattatttttgttgttgtcatttcgcaagctttctgatctgatccaattgtcttgctctcgggtatcgaagataggaatttcgattcaaataagagaacaaacttgagcgttttcctttttgtatttacaggaatttatatatatatatatattttaagaaaaatactccctagttgaattgccaaaatattcagaagttacctaaatttttaataatatggatataaatattgctttaaatatacacatatagcatatgtatgaattcaaatatagacacatatcttttatatattgctttaaataaaaaaaaatttatgtagtacaacaaattgtatttgcctgtgtttacagtagcaggcagtctattgtgcatctttattaatatgaaagattacaaagatcaagagcaaatggtgtctatcttcttgcaaaaagattaattttgggcacatgtgataacttggattaggttggttttttgtgtatatttggtggataaatggggtgtattagacaatataattgtgtttgtaagaagagagaaatgattgtgaatagaggaatttataattcatgaacaaccttagtgagttgacgtgttgaaaggtggtgtgaacagtttggttttcataaaaggttatgaaataggtagcttagtttttatagaaggttatgaaataagcagccgggtttttatagaagctcattaaatgagtagtctggtttctatggaagcttgttaaataggcaacctggtgaatggtaatggtgtgattaattaaagagagttattaagaacgagatggatgtgtatgaaagagaattgatgagatgggataattgtgtgtaagggaggagaatagggagcagtgataaaaaatgagatttttagagagagactcttctccgcttctgatgtacgttatatgtaataccctagatttaagaaatggattagcaaaatcctaattagataattatgaataattaagaaattatattattatataatgtaatatatgaaaatttatatgatttatgctatgtaaagaccccgttggtgagccagggcattttagtaattttgactcgagaagggtaaaatgacaaaattaatttagttacgtgcttaatggaactatattattatatagtatgcctgtgttgtcttttcagatgtgttctgacaggttggcgcggtatagtcacaactgggtattttgggccgaatcgggttcaggcccgaaatgcaatttgaattgaattaattggcattttatttgataataagaaatctaaattttatttggaaataaatgagagtgaattgacaattatgccttgtgagtgaatatacttgttatttggcccttggggcattttggtcttttgaccttatttgatttattttggtaaaagctgaattttgaggaaatgaattagaaaattttgggttctctttccctctaacccg

SEQ ID NO: 164939 - DNA, 1032 bp, Cannabis sativa
aagaaaagtcctatgctttggctgttgaatgaggggaccgttgaaacctacaccgggaagatacgaaaatgtgatccggaatccactcactcatgtcccaaatgtagattttggctaaaaataaaataataaaagaaatttaagaatgatgatgccagtaatggataaaaattgattaggagatttctcgtcccacccaaacacctacacttcactattttgggtcctaaacctttgttctataaatcaaatccatacactgttcgagttgtttgttcaaagttggaataatcttttattttattttttctctattgtttttttgggtgggaacttttacaatcatggcactgtgcacacaccagtatctacttggtctatcttcatccgctggctccactaagcttgagcaccagaatcagtccagaagccgtttattcgccacatcattgcatttccatggaagccgaagaagcttgaatgatggagctagttcggtggttagtgctctgcccattgttcttgaaaattcaaccccacccaaatcatccttcaatgaggtacgaaatgattttatttttttattttttgaaaaaaaaataaaaattaggtttttatttaatgtgaacaatgatatttgggtgatcacttaaatgggtttgaatcaatactttgatgggttttggcagttgattgaatcattgataaatcgtgtggatttatcagagtcagaggctgaatcgtcactggattttttgctgaatggtgccgatgagactttgattagtgcttttctggtactactgagagccaaaggagagactttcgaggaagtaaggttctttcatttacatcgatgtgcatttgtttatactagattacttagttttgtccagccatgtttttaggctattgaaggtttgattcctatgttgtttggatagaatgaactgttatcaatgcagttgtttaattcagagaaatcctgctaagctgtaggttccctagagaggatttttttttttttttttt

SEQ ID NO: 164940 - DNA, 833 bp, Cannabis sativa
aatgtaaattaatcaaaggacatcacaattaccatttcttgattcaatatttatagagaaactattatatatctcaatcacatatttgttataaagattgtagttttagataggaaaggcagcaaagacaagttgaccaactaacccaatttcctattatatatatgaaaccaaatttaatgccttgacccaatcaatcaaggacggttttggttctcctgccttgcttataaatctatatatataatatatgtaaaatgccattaatgcccctaaaaattaagacttgaagccagagagaaaatctttgctgctgcccaacttgattaatgtagttatatttaaattacataacatgtaaagtgtgacgtattgtttaatgaaagctgaattaatcatttaattattcataaattcaaaccttaatatacatttggaaatttctgcagtaaatctctaaacaggcataaaaattgggtgggttataattgagaaatgtatctcttaactttgtccccatttttcatttatgccctctattcctacccccgtcttgcttaatttttgatgggttcggagtaagagaatccctattaagtacgaagatctattggatacctattaagattaaagcaataataataagaagaaaataatataatgtaattcaaaatgaaaataaaaactaagatattgagattaaaataaacaaacattctaactattaaaaagtattaattacaaagtaaattaaggaagattaatagtcaactttgtaattagtcaataattttaatgcgtaataattagaaaattatatggaaaatttaaaa

SEQ ID NO: 164941 - DNA, 1438 bp, Cannabis sativa
taaactttactaaataaataaataagtttacataatgcgagatctattttttcaaaactacaaatataacatatacaacatgtgttgcttcgcgactaacaaaatttgagtctgtgtcttcccgaatatctaaacaatttaggtctaaccgtctaaatatgtacaatctttattgagctctaaactcactattgctgagcatttgcattgcctttacctagctacacataaaaaatatatatgtgagtcaacatactcaataagaaaaacataaaacatacacctaatcacagagtcttaaacctgcgtccaacgcgtataactaagtctcgaacgttcttgatgactatagtacgattgaccatataatattaacctatactcaacactctagtcgtactgatgtgataacatcaatccatactataaatataattgacaataataccaacttatacttagcactgtagtcgtactgatgtgatagcatcaattcatacttctaaattgccaaaatatatcacgtttgtattcaggtgcaactttatgtacaccaatatccctctcactgatatgctatctaattggtaaatataaacatgtatgctaacatgtgcaaatgtgcatgtgttatactaatctttcctcaactccgcaattaggaaggttggccaacctaagtgaaaattgctgctcgacgattagtggccctaggtcataattaggtaaaactggtaagtgtcttgctataacacttctggggacttaaactcaaaactaaaaatttctctatcgataaatagtatgacaattccctaaatatcgataaaatgcaaaaattgagttactcgaaatcaccccaactggataaccaaatccccaagcggtttactattttttagagttctacttggggaaatagttcacagtttctataaaaatgttggactgttttagtgcagaaatcctaatactctacttttctactacaattctattccaaatccaattaaactttcaagaatacctaattagagcataatgataataattcatccaaaaatagcatcatcgaacccctgaattaaaagttctcattgttgagctaagtttgagttcaaaaactcaaacttagcttcaactaacctatggctgcttaattaccacaaaatcaacaccagtaaacataattcagaccccatttagcttaaaaagacatggacttaggatttaaagtgagggaacgtaatttttttttttaaaggcatgggccaaaagtaaacttaaaaagaagaaaaaaagtgatttttgtgggatttgaacttttgacttttattatatatacaatttagcttaatcattacaccaaagttaatactatgtctataattatcatattttattacaattatatgtaataactgttggaaattatttt

SEQ ID NO: 164942 - DNA, 2256 bp, Cannabis sativa
  modified_base (2199)..(2214): a, c, t, g, unknown or other
aacactagtggatgatggaagctccatgaacttgctattcagttctcggttaccttttcccctgacacccccaaagcaccttcaagtactgcacctttgtggtggtagactggcccaatacctataatgcaattcttggcaggccggccttggtcaatttttgagaaattacctccattcgacacatgtgccttaaattccctaccaaggaggctgagtaggaacagtgtggtgaaattatggagaagtaagacagttttacaacgtcgcaatacatttgtttgtcttgatgctacaagggttaggagaagttttggtagaagaaaaagacgagttggacccttgtattgggtctgaagcggtgttagagcccatgtaggatattgaggaagtgagggtgtgtgacctcgacctatccaaagttattcatttagggaaaaacctagaatcgaaggagcagagtaaaatcatagacaccataaaggcagcaactgatgtctttgcttggtgccatagggatatgactagaataattccgcacgttatcaccaatgtcctgaacgtctacccaaatatgcctccagtacaacataaaagacgcccactagacccagtaaaggctgaggccctggaaaaggaggtggataaattattatccaacatcttcatccgggacgtgtactactcagagtggttggccaatccagttctagtacctaaaccaaatgggacctagcgagtttgcatagacttcactgatcttaacaaagcttgcccaaaggattgtttcttgctgcccaagatcgatgaaatggtagatcccacctcaggattcaagttattatcctttatggacgcctattgaaggtacaataaaataaaaatgcatgtccctgatcaagggtctactagcttcaggactgacaagggggtatactgctacctggtcatgcccttcgtattgaaaaatgctggagcaacttaccagcgcatggtcaaccaaatgttcaaaggcctcctgggacagaacacgaaagtatatgtagatgacatgctggttaaatcgaaaatgtgcatgggccatgaagacgacctcacagaatgctttgaggtagtctggagctatgggctgaaactttatcccaaaaaaatgcacctttggtgtcaaatcaggaaaatacatagaattcatagttactcagcctgggatagaggcaaaccctggaaaagtacaagccttattgagcatgccttccccgaagagacacaaggatgttcaaagcttaaccaggaaggtcgtcgctcgagacacttcatttctcgctcaaccgataagtgcatcccgttcttcaatatcttaaagaagtgtcaaaattttgaatggactgaagaatgcgaagaggcattcggaaagttgaaagaacacatggctaagccaccagtactatcaaaaccagttcacaaagaagacttatatttatatttagtcgtttccaagaacgtcatttgtacaactttggtccggggggaggataaagctcaacacccggtatattatgtcagcaaacgcataataggagctgaaattcagtatcccttgattaaaaaattagctttctgtcttttgattgcctcaagaaaaatcaagccttacttccaggctcactcaatcaaggaatttacaaatcactcgctttagcaagttttacaaaagtcgaaggcctcaggaaggctcctcaagtgggccatggaattaagccaggtcaacatacaatacaacccacgtacctcaattaaaggccaggcgttggcggacatcattgtagaatgcaacgagacggaggtcagtgctagtataccaactcaggatgtgcccgcgtggaaagtatacgtcgacagggcatccaatgaaaatgggtctaatgccggaatagaaatgatatctttgaacgggttacgactccaagccgccctgcggttcaagttcctggcctctaacaacaaagatgagtatgaaaccttaatagcaggattgagattggccaaggatgtagaagctagcagagaagaggtttacagtgattcacaactggtggagcgaatcccatgagaaaagatttctcattgagactacttagccaagcaagcctcatatagcgagatcgaaaggctgggggtggtactgttgggttttatgcnnnnnnnnnnnnnnnnttcaatataatcagatttagttattaatatagatcagaaata

SEQ ID NO: 164943 - DNA, 1310 bp, Cannabis sativa
  modified_base (1159)..(1163): a, c, t, g, unknown or other
aaaaactgagcataacgtggcaatctgacaaccctataataaaatgtacagagaccaactgagagataagtataagaagagagaaatagtaataattcactaggaaaatgtagaccaacaaataaattgttctgtgaaaagcataaattttagtgaaaatgttgtcaaattaaaaaggatatggatgcatattctgcatttgatccatttatgtccttttatatgctagtgatttgttttggtctgagacatatgataatgggcagctctaactctctatggggtccaatccataatattttttttattatatttatattttaacattaattcactatctctataaccataaatttgatttcacatgtttatatacaaaattaagtagtgttttgggcggtttttatagtttttttttttaaatacttttaattgatttaaggttaattaaaatttttgttctctgaactttaacatatacaaaatcatgctcctttaacattttttattgttaaaattttttccaaactattgaaattgttggatttaaagatttttctcaaattttagtaagaaaagtctaacatggatgaaagttcatagggcatgatttggaacatgtcaaagttcgagggacgtgatttagtaaatattaaagtctaatgagcatgatttagtacataaataatcactaaattagtaaaattgaatgaaatttgataaaagtctttaaatttgataatctcaatagttcagggaaaatttttaacggtcaaaaaagtataagaagtatgatttgatagatgtcaaaatttaagaggcaaaaattatttccacacattagcagtgtgggactaactcttaatattattagatgtcaatatttgaggaaaatttttattttattaatgtactaattcaattacaatttttttatactaatatgattcaacacaagtattaataaaattttaaaaaaaaaacataatcacttaatccaattcatttaagtcttaaaatccaaaactattagtaatttgaataatttaatattttaattaaatttttagttctagaacataatttcaatgttaacttaaacatataacaaataccacatagaaataaaacattaacaatcatttaagtaatagttgtnnnnnataaagttatcaactttttactttaattgtatacaatttttgttttacaagtagctaataatattaagagttagtcccacattgttaatgtgtggaaataaattgtatgtggggaaataaattgtgatatataagatgaaagggcta

SEQ ID NO: 164944 - DNA, 683 bp, Cannabis sativa
aaaaacagccatagtttaagttttacaagcaaacttctttattacaaatgactttttaattaattagaacaaatataaaatttaattgcatgaccaaactcttttttcaatccaaaaatttaatgctagtcaaaaaatattattcatttggaatagcttaatttttcttatgttattaaattatgtgggcaaatggcaaaagagagtttgcttgattagtaagcattataagcaataagccacccactaactaataaagcccagtactttattattattattattatttatttgaatttttaaatatattaattccaaagagagaggagaggagaggagacactatgaaagctgtcatggtcaataatatagtcttaggagaactgttttaagaaagagttgtttggttttgaccctataaatgaatattccacgtaaaccaaagctaagaaaaatgaccatttgaaaaaaaagtcaaagaaatacgtgtggacaacaactgagatctgagactgagaaaactacatgttacctcttcttaaaactcaaaagtactcttatttttaattaactaaggaaaacaaaactgacccatctgacaattgacacgtgaggcgtttggttggggggaatgaaaatataagaataggaatgggaataggaataggaatggaataaaattt

SEQ ID NO: 164945 - DNA, 1047 bp, Cannabis sativa
gttgattgattttatgtaaatgaatattaatactattttaacttgtatgatttgttaaaattattaactaaatctctattttgtaaaataataaatgtgactttaaactcaattttagatatgtatattaatataattaatttgaacataatttttagcataaataaatacaaaaatatactcatttttgttataacaattctaaatcgaattattattaatttttattttgataaaaaaatcactttaaaatactattttatatcattttaaaaaatataaaattcaactaacaatgcatagatttaattagatttaaaataacatttattctaaaaataataaaagcaaatttgcttttattataatgtttttttaggacctccaattttctagaagcaatagtggaacactaatcccgtaatttacggaagaaaaagatagaagagaaaaaccactaattggtaattaattttaaagtaaaaaagacttaatattaaacaaaacaaaagtaagaaagaaatgtttgtttttgacttaattttcgagtttgggtttgagctggaagaactggagtttttatcattatatgagatgagggagtgacctgtaaagtgaatcaacgatcaggattgattccatttttttgggttgccaattgtcattcattatatattactttctatttttttaatatataataaataataataataattatgccacgcgcttcacgtaatccaatcatatgtgtggtaagtggggtttgggcaagaagagagcgcgtggcataagattgaaacactcactcattaaagtcatatactgttcatacatatatatatcatcatatatcattacattttcacacgtactcaatctactgaacccaacaccacacgtgcatacccttatatcattacttctactaaaatatttacaagactacataaaaaaagggaaatttgattttctatacttaaaaattttcaaaatttcttttttgaaccaatacattttacactatgaaaaatatgactctttttt

SEQ ID NO: 164946 - DNA, 1187 bp, Cannabis sativa
agttagttatgaacagtcaaaatactacaatttttttgaaaatctccattcttgtagcaaataatttttctattcactgacattgagactcattaatactcaaattatatagaaatcttcttgtcttccttcatttaagctctcttaactactaattttcttttcttaatctagttgtcaaaaatctcgatcatatgagaggctagtttatactttttattgactatatagtagaagagaatgtttaagaattttgggatataaatgattatatatatattggtttgtttagccattttgtttttattttatggttttaaggtataagtacaagtacaaaaatatagtatttttttttttttaaaaaaaaagttatttatgagaaaaatttagaaaaaagttaaaaaaaaatatgagaaaaatagtataaggtaactgtttaccttaaatgtacatggttatccttatttagttttcctattttttttttttttttacctttttcttatattttttttttcataatataacatttttgaaaataaaataaaactatattttttgcacaaattgtataaaaactcataaaatttataatttcctaaaattattatatatgactttccatataatttcagccattgtaatacttaaggtttgcccaaaaaagtaaaacagaaaaactgttaaagggtgtcaataccatatgatgtatcatgttactcataattaatccttgttggctcatttcattgcactaatcttgaactttactgaaaagaaataatttgcaaaattgatcaaagtgaaatttggacaactaatcacaaacttctccaaaagttgaggcccaatagacccttcataaaggcccaatcctaattgaagtgtatattttagcaagtggtcgttttctacaaatgattaaaaagaggtacttttgaaaatggttagacctcaaaaagagataaatataaaaagtagttttgtcataggaagagctagtcaattcgattttaatgttatgttcttcaacaataattagaagaaacaaaaaaggcaagcaaattattgatcccaatgccccataatggcatcaatcaagtaagtgggtgttaaaaaatagggtcattttctttaaccaaaaatgaaaaaaaaaaaaaaatcatgaaaaacaacagtagaac

SEQ ID NO: 164947 - DNA, 1097 bp, Cannabis sativa
gtgtgtgtgtgtgtgtgttgtgtgcgtgttgtgtgcgtgttgagtgccagaagttgggggctcgcatgtgagccgttttgtgcattgggtgaatgtgttttggggggtgtggggataaggagagaggtgaatgcatgatgacaagaatgacattgggaaaggaatcaaaggacaaggtgtgcaagggaagagcgtacaaccatgcattttgaagactgagagcaaggaagtacaagtagcagcaacaacgaacttgtgaggcctaatgacccgaccaagggtacgctgcaactactctcctacaacctgtacccgaggaccaccctgcatgcaaccgaagaccacacacatgtacccgaggaccacaccgcatgcaattggggaccatgcgcgtgcaaccggagaccacacactacaccaccctcctgcaacctgcaaccggggaccacctgacaccagacaaggatacggggtgccagactacctccagcagctgcaacatacagcggaaaaagcgatattttattcccatgggactactttgtacaccaggccattagagcctataaatacccccatctcagatgtgagagaggttggaaaatcatacttgtgaaaccatattgaaagcaatagaaatttctccattttaagataacaatttgagtttatatttcatcttcctcttcatctcatttctgaatttgaagcataagttagttttctgaccaccagttggttgacaagttttcaccgtcaacacaaaacaaataagataatcctttcagatagaggatgcactatataaattatagcataaatactttattagactctgtattttacaaaagttattaattagactttctattttttaaataataaaattaaccctgtatttttcaaaattgtacaaataggactcttagctgttttttttgtcaaaataaaatttaataataatctgatttagagatattatgacaaaacggaatatattttttgtatatattcgtgttagaaattatcttaaagttggctatattaaaaaataaaattgttaaaaattaaagtcagtgtcctatttttaccatttt

SEQ ID NO: 164948 - DNA, 1145 bp, Cannabis sativa
  modified_base (1107)..(1108): a, c, t, g, unknown or other
cttattgtgtaatagcttacttttatttgatcaccattagtaagttgtaaattaatcttgattttagaataaatagggttagtagaattgcttgaatgatgcatgaatatcaccttgaaaaaatgggatttgtaaatagcataagaatatgttatttaccttgtatgacttagaggaattgtgcttaaattagtatccttaaaattaattgggcattggaatatgttaattaattagagaatcaaactataaatactttagaaaaatgattatgccattttaaattcttagttggcattatcaattcacaataatatttatttgtactattatatcaacattacatttttagtctaatttaataattctagcttattttcttctcaaagtttgtgtttgttaatttttatatattctcactatttcattttatttttgtttaaactaatttttgagtaattagttttataaattaatttctaatttttaatccatgtcgaaacgatactcgatttatcactttattacttgttgataattgcgtacacttgcgtatataattttcacaacactaattggtacatgcatattaattaccatatataaaatctcacacaatttgctttttgataatcatgcatcttataatagaaacatgattatttaagattgtcatatatattttatgtgcattgtatttagagaaatcaattacataaaaagctaggttgagttaaatagtttattaacctggtaatttataccaaataattttctccaacagttaatcacataattaacaaatgttttttcaaaatatataattttcgaaaatctattagtaatatagaattaataggttatgaggctaaaaaaatagtaacatggaagacatatttgacatccaaacatgcattatattttaaaatagttacatctaaacacaccaagtgtaaatattttccaccaaatatttgttagagattttattacaatggaaaaaaattaagatacattacaactctatcgcaatataatacaaggaccaacaaagagattaaataaatcttacaacacgtaatatacaatatatatacactatatatnntatatataagaaaggtagaagaatatatatatatata

SEQ ID NO: 164949 - DNA, 1956 bp, Cannabis sativa
agtacctaggtttttgtgtttttatcgatatttaaattatttccaagctattatcgataagggtacattgggttttaagtgtagggcctactatgggtttgattaagttatttatcaagttatcattgtcgtgacatcgggcttgagatcatcgaacaccattcaactcaggtctgcctacacacctaactttagactaagataagaaaagtcaattgtattgtatagcatgtgaagagtaacatacggtaattactgttattaagaaagagtcattactctcacttgaaactactattaggtttcttacttatctgttgcttctttaggtaatgatagttacattggaaactctttggtaacgagggttcaagatgctttataaagtatcgggattagcttgttttattagagaaatagttcgttacattatgaatagttacttaaattatatgtttcaacgcatgttgattgttatatagtacatcatgatatacatgatgtttgtgttttaccttcttttcttaatgagtctttatgactcacgtgtgctttgtggtgaaggtaagggaaaagggaaggttgaccagccatgagtcagaggtcgcctggtgtatgtacttatcagccttgtcctcttttgtcctcagtttacaagatccgtcttttgtaatattttaagtatataataatagtttgtaatcaactattacagtggtattttagtaacagtttataaccaaggatatccctaaatccacgttaattcattttcaaaagttttaattaattaattttttcttaaaccattagtttattattataaaataatttataaagcgcacacgtggtgccttataggttagggcattacaatggttgatccatgaaagactgaatctgtcaaagattggccaagaccgaacaaaatcactaaagtcagaagcaatctgtgtttagctatgtattatcgacaatttgtagaagggttttcaaagatctcaaggccgttaacatagttcactaagaagaatcagtaatttatttggttagataagcgtgaaacaagtttccaattgatcacatctcttatattagctctattgtcaagtcaagaaaagtttgtggtctattgtgatgcatccaaaaaagttttggggtgcattttgatgcaagctaatggggtttcttcttatgcttctcgtcttttgaaggataatgagtagcgatacccaactcatgatctagaactttccatagtggtctttctttgaagattcgacgacactatctctacgaaaaaagtgtgaaattatatcgatcgcaagagcctcaaatatttcattactcaaaaagatgtgaatatgagatagaggcggtggatagaattagtcaaagattatgattgtgaaattctttatcatctcgagaaggccaatgtagtggtaggttccttaagtaggaaaggtcccgaagaggtttttagcacaactacaattttgcctcagttatttatattgtcaaattaggtattgagtttgtggttggaaaacttaatacttttgcactgcaatgagagttgttaaaaagaattggaaattttcaactgaaggatccataatcgataaagatccaagaagaggtcttagctaaccaagctaaagatttctctgtgtcagataatggaatgttactttataaaaatttagtttccattcttagcaatgctgaacttagaaaggagattcttgatcaagcttatgcttattcattacatctcggtaccacaaagatttaccaagatttgaaacccaattacttgtggtgtagtatgaagaaggttgttgttgaatatgtgtccaggtgcttgacttatcaatagattaaggcttaagatcaaagacctgcatggttgttgcagcctttgacacttcttgagtggaagtgggaggatat

SEQ ID NO: 164950 - DNA, 1379 bp, Cannabis sativa
aacatcatcatcaaaatcaacttcgttctcatcatctgcctttagaaaggccaatcctttatgttgtacaaccatttacaaaatctgggaggcagtgagctgcaacaataataaaatatttaaagttgctttaacttgctagcatattcaagatctttatacattgcaattttttctaacagttaaataacacaacacccagacacaatcaaatacatattcaatctctagaacaacaaacagagaatatatatataaatagttctcaacacaaatagataaaatcaaggctttcaaatgtgattgtagccacaagatttagcaacagcacgatgctacttaaattatatcagaacgaaaaattataaccagttattggcataaccctcttttagataaactttgaacaccatccacctaaatatccgctgtgcataaatgaaaaatatatagcttaactattaaatgaatgccttaaaaaattcataacttaaacagaaaccgtttattactaacaaaatacattttaaacagttgcattaaaaaactgttttaactttccaaaacaatgttcagaatatacagtgaagagttttctttctgtataaatatagtagaataattgtctcattaagttaaaagagaattacaagcataagtatatcttatatcatatcatctatatggtataatacattagaatcatttagtatcctggtagaaagagacgaacaaaatacaagtttcaaaatgcaaacaaaacatttctctatcctcttcctccttacactaacaaaatcccaaaaggcaaatgcccttctttgtgtctagcattacattaacacaagtatatatatatatactagtgggttagcacatgcatctgctatttcactttaaaatattgtgtgaagtaaacaattaccaatccattttaaaataagaaagctcataataaaaattagtaactatagttccatgtttgcgctaatagtaataatttgtttgttgctatactacattcattccaaaaactatgaaagtatttctctctccgctataacatatatacattcccgaagcacataacaaagagaaacaactgatgtaaacagagagattgaagaaaattgagataactatatctccctctctacaaaaatactacttacaacttgttaattgctataatatattccacataccaaaagtatattaaaacagaagtaactaatctgaaagtgtgagagacatcaacaaaaatggcttcttaagttgtgagaaatgctcaaatgtcactaaatagttgttcaacaatgtacttgtgcttgatttcttgagagaattcatatattgatgagattttcaacactcaagat

SEQ ID NO: 164951 - DNA, 1053 bp, Cannabis sativa
agagagagaggccctcctcttaacaaaccaacaaaagaacctcttgggttcgcaccacgtagatcccgacagcgacccattagcattaactcaccaaagaacaaactaaaggggtagtagggcagtagggtctttacatagctctatgaaaattgaaagattaaacaaaagcaaagtacaatttgtcttttttaacactcttttctactttactcaccaaaacatagcaggggtgaattttagggctacccgccattcctcttctcactcagtaaaacaggtcagatcacattgatgatttttcatgtgatttttccctttcttttgaccaaatctatttatagaataatcagcattttgttagcaattaataaaatttggatagtaaaaaacagctaaagcttcttggtgcagtcaccataatacatgctcatttacttatatcgttttagaaatggtgttaggtactattatttatgtgtctcaacacacaagttttgttcctttctaaataattgagtaattaagtatatacatgtctttcacaccaggttcatcgtttgtagaactattttattattaatgtatcttagctagtagaaccagctaaagctagttatgatatatacaatacaaagagcaactgatcaaaaaagaagaaaaatgtgccacttgtataaaatctacccaacaaagaggtcccaatgccttcaaatatgataatgcaagtgttccttcaatcttaaatgaaattctctcacacgccaaacatagggcccaattacgaagggttacaatcacatcatcatcatcatgttatttcaaaataataacaatgctctctcattcaacaattaccagttaggaaagttttaattaagtgcacatattttgaccacaattaaggtttaattaccaacaagaataccttccagacaattttgaacatatttaaccaataataattaaaaaagaaaaggggttaagaaaactggattgaattcttcaatactctctctttcactctcatcatcattttgataaaataaaagt

SEQ ID NO: 164952 - DNA, 919 bp, Cannabis sativa
aaaatatgattgattttttatttttccaattaatttcataaaactaaaattatataaaaaaattactttatgcaatgaagtttataatatttttaaatgaattaatttttttaagcatttaaatttcttaataatattaatgataattcattaattaattaattatcattccattattaatttacatgtatctttttttttatatagtttttcaaagtaaaaaatactataataattatgatattaattataaatatatatgattattaatctctatcttttataattagtgacacacttattcttgcaataaaaaaaattggtaacaaaatctcattttatcaatcatttgtggccaaatctctttagtcaaaagttgttgtaatccataatatatttacggtaaaacctcctattcttttaagtcatttacacttatgtcttcaatcaaaaaatttagtggtattattagctccaaacataatttttttctggtgaaaaaaactaatacataaattaatattaaaaaaataatcaaaaaaatattattgttcaagaaaaaaaaaatagattatatatagttaatgacacacttaaccctccaatcaaaaaacaattagtaacaaaatctcattctatcaatcatttgtgttgcccaaggggcggagctaggacttgaatgttaggggggccaaattttaatttagtatcaaataaaatttttgtagtacatatttatattcaatactaaaatttaaaacggtttttttcttatgtcgaaaaatatttataataaaatgttaaaataaagcaaaaagtattccattatttaaatttctactctatattatccaaattagaaatattactacacttctacttaaggcacacattaaattttaaatgtggtaaatttttt

SEQ ID NO: 164953 - DNA, 1325 bp, Cannabis sativa
  modified_base (1062)..(1062): a, c, t, g, unknown or other
ttttttttttttttttcaaaaagctttacctatggttgataaaatgatctcatttttcaaaaagttttacctgtagataaagtgatctcacttgtaaaacgcactttagattagtggatatctgcttaatattcttcttgtagattttctcttaacaatcatgatgtttgtgagaaagataagcagtgaagtaaactaagtttaaacataatcaaagttaacgtagatggtgctctcttcaatgaatctaataattttggtttcaattttgttgctaaagatcatgagggttctttaattgaggcctttcattcatccaaatcaagagttgttagtcttgagatcgcaaagacagtcggaatcaaaaatgcaaactacaactacactgcaaagaatttcaaaccacattttttattcggtgtgatgcgttacaggcagtttgtgcggtgtggacagtttgatgaacactctttcttattattagaagttttatcaaatttatttattattttttaatcttatatgttttgtattgtttatttatgtcatatatataaaagtaaattttattaaactttattaaggtgtcgtttggtaacatttttgttttataatttcttaatcacaaaatgaaagtaaaatttttgtttttgaaaaacaaaaatgcgttctgtaactacttttattttttaattttaaaaacagaaaataaaagtatattcactaaagttcattttcattttttaattttatttaagtcgggtctaagtccagggttagagatcgagttcaacactagggccgtgaggggtggggggatttgggtctgggtctggtcagagttcaaaaatgaaaacagttttatagaacattttttcaaaaaataattttactttatcaattttaaaaacaaaaaactgattaaaaagggcttttcacaaaaatattggattttgagtaaaagtttacaattttattgttacacggattttttttacaaaaatactgtctttttataaaataacataaaacaacaaaacaaaacaattaaaaataacagtngaacaactaaaaaataatcgtagaataaatgtgaaaacttaacacagtacacagaaattttgaaaataattccactcacagtaaaaaaaaaattagaagtttaagtatatggtaaaaaaatcttattaaaaaaagtattatcaaaagctacctaaatttttccatatttatgaaaaaactcataaaaatgggattatttcacaaatacacaaaaataacaaaaaaatgataaaaatacggttttatgaaattttaaatatttt

SEQ ID NO: 164954 - DNA, 881 bp, Cannabis sativa
tacgcttctcaagaatggggttagacatccgcccacaacaccaactggttgtttgacctgaagtccagacccaagcagaacaagtctgggtacttctacttctccttgatcaaagaaaagtagttgagtggcaccacaaataccgatgtgtccaagattggtggttttgtagaggagtactattttgtcaaatgcatggacactaatcacacaagcttttaacacattccctcgtactgtcgacctcccttcacactagaacttaggaagagggcctaagaaatactcaaacttcccttggatgctcagaatacttctctcttaactactgaggccaattttatcaagtataaactctatctgactaaccatggtcaaggggccaagtaggcagtagaagaggttatgttcgatcaagaagaggaaattgtgcccaaacaagaaactccgaagaagaagaaatagaagaaagctcctcaatatgaccaagtacctgtcgagcggcctattaggatcagagatggtcttgaggaggtttctcatccttccgtctaggtggaagaaaagggaaaatctattgtggtcgaccaggaagaagaagactttttagatgaggatgccccttccttacttgtttcagagggttcccttgtacatgtgcaaggtagactattttctcctaactttgtttacacttgctttatttatgcttttctaacatctcttttttacttgtgcccagttatgtctcaaaggatgctgtgtgcactaaagaagaggtcaggtgataccttcggccaaaagtctctagtaaaatgtcctaaggtggacgatacactaccaaagtattgggttttgtgtcctaaataaaacccatttca

SEQ ID NO: 164955 - DNA, 953 bp, Cannabis sativa
tttttcaaaaattacaaaaatgattttgtgttctcattttcaaaacacaattttgaaaacaagaaacaatgctaaacaaaccttaaatgaatgttattttatttacagagttcttggggatggatgttaagcctttcattttttattatgctgaactaaagatggccacaaatgattttgattcttctaataagttgggagaaggaggatttggacctgtctacaaggtattaatgtagctgtattaatcattatatacaaaaggaattcaaattccctttcactatacatttttgctttttgactcaactaataggggacacttaaagatggaagagttgttgcagtgaagcaattgtccttaacttctcaccaaggaaagagtcagtttgtggctgagattgccacaatatctgctgtgcaacatcgtaacctcgtcaaattatatggatgttgtattgagagagacaaacgacttcttgtttacgagtatatggagaacaagagtcttgatcaagcattatttggtataacaaaattttattgctgcttttatacaaataatagctatatcaaacatgattaataatatggttggtcacattatcaggtaagcaaagattaaatttgaattggtcaacgcgctttgacatttgcttgggcatagcaagaggtctaacttaccttcacgaggaatcgcgaattcgaattgtacacagagatgtcaaatgtagcaacattcttcttgattcttatctcattcccaaaatatcagattttggtttggccaaactctatgatgataaaatgactcacataagtacaagagtagcaggaactatgtaagattttctatgattgatcatacttaattttgcttttacacttttcattatgattattagtaacaaactattcactaatgtttcattgatgttgtagtggttatcttg

SEQ ID NO: 164956 - DNA, 3385 bp, Cannabis sativa
aattacaaactggacgaatgaatctaacaaaaataaaattgcaactggaatgaagcaataatctcaaaacaaaaatgtcttgcttaaataaattttagttgcatatgttaatttaaaagatacggattgcactttccatgtcactcttcaagtacaagcacctcacattttgccaattcttcttcaatagtgacactagaaaattgacactcatctgcacattctgaaagatttgcttctcctccatggataaatttccaacagcaacttccatacaaaggaccttcttaagttgaaacttcaccatgactttttttttttttgataaaaggtgtttatatcatagatttataaatagttagacctcacggtcattacaaaagagggttttcgggacagagtcaaccgggatagacccaaaagtctgatgggagaaagtccacctaaccacattatgagcggcaaagttacaagatctactaataaatgaaaagcaacaactactaaaagagtgggatgacttagtacaaaatgagatgtagttatctattgcccaatgagaccccttcccattgatggcgtcgataaccacactcgagtcactctccactattacatacttagagccaatatccagagcaaccgtcaccgccaaagagcaggccgccgcttcaccacaaagagcatctgaaaagttctcccgagctgtctgaactctaattactctgccaagatggttccttgccacaaccgcagtacacatactatccaaacccacttttacatcacaattcagcttaatccaatcctgaggaggaggggaccaagcttcttttatagctggggtaggactttggagcaaggtatcaaacatatctgcataagaattacaaatattatcaatgcatttgttaaaatcaacaggacaattattatggaccttctcattgcgcactctccaaatagtatccactacaatagaagcatataagaatatgtcatcgacacgagctcctttatgtttaagatcccagatgaacttgacccagtcccaagctcggattcttgtatcacacaccagataaataccccaaggagaagaacgccagagatgaagagccacctcacaggatagaaacaggtgttcaatggattcaacacacctaccacaaaggggacaactttgatcctcaatatgaaatctagagccgatcacaactcttaccgggagggcattagacagtatgcaccaccataagaccttatgtcgctccaaaattttgctattccagagtttgttccaaagctttggggcgacgtcacaatggggagctctttccaaggcttgagcaagataggcagacttccacgagaactgcccatgactctccagggtccatatccatctatcaaccccaacaccagaaggttgccctcctttgagaatggctgtaatagtttcatggtcaaaccattgatgcagcttttgggtatcccattgcccattgtctaggacaagatctgccacatggttaagggtgggggaagcatcccctctcggtttcggacagaaacctttgtagtgagggatccaggggtcccgccagatactcgtagtctttccatcagcaattaacttgcaagcccctttcctcaagatagaattggctttcacaacactcttccagaaccaagagtcagaatttttatacctgcaggtgagaaaatctttgcccctaaggtacttcgctaccagcactttgcaacataaggattggcttccgtttaggatattccacccccattttgataagaaagcttggttcatttctctagttttcctgaagcccagtccgcctaaagatttcggaaggcagagtttatcccaagccttaagatgaagaccatgatttcctttctcgaaaccccaccagaagtcacagaccagaccatcaatccggttgaccattcgagtagagagttttgtggtttgcatagcatacattggcagcgacagacccataaattttataagagttgcacaccctgcctttgacaaagtttttgccttccaaccttggagctttgccgtgaggttgtctaaaataaagttgaaatcagcgtccttttgcctagatctgaacagaggcagacccaaatattttatgcatccctctggataatcaatgcccaaagcttccttgatatcacgccgcatttccattggggtgtttttactgaagaaaatggtagtcttaagcttatttacctgttgacccgaccaagagcagaattgttctaggctactccagaaaccatttgcctcaattaaattcgctctacccaccaaaattaaatcatcagcaaagaaaatgtgggatagcaccgggcctcccctgctcagttttatccccttgatgagatcccggtcaagggaatcggtgatcagtcttgaaagaacttcaacagcccagatgaaaagataaggggagagggggtctccttgacggagtccgcaagaggggttgatgttcccaacctgacccccatttagacagacgttgagggttgtggttgaaatacactgcgaaatccaatgacggaacctcggaggaatgccagagcaatctaggacatgatcaataaacttccagctcagcctgtcgtaagctttaacaagatcgattttgatggcaaagaaaccctccttacctttctttctattaaaggaatggataatttcttggataatcacattattgtcatgaatattccgccctggcacaaaagcagcttgcgtagggcaaataattgaaggaagaataggtttcaacctattagctatgatcttagctataaccttgtacaccacattacataaagaaatcggcctgaagtggtttgtgcgtttaggattttggaccttcgggatgagcacaatattcgtggcattaatccatctatgcattcggccactcacaaagaaatcttgaatcgcatcacagaagtcagcaccaatagactcccaataatgtttatagaacaagactgacatcccatccggacccggagctttatgactattcatggcgaacagtgtttttttgatctcatcagaactaggagagcaaacaagagcctccaactcatcctgagggatttgctcatgaaacaactgggagcagttgtaatctgggcaagtcacagactccgtaaaaatacccttaaagtaatctaagaatttcctccctacggcttcccggcctgagatccaggcattatctttgtttataatactctcaatggcatttcgacgtcccttaatggtcgccgaaaggaagaaaaactttgagcatttatccccatctttgagccaagaaattct

SEQ ID NO: 164957 - DNA, 1104 bp, Cannabis sativa
cacggggatgctggctcgacttttcctcttagaaatcaacggcctatcgcgcccctagaagcctagaatctcacatacgaggtttacgccacgaggagattgttggagcatataatagggtctcgcgtagaactccatggttctattcctgaagcctaaaagtggctatgaaactaccccaaaaggacaatttacatcctgaaacaaggcgaagctatgctcaactcctcaaagatgaggccacaagttaaactccaagcaaatgaccaaaaatttgggtctaaaattcccagctcattttgggaggtataatatgtctgattgctgactggtgcaacatcttatgtccatttgccaatgtcattcaactcaagagtgtacatgtaacagaaatgggaaacattctcaaccatactctccccgagagaaaaaacttgatttcttccctaaaaatctaaacttaagaagtgaacccagagataagaagcacattcggccgaaacatttttggaaaagaaaagatacgcccaaatccctacttttgcctgtccatggacttcacaaaagctttacctatcaagttgcatggcacaccgaattgaaaggctgaaaggaccaatgtaagataaatgtcaaagtgtaaggcagttgtaggcgtcaccctaaggacttgaccccatgaaggaatgggactccaaaaaagatgcgagaaattgtgaaggactttattttacggcaaaggccatcttctggccaagcaaataaccttctaggtagcgaaccaaaaaggcattgtggcacttggaaaggaagagccaaattaaaaagtagttcctaaatcaactaggagacaatcaagactaaaataaatagggttaaaacactggccattagaaccaggtgtttcaaaaacacaaccatcccctacacaatttatgacaataggtttccaagaaaggaacagtgaaaagaaatatcctattcaactactaaaaagccccttgcggccagtggagagtttaattgtctctgcagctgaaaaagtatagctaaaaaatgtaaataaataaaaaaagaggatatacatgttggaaattattttac

SEQ ID NO: 164958 - DNA, 1372 bp, Cannabis sativa
  modified_base (1294)..(1313): a, c, t, g, unknown or other
aacaaccaccaccatctaccattgagcaaaagcaaccatttagcctatgtttggtagagggaaatgagtgaaaaaattgtgtccaatttagcaaaatcacaatcaattttatatttggtataaatctaagttgtattttattttgtattaaatttcacacataattttaagcatgtgtcaaatttgatacacatttagcactaaatttgtgatgcaatgatatattttagtatttttacaaaacatatattcctctaatagtgtgaaaaaattgtgtaaaatttagtataaaatataatattgtgttaaatatactttttttttatttacaatattatcatagagcattaataagtaagtttaaatggataattatgttgtaaaatacaatttttgtatattttttaatttttacagtattctataaaattacaaaaaaattatataaaaataataaccaaataatatcaaaataacatagaaataatatacaaataataaaaaatcaataacaaaataataaaaatataaaaacttcacacgcatttttttttaggtatattttttaaaattatttttttaaaaaaaaaaatctaataagggattggtggaatattttttgaattattctgaggaaagctgtgcagagaatttgagatgaaaggaaaaagtaaaaaagcgtgagtggcacgcgttgaaggtcaaatggagacaacaaatgaagttatattttttttttgcagaagagcgtgcccagaatctaatctacacaaagaatcccaatttatttatttattttttaaaaaaataaaattagataaagcatccatactccatagcctcgatgtccgaggtttttattttctattatttatttatttatttattagttctttttttgagaatgttttgtctttcccagtttcgaggcgcgtgtaacacggtctttgttgttactgtgggtcccacttctcgttccttctttatcttacttgtctgacgtggcctttctcaataatacgattattgaaatgaaaaattaatgaattgtatttatttattttgttaagaacaattaaattttcaggtaaacttatatagtcatgtaaatattgttcacctgagtaaaattaacaaaaataggctagtaagccgtttatattataatgaacaaaaattgtaatattaacttcaactaaattatccgtaagtgttagaaatagtgtgaaaaatactagattttcatctcgaataagcatatgacagatcataataggggtgttcatccgatccnnnnnnnnnnnnnnnnnnnnaacaacatccaatccgcactaagtgcggatttcatattttgaatccaatccgatccgca

SEQ ID NO: 164959 - DNA, 962 bp, Cannabis sativa
aatcaaactcttatcaatatatccatcaaacccattttaatcgttgatccaaataaatttaattcataaaatatgtcagattagtatagaaactatcatcctagtgaacccaaagtcaaatcttaatccacacatcgggaacaaaatcaaactatatccaaactaaaatttgtcttcttcttctttgtatccatccaggtctccttttggaagctccgatcgcatgagaagagagacgaaagaaggattggacttcaatttcggtctactcaccactaggaactagctcacatcgtcggggaccgtttggtgaagattctccactaacgttagaggtgagggttgattggctcactgtcaacgggctcgggacggcgatggttacgtgctttgcgctcaagaaaaaaataggtggtggtggaagcggaaaaagaacaaaaagcttacaaaaaaaaaaaagtcgtcaaacagatttgaatgaatctatgctccacgaagaagaaggggacttgagagaaaaacaaataaaaataaaaaataatattaaagttttttttataatttatttattattaatttttttaattaaaattattatttggaccaataaaaaattgacacgtgacactttatttgggtttaacggatcagttagaaaaatgaccaacgtacttacagaaaatgtcatcttagagactaattactaccaatttttgaagttgaggactaatctgcatcaatcctaaatttttggagacttttaccaattatctttttattttattattataattatggaattattcttggttctttaaaatttggtgtggtgagaagttttacactttcttaaatctttgttgaatacagtgaacaatacaataataaataataatcaaataaaaagtcgtgcttttataattttatttttttttgacaaagtgattagaatcactcatgaa

SEQ ID NO: 164960 - DNA, 1700 bp, Cannabis sativa
  modified_base (1636)..(1651): a, c, t, g, unknown or other
ctctctctctctctcttcaaactcacgatggaacccaccacaacccaccaccactaccacgaagcccaccaccatcaccacaaagacctctctctccctctctctctctctctctctctatctctctctttctttctttctctctctctctctctctctagttcaacacgaaagtagatctcgagggttggtggtgcctcctcgtcgacgactgtaggttcacaaaataattaatctctattacttttattttgggatttatgtattttttgagattgtattttgcagaggtctaacagtttcttcacatattaatattaaagtataatgaattatcaatcagtgataaaaaaatactgacaaataatttcttacagatacaaattcgcatttatcatttctagttacaagtaagttgcatgttagttgaataataattttgctactacaatatcatagtattataaaaataaggattggacttgtcaaatacgccacctgaatagataaaacacaattgttgtaatattcatttaaatatgtgaaattattagttgttttgtgatttttggttagttggctcgtaatagatataactgttgcattatatttttcttacagttttctcatagtagagtgaccataaattaattttcaaaatgtcaagaaagggatgtaatttcgtttctcatattttacaatgggcagtttgatcaaggaatgaattgtgcaaattacaaagttagtggcaaattcatctcaattgattgaaaatatgaagaacttgtacacaagttgaaacaagtgctggaatacaacaaagaaaacactcaattataactgaaatattaagtgaaagaaggttaccaatcgttgagataaatgacgatccaagtctatttttttacatgatccaagtaattatatattaaaagaaaatttatttgacttttttaattttttcaaaactcatacaggaagaaatattttctttaatacattgcgcatattgatttttaaatagttacataacagttgatttaaaaggagccttctcctatttgggtatgggctcaacaaaattatcataagaaaaattatcatttaacttctttttcccttttccttttcctcttggagagtggagacagatttcaatcccatttttgaagctttagggcatgtaattagaacttttccacaaaagaaaatggagaagatgaagaatgaattatatataggaaattgtagaaaaaaaagagaaaaaaaaacttgggctgattctttaaaagcaattgaagattgtgagattaattcagtttttttttagagatatttcttctttaaatcatatagggaagtttaaatgtgtagttcaaaacgaaaaaaaaaaaaaaagaaaaagaagaagaaattgaaaagataggttcgttgagtatgatggaagaatataatgacatcaacattaagagaattatgtgtgcaagtgatattttgtttaataaaaaaataagaggtataaaagtaatcttactgttgtgaaagtaaaaatgtaataaaagttaaattttgcatttattatgttaaaatttcttaggataagttgaaaaatacaacttttattaatcaattaatnnnnnnnnnnnnnnnntttatatttaattgaaacatacttctttttatatgtattgtactcaaaa

SEQ ID NO: 164961 - DNA, 3179 bp, Cannabis sativa
aaatagagaatttcctccagagtcaagacatccatcttctttactctacaaagcacgaaccattctgcaagtagcttacaaacttggggaataaattggaaaggagcaacacctacttccgcacgaaaacatgcagaataggccctgggtggaagatgtgctcccatctttgtatgggcccagcaccagacgccaaaactatctatgcacttacagggagactccctaaggacggagagcttgttgcagaagagacctggaacattttgaaggacacattttgtttcgtattgccagagagcatcataatttttgaatttgttagtgtactaattgatctcccatttagatgaattttatacttctcgtggagattcaacatccactcgctctaagagctcaacctcttctactggaagagcttcaactatgatggaaactggaaaagaacaagaaagaaagcacactaagcagctagacacccatactaaagaaaatagcatgaacataggagagtcctcccctaaaactgcttggagaggtccctaccagaccctacacctagaagcaaagcactcagagagtcttatttctagacgattagattgagaacatagaaagccaattgagggcgcaaacgacatatcatccagaactataagggtcctagatagaggaaataattttatccatctctgttgctaaaatttagctattttaatcaatattcatcaaaaagagtagattttcacagaacctaatcaggatcatatacatgtgcaaagctctcatagagtcttatttccagacgattagattgagaacatagaaagccaattgagggcgtaaacgacatatcatttagaactataagggtcctagatagaggaaataattttagacatctctgttgctaaaatttagctattttaatcaatattcataaaaaagaatagaatttcacggaacctaatcagaacctattctacaaaacattcaagaaccactccaatgcttaaatccttttcaactacaacctaggggagcatgcaattatatatatatatatatataaaagaatgccaaaaccaaacattgatcaagattctagaaatacaagaagagaacctttcttgatgaggaattgggtgaagaggaagaacttggagaaagctgagagtttcatttaggaatcctaatatcgtacaacggccgtaaggatattcccatcaaagaaagttgatcaaggcatacaaccctagatcgaagaagatgagtcttgttgatgagttcttcgatttatgccagaatatccagtgtttttgacgatgctaaagaatcgacagttaaaactagaggtggtgctcctaggctcccttgcttgcaaattcgaagaagaagaagatggatgcaccgatcgatgtagtggttcattcaacgaaattcgattgtcttcttttttctctgaaaaatttgaatttaatttgaaaattgggcaaaagtgataattgggaaagtttcactgtatttatacataaaggtggtgatccgcgcgaccttagatcaatggccaagattacgtccaagaaaacacaagatgaatgacgtgtccccagatcattagccaggattacatccaagaaaacacaagatgaatccaacggtctgggaaagctgtcagtcacacatttaatgcgatgcttggaaccaagatatccaaatgatgatattctcctcgagattcgcactaatgtaatcaactgttctttcacaaagtcttattgcacgtcccacattaatgaaagtaatctccaagagccaaaaatgcaatgtcgctgttgcttcatttcaaaaaaccagaagctgtcaaccacaaataatttagtttggaattcaaaaaagtttcacctttagcctccacctatcctcacatcatccaagaggaagaatgcaaacttccataacccctagagttccggaagcttgggataaatgttaaagttggatacaactcaatcactttagggccaatagcaggcccaaccaagataatgggccagatccattagcaaagtcaactcttccgaatgacagacatacgactcgtccaggcgagataatcctccaacacaacaagaatctggaagacatcatttgaagcgtccgataaagtagttagcaaaagtctggatatctagctctgtgtcacatctattaatttcaagatcccacgatgtcagaacttaacttctaagatcttgtccgagggtcaagatccctcaattgctcaagttaaatttagggttcaaacacttgtaaaaattataaaacttttctagtcgtaatattgacgtgtggactaagacttgttaacgctccaatgcataaatagtattattttttttttttattatttatcaattttcttagctttcacatttattttattgatttttgaaaacaacaataaatataatgatatatatgatttggagagcacgtcacagtgacttatgggattagaaaatttaatctgttaacagcttaattcaaagtgtgaaatttgtactactaacaagaattcatagtacgcatacacagaaaataagagataaagacaaagatcactttgagaatatttgtaattgttgtaaaagagagggtgggaccgtggaagcaaaaggctaacaagaggtttcacttgtaattacttatgtatataattatttcaatagtaatacaatcatctttttttaagaaaaaattacaccaaatagttttctcaaggccgccctgagttaatttgagccctaaaaaaaaatttaagctttttttataattagaaacgatatttttaaaaattattaaaaatatatgtatatttattattattttttttattttggctcctaataaaagtgaaccctaaatatggacctagcccgctttagcctaaagccggccctgagttttctacgtagaaatatttataagagcaaaaatatttttaaagagttttcttaacaagagttagttaggttagcctacttaaaatttgtattaaacatttttcctttaaggatatgctatagatttttcaaaaaaataaaataaataattattgggaaatttacatggtatactaatttttgtcatttttttgcaaaaatactgccagg

SEQ ID NO: 164962 - DNA, 929 bp, Cannabis sativa
cactaaggccatctataattatttgatattggataggtaacaaattcaaatacaacttaattaattagtactcttaaattatgtatatgtatatatatatatatagaagaagtgagaagagcagagaagagaagagattgcataataattatataatagttatagtggcagacattaacattatattattggttttgctttttgttagtggaagtggaaagaggagagtgatagcgatatgattactgatgaagttgaatcaacttaaagaaagttcctttctggtaaatttcttggctatggtgtggctgctccaatttggattagagccacaataaaaaaaaaaattatttatattaaacaacactgctcttacgatgtgacaagacgtccaataaaaatcctccattatggtcttaggatggattatattgtattaatatatatccattgataagatcgggaataaggtgttgtttccaagcactagtggagacgactcacacaccctttgagtcaagtcaaccattcaaattcaagtctttttctatattagccatagccaccaccttcacactttacactctccgaaaattatcgtgctcttatagaaatatcaaactaataaaattacaattcaatgacaaataagaacaaaatcacaaattaaataatgttacaacactaaataatatatacacataaaatagaaaatatagatgaaaaagaaggattacaacttaaccaataaactacacatgaaacacaatatataaatagcataaatattaaagaaatatgagagcaatcaataccacatactaggggtgttcattggatcacatccaatggatttggacccatccaatccaatccaattatttattggatattggattttttcatccgatccaatccaattgaattga

SEQ ID NO: 164963 - DNA, 1881 bp, Cannabis sativa
taatctaaatttcagtatatttgtaagtttcccaattttttttttaacccttttttacaattttttttaaaatattttttgtacatttttttttaccattttttatgtggggtttttttttttttttgctacatcttgtagtgctttttttttatatgatacattttgtagtgcttgataccaataacgatatgccaccatttatgatgtttaacacatgtattagcattttttatagatgatttttttttacaacaacttatgtggtttttttaatgatcttattattttttttccttatgaaccattttttaatgtattattttttttataatatttttttttctaataaattattttttaattatttgttaataaaatattattatttggcaccttaaaatgtttaatactatacaaatatgacacttaatacttagttagcatattctatattatatacttaattaaaacttgtaagacccgatattgaaatacaccaataagagtatgtcccatatatggtgtttagcacatcctttaatatttttcttatcatctttaatgtatggtgtataatttgagctaaaaaaatatgtcaatattatatttagctcagattttatcatagtgcttcaatacatttagggtaaaattaatcctttcttgatagaaatctgtgaaaaaataacaaaaatattaaattgttattgaaagtatgtaaaattttattaattatataaataaaatgtgaaaaaaatgattaattatattaataagtgaaaaaaaaaagtaaataaaaaagtaatatgtattgtggtatatttggtacaacttttagtatgtgctaaatttggaccacttcatacaccactattagagtttacttttatgaaaatagactaaaatatgcatatgcactacacttttagaactccattaaaagtgctcttaatatgtacatatccttattcactataataaaaattagtttggctttttttttttttttcaatcatacataactttgcaagctttttttttacttgttccacactgcttaggtgagattttccttccttgtttttttgtattttctcaaactaaataaaataattttagtaatttgtgatttttttgtcatgtgtgtgttttattttgtttgtaccaattattaatatttttgtaattttttttttgaaacctcacatttcttccctttttctcaaaaactcgctctcatttttttactcaattttctcttttacaatatttgttttaagtcttttctatatttttttttaccttcttttttctcctattttttttttcaattttttaacttctttttaaaaaattcttcttatttacttattagattttatctgtgtttctggatgaaggacacgtagcaatcaatagaagagaatatctagactatatatttttaattaagtctccttaatgttgaccttggaaaggtctgatcgaggagaggcataagaaacttgccacaaattaaataaataaccatttgggatctgagaatcccaccattactctggcaccaagagaagactaacttacttactagtacaagcagatgttagagagccacgtaaagagtctaggacagaagcccattacgcacagagtatcgaaggccacttatgaggggaaagctggatggctttatgatggttattcttttcggagacagtatcagatcttgtcccctatgtcagactatggtagtgcgtacaccctctttctacgctcttctttattcgacggctcctctgagcattttgtccactaagtgcaagccttcacccaacacgtgccctgcaccaacatctggttgggttttatgccctaaat

SEQ ID NO: 164964 - DNA, 1216 bp, Cannabis sativa
aggtcgtgtaattaagaggtattggagtgcaccaacaatagaacgatacagttgaggatctggtgtaggttcacttccataagcagacagccaaagactattgatcataggagtgggggatggttttgcatcatgcatcttagctttgagcagtaagtctcgaatgtatttagcttgagagagatgtaaacctgaggaggttttttgcacttcaatgcctaaaaaaatagtgtaaatctccaagatctttaagagagaattgatgatgaagagagataataagatcttgaatggctttgttgttgctgcgagtaactaagatgtcatcgacatatactaacactaaggtagtatgtgtagatgtatgttggatgaagagttaagagtgagtgatccgacttagatgggataaacccaagctgtagaagacagtggtgaagtttatcaaaccaagcacgtggtgcttgtttcaagccatatagtgctttatgcaacttgcacactagattatgagctgtggtgctctcaaaaccggggggttgtagcatatagacttcctcattcaatgtaccattaagaaatgcattgttaatatcaagttgcttactagaccagccatttgatattgcaagtctaagaacaattcgaattgtcacgggtttgacaactgggctgaaggtctcagtaaaatcaaaccccggttgttgatgaaagcccttggctacaagatgcgctttgaatctgctgtgtgttctatcagagttttcttttttttcaaaaaacccatttacatcctatgggagtccttccttctggtaatggaacaagagggtaagtcccatttcttgttaatgcaagcatctcataggtcatagcttgatttcattgttcttgttgtaaagcctctttgacatttcgtggaatctttgtagttaaatagactttgggtttgtgaattccagactttccccttgtttgcattgcatgagtgtttgttggaatggctggttgagttacagcagacactgttgctggtgtggtaatggatgctggttctggtgcaacagttgaagctggttctggtgcagtgacagtaacagattcatgaacaatagcaggtggtgaggcaatatgaggaatgctgatgggtactggtagtgaagcactgctgtgatgagtctgtgaaggagcagaagtgaccaaacttgtgtcctga

SEQ ID NO: 164965 - DNA, 769 bp, Cannabis sativa
ttacccccgtattataattagatgacccacacttattgcatcccaaattttagagttattacttttaaggcattaattttcatttggactaataattacaaaatttacactttgcaaatattgggggtcaacacttgtcccctagtctacgagaattctttcatgtatccttgtagactaagtttggtgagcttcgctcccatcgtttggtcccatggttgcctctttaggcatttttaccttggggtcttttattaatgaccctctatggggtagagttggctctaggagccatctcgaccctttttatgagttattattttatttgagggaatattttgtcacttgagctttctcaacctcttctctcgtgtaacctttcctagagggagtattgactcttagagcagtctcaacctcttcttagtaactcattggatgtatgggaactttaggccccttgggaaacgctcaaccttttttttatcatgtggttgctcccttacgaaacttcttttctgttgagaactctttcatgatttctctcttagtgagtgggtttctttttcgagttgttttacttgtgaaatcccttttgatcatataaggacttattaatccttcaggcattggtgatccttttttttttttaattttgagcatttgtgtgtacctaatggctaaggatgtatcaaccctatgggctatttgtaacgccctaaataattaggcacgctacccaaaacacttatgaaaccctaatccccta

SEQ ID NO: 164966 - DNA, 2402 bp, Cannabis sativa
tttttagtgatgttcctcgcagagctattggatttgcgcttgtttcttgtgtttttgccactacatgtctaggtagagttattagtgtttgcctgtgcgtgtggtaggtgaggagactgctggatgtctcgtggttgcctattgctgacatgcattgtttgggcttgtcgtatggcctcctcaagcttgatcatgccatcaactctatcaaggaactccttcatcctgttagtagagatccttcagatatcattctagaaattactcaacaggattatgcccttgaggatggccatatatcggccctcttatgtaaggtttttgaatttggtagccttggtcatgaaccttttgatgtaatccttcaaaggttctcctaatttttatttgactttgacaagatcttctagctgtgatggtataagacttgaagatgagagtttcatttggaattctcgagagaactcatcctaagagttgaatcttcttggggtgagtttgaagtaccattgttgagctgtgtccaacaaagtggttgggtaagcggcactgcacatcaccaataatcttctggaggtcaagttgaatctcgaagtatttgatgtgagccaacgagtatacttgcctagtgtacatcttccatatcgggatcttgaacttaggcaagggcaagacatttatgtatgccgagaatggtgacccccttgatcgatcaagttcaaggtccaaaggctttagaccagctatgccttgaatcatgtccctaagttggtccaactgtgcttgcacaaaaggatctgttgcaggggatgactaactggccctccttagaggggttgctaattgagaaaagataggagctagctggccataatctgggagagtgtatggtgaagtttagtcagtcttgtgttgaactgcagaccatggccgaccattctcaggtatgggtgttggctttggccggcgaggcctacactttgctgctatcattggtcgactagacctacattgggcaggctttggccacccattgctcttccatggctggccaaacttgcaaagggtagggtctggccacccgtactgcatccatggatggcaataactgtaaagggtagagtctggtcgcccgtgactctacggtcaactgatgtttgttgtgcctttacaagaggtagatcacaacaattactgaagtttaggtgatataggtgtctgaagtgatcagatttgcatcctgaataagcattttaggtgtttccacccgctcctagtccttatcgtttgaaaatcaagctctaggaacctctctccccttggggaggaagtgttgtcctctcgctggccaagggtgctcttgctcgtggctggttggcgatagactatacaatgagcggtgttgctaagccagagattcgtggctggccctccatgtcactggttgttgggatctggcaaccaggttagtgagcttgttaacagaccctccccgatctatcaatgagtcttcattgaagtggatctctgatcagatcctatcctctctcattggttctctggttgatctgccttttcagatcgctagctctcggttgcaacaatccaattcttcttggtgagatcggaggatgtactaccgatcatccatccatctcacgaattcacatctctactaagcaaacacatcacaattagtagtgcgtggttcttcaaattggcctacttggcctacagcttctctaagtctagctaactcgagatcctctcctaagtccacatggggctcacaaatcataggctcgccaactactggtcctgtctctccagcgtaatgttagagactagatctgattgtttttctcaggcgctcttgcccacgagtccttcctttagtgggaggctccaatggtggatcttcccttggaggtaggggcctgttattcagatccagcaggacgcttgtatcactttggctagatgtagaggtaagacttggggcacccattgttgtgacaggattcaccacctccgctgtgttcattagtattttagctgtggctggaacttgagcatttgaatctgcaatttgtgggtcttcagggagacccgaggatgcaaatggtgtgacaagggttcttctcgtgttaaccatggtgtttgatcagatacaatatccatgttttcaatgaaagcaccaaattgttgacttcaaaaagtgatcaaccgaccgtggggtcgtataaatcttatgcttaccacgtattacacaaacaaaacaaaaaaatagtaagcacaaagaattgtaatagaggttcggccccctgtgatagcgggtaatgacctactcccctttgttggaaatattttaccaggatctagatttactacccagtatgttt

SEQ ID NO: 164967 - DNA, 1165 bp, Cannabis sativa
ggccaaagcatcgcaaccaacgacatgtggctcttgaatttggtcgagttggcacacagcctctctaagtttggccaattcaaagtcttctcccaagtccacatgaggttcagcaatagctggctcgccattcccaaacctgtttcccttgcatagtattggggaacatagttagttgtggtacgtgggggcttttccacattgccaaaaccctctattcaaggtaccaatgatggatctaccctaggtgacaaaggctgttcattgggattagtttggttagtagggtcaaccgaacaggtagtgttggccgagttcgttgggcctgtcgggttggcagggttggcaggattggctacatccgtcgggttcgtggaaactctagtggtggctggaacatgaacattaggatcagcagtcatggggtctcgaggaagacccaatgaagtagaaattgtaactggagttctcctttttacagccatggtgattgattagatttgattaataacattctcaatgaaagcacccaaatgttgacctcatatttggtcaactaacagcagagccttatttatgatcgacccaccagagaaatatagtctcccacttgaaattcaatatccatatgcttccgatcgacgtagcttttctgtctacatttgtgaagcgcgcgtacgagatcgaatcttttcaatggcttcactggtcctttggaccaatttaggtatgttatcccaatttttatcctcttaatgtggcatgcttacctagacaaaattagtgtcacgcagcagtatagctcaccaaaagaaaggccatgtcagcacctgaacaaacaaagaccccgacactcaaacaggcatcaagtgacattctagctccgtcgtaggagctaggtggccacccctggcccaccctatggccgattatccttgggactgcactatggccgaccagcctggcctccacaggggcctggtcagccaaggagtgcactgcaggctttcctggacaattctacatgtagataagaggctataggctgcgaattgggccataaaagcacaatagaagggttgaataatatattgaatcaagggcactttggtcttttgtaaatatctaacaaactatgcataagttaagggatttgaattgtaaa

SEQ ID NO: 164968 - DNA, 830 bp, Cannabis sativa
atggtgattttaataattgttatttagcacttgtaattctacgtggggtcaagactagtcttgaattaaagcgaattaggtctgtgtttaggatctatttagcttatagatccaaaaataatatattttttttaaaatataaatatatatttttgataattttcaaaaatactatatatttttatataaaagacctaataatttttattatcctaagatctatcaaatctcaaggtcggccttacatgtaattattcatatataatttacaacatgtggttccaaaccataattaattagttcggcgtgaatagtttggtcaaccggaccgttttcaattcccaagttcggtgatagtttttgaattctcgggttcaaacctaactaatttatataatttttttatatacttaatgtatattatttttttttatgaaatattaatatttaagaataaatctaagtaaaatattgatattaatttaatattattttgaaaatatttttttctttattatttatggattataaatttattaaaagaaaaaaaaattactgaaaaaaatgaaaaattaattaattagaaaaaagtggagcaaccacgaaatacgtacacttagatcgaaaagcaggatttgtaacgtacaaattatatatggttttgaacaaaactaatcatgttcttaagggaattggtttggttttaaaattttcaaaaaactgtaatatattagtttagttctaaaaaggctaattaagatttttatctcttgaattttgacatgtaccaaatcatgccccttgatcttttaagatcgttaaaaatgccc

SEQ ID NO: 164969 - DNA, 1656 bp, Cannabis sativa
cggttgtggctcaggtggccgggtgcgaagagagcgaagaggctttccggaaggtgtccgggacgggtgttcttgtcgatttgcttgatccggcgactgggtcgagtcttaggacgaaggagaatgcggtggcggcgctgctgaatttggggcgttgccggggcgagaaggcggtgagggaaattaaggaaatgggtctcggtggcgatagcggggcggtggagggggcgagggaggtggcggcgagtggctcagccaagggaaaagctaaggcggtggctttgcttacaatgattgatgttgggaatgaactcaggagtggaaatgggaatgagaatgggaatagaattctttacgggtttagtgattctggatttgattctttagtaagtcgatcttcatcgaattgagtattcaatcaaattgggtgtgtttttattcttttgtttaattaggaaaaaaaaaaggttttaatgctgtatattcatgataacttacattacattagtagatagatagttgaaatgaaatatttgtacaaatgaatgattggttttgttttgatattatatgttagagaaacacttgcattattacagaaatggttattgtacttgaatagattgccataaagagtagtttaaatttcaattagtttttcaagcagatgatgtttttaaaataattgtctaatcttagtttaatgatatagaagctgttgtgagtgctcaccttaacctcattataataaagttggcaaaaaaaacatgtgattaagcttactttaatgatgttattttagagaattaagaagtagttttacatgatgaaagtagaggaaaatgaaattacatttttgtttgggtagagttgtaatgtgttacaagaaaaatcaactaaaaagacagatatagaagtaagtggttcagtgaaagaatcttcaagaaaagaatagtaagtgggtgcaggcaatctgagtgggcttgacccaaaatgaagagccaacttgagcgacactaaagattggcttgctactctccctaatattaggacagctaccccaagttgaaaattacaccacccacattcaagttgacaaatgcaattcagcaacaactataaagacattttctcctttttttttttttggtattggatcaaccgttagagaaatatatttcaaaggaatataaaataagaaattgatccagcactcactctattcttttatctaaggtggctaactgtaataggaattacaattactgtaattataattgttcacttaggaatcttacaatgcaatattggagttatgatgggtgtaacgtgcgtgctaagatggcacgttacaagctaagtgatgtccacaagttggccaagtggtggcgtatgttgtggtgcatgctgatgctttgtttgtatgcagtgatattttcgtaaatatcttcaatattgtccggaacgggacgagacttgatattcgccatttatttgggtctacaaatagaatggtgcaatcggtttggcgaaaccatatgatttggtatgcggtttggccgtatgtctacagagccaaaatcatgtatgttcctggtagaaggctaaaagttcagaatgctctttaagggagtaccttggtgtcagctctccacc

SEQ ID NO: 164970 - DNA, 837 bp, Cannabis sativa
atgaaacacaattttatataaaaataaatggtttaatgttagttttggtggacatgaaagaagttcttattgtgggtcccattttcacccgtccaacaatgctaaacatgaaagaattgctcaacatgaaaaatacccttttcataactctggatatcatgtcactactactataaaaaaaaaaaaaaaagtgttctcgtcagtcaaaatgccaatttttttaagaatcgatgctattaaatttgagttttggtgtaaaactggcgctgataaacattcattagcatcggtttataacaaacggtaagaattagcatcgatttataacaaacgctaagaattagaatcgatttacaacaaacgctaagaattagcatcgatttagaaccggactaagcaaaaaaaaaaaatcccaataatataacgcccgcacatcaaataataaaatccttcatataaaaatacatatttaacttagtcacacccccttacatgacaatctctctctctctgacagaccccgaccaacagtgccacctgacctctcgtagtcaccctaaaaagtctcaacctggtgtcgactaaccccagcaataaaggacatccccaacttgatcaacgagttagattattctcttgtttctctctcacacacacacacactattttttctttttatttttgtaggtccactcgtcttcttcgacgtgcacatatgagagcttcggttgtcttcttcatcgcacacgggagctctgttggtctttctatttctttctattgtatataataatatacatatttgtgtatttggaatgaatatatatctttatatat

SEQ ID NO: 164971 - DNA, 2070 bp, Cannabis sativa
aaaccctaaattactctaattcttgtttcatatttctaattaatatcttgaaattgaaagtaggtatattaatatgttgttagcgatcgatgaaaataaattttgtttaatattttatataaatatattttcttcattaattattaaattaaattaaaataaatacgtttttgttattcgtgtttttagataaatgatatgtgtatttttaagtccgaaaatcaatttacgagcctattcaccatacccaatcaaactagttagtcagcccacaacgaaatcaggctatggctttgggtttaactgcccaaccttggcttcgacaaagccaaaacttttggtccctaaaggatgaatctcgtccttagaaggaaagactcaaagaagtgcagtcggatacccttatgggataattcggaaggagtacttagtcgaagggttgtctggcaacagtcctacatggcatcccctgacactgaatcctacagaatcaggagtttgtctcctgtgtcatgcctgggaaaggcacatggcaaaaatatcaaactacctttttgtttgacacccactactctgatatccattattcgcgatattggcagcacacgcccagttgtcaactttagacagtacgattttatacgaacaatggaaaccttctaagctaggcctcacctacccaaatcaatattataatgtattttaccttatcggtgtgcttattttctcatgcaaaccctatcaggtgagtctgcctgataacccagttttagcctataagtaagactttatcccttcatgcaaagttacgaatttttgacaagaatacttgtgtaaaatactccatagccaaaagttcaataatattaactcgtggattaaagctagttaacgtcacaaccacttaaaatttcttatctcatttgctttataatcattttccccttagcttattcttttattaattcggtttctgaaaatttcggtaaatattttggtattttcattaaaaaatataatatttaaataatgcagggaaaaaataaaagaaaaaactgatgtatgatgtaatgtaaaaatttgaggtaaaataaaaaatagaattttagtaatatattttaaagaatagagtaaaaaagttaatgtgagtgttcttataatatgtattttttttattttaataatatatacttttttgaaaatttccttaagaaaaatatcatgcaattctgatacataatgtacacaattacgttacataaatatataatccatcacaacatatatatatatatatatatgtacatgtgaaaacatcacaaattttgtgcctccctcccccaaatatgatcacacttggaaaaaaaaagatacaaagtttggtgtgtaataatatatacaatatattgatcatattggtttggagaaatatatatgagtcataatatattgaatattatataatatatatttatatgcaatatatatataatatatagatgatgttaacacgtagatatatatgatgtacataccaagtgggtacgtagtctagtattgagcaaagctggcatgaatgatacaactgcaccaaccatgcattttgcatgctcttaattatccatatatagacttatttatttatttttaagaaagaaaaagtaattaatatttttccaaaaagtattaagtataataagttgacttaaaatttatttgtcaatcaaaaaaaaaaaaaaaattggtgaattacagcaaaggaatctaaggatgaagagtagtatagtattaattattttatttattgtgataataatgcaatgcagtatattattattattagctagtatgaagaatatcagatctctctaataataataatctaaaataataacaatactttcagtctataataatcatttaaagtacgtaccttcaatttagtgtacgtaccacatgcaaattatatatgtgtcttttatagcttaggtgtatatctatttttttaaaatttcatatttgtaatttgtaataattttgtaacagtactttgtaatagttatcaattta

SEQ ID NO: 164972 - DNA, 2124 bp, Cannabis sativa
cagaaggccggcggcgattaggttttgtttttattatcgtttttttaatttaattaaaaaaatgaaattatcaaagtctggatattttttttgagttggtactgtttgatttctacttaattttagtttatgcaattttgctaagtgcttatgtttactgttttggaactttgataatatagttatattagttgataatttgtgctctttttatatcatttgaattatgcttattgagttcttataatcattatttgttaccctattaaattgattattcaaatcgttaataacctatctgagtaattattattttcctatgaagcaaataatgactagttgaaatttgtttttaaccttaaataatgtaatttggttatttaattggtatatttgtacttagactgcacttgttattttcagttttgtgttttaaagaaaattaggcttttctagcagtgaaatgttcatatagggaaattggtaagccttaatatcagctttcttggtttaagaattacaccatttcattaattcattcagcttcaacacttttaagtaatcaaagtaatataattgtatggaaagcttgtgtgtggatgtgtttgtttataagctagttcaagttcagtgtcttgtgaggtttattagttgtgatgtagatataggacgaaaaaggtagtgatttttgtgtgaatctatgtaagtatattagtctatttcgatgttagtttgtttcaattcatcctcatgaataattgaaaccttttcaacccgaatggtttgttcatgagattgacattttcattgaatgtctgatactattgctgaatcgtgtcaaggttcagatgttgattatccatgaaaaatcattttttgtgacctatccttattgtaacactttctagtcatgtggggttgctggattgattggtagacctgcaactgttgttgcttggcagctatgcagaattgtcgaataatcgtgcaatctcatgtggctcgggacagtcagttaatgggcaaattaaattttcacaacttctctcagtttagcactcaatcaacgtgaaaatgtttgttgacagtcgctgaaaaatgaagtattgaatttcaaacctcctcattgttacattcttgtttgtgattggatattcatttctatgcatgtttacctattatatacttaatgtagttaatgtattagtatatgttaatgccaagcaaaatgtttcttggccaaagtccaaaacatgaaataagtagaaacaaaaagggaacaaaatgattgggaaagaattttttgacatgttttgttatagaaatttaattcatcaaatgagttagccttaaaataggtaggcggaaacctgatcattttgtaactttagtctttgtaatggccgtgttcaacatttcttttaatttttcagtgtctaggctttgtatataagattcctcttaactgcatttggttgggaggaatgaaaatatgaaaataggaatggaacggagtaaaatttaaaatgtataaaaaaaattgataaaagaatcattaatttttttttcttattacattggaataattttttctttcctttcaaaatgggatagtcattcatgagtattttattagaatgctattttaatgctttaaaatacaatcaaacaaaaattgtttttattttagctctaaccaaatgtaatgctaaaggtttttatggtgccaagcaagcgtttcacataccgttattgaagtattttattgtctcacaaactatgagaaattactaactaattaagagtctcaacgatagtgttagtcactttaatgcgtcaaatagcaatgaaaggggcattcaacttcaagcgaatttattgataatttacttattgtttggctacatgaactactagaccattatatattttgatcaatgagcatttacatgtaaaaaaaacaaataagtaggatttatccccttgaattatgattttagagttttgattcttgactttattttattgcaaaaactagtaaacaaagccgcgcttcgcgcggttttaaagcataatttcaatatatatatttaatatcatatttatttaattaattataatttt

SEQ ID NO: 164973 - DNA, 760 bp, Cannabis sativa
  modified_base (729)..(735): a, c, t, g, unknown or other
cacacactattcatttcaaacgttgcatacaggccgccgatctagtcatttttttccgttcactctggactttttcggggactttggaagcaaaatctgcagtgtgttcacaagaagtgagtgaggactgaggaggcagtgatcgttggttaaatagtttggtggaaggataatggttcaagcttctccattatgttgtgtaaacttcaattcctcttagtgagtgtcttttagagaaatttaagtctcttcctagttcaatttaaagatctcttatgtgacgtttggttggaggtaatgaaatggaataaaaaaaaaggaaacaatctttattctattcttttgtttgattgcatattaaagtgttggaatgtcattccaatggaatggcatttccaccattttagtagaatgactattccattttgaaatggaagaaaagatcattccaatgtatgatgagaaaaaatttaataattttttatcaatttttatttatgcattttaagttttatttcattccatttctatttttattttcattcttattccattcttatattttcattccttccaaccaaacgacaccttagttgcaataggatttcttagtttaattatgcatctcaaatagattaaaagattgacaatgatcattattcttaattatatcaaataattcattcacaaaaaaaatatcatttatttttagggaaaaaaacagaaaannnnnnnaaaggaaaaaaaattacaaaaatac

SEQ ID NO: 164974 - DNA, 855 bp, Cannabis sativa
  modified_base (820)..(822): a, c, t, g, unknown or other
tttttttttttttatgtatattaagaatataatctaacattaatggctatcttttttaactatagttttgtatcattttaacagataaaaaacaatatctatatatgaaaaaaaaaaaaaacaatatctataattaatgcgtatgaatctcaattcttaagggtcatatatcttaaaaatgtaaaatcacttcttttaaaaagacattaatatcattataagattagggatattggtgtaaaactacagttaatcatgaacattaaaattttgacagcaaaacctactgaatcccggccccattttattttgctctttacacttttgtttaaaaacttcaattaagtgccacagtgacctgctcacgtgtacacttgacaatttttttttgtagtccacgtaatattaattattaaaaataattttaaaaattaattatataaaaaatatattttacattattttattctattcttttttctttttttcttcttctgaggagtacctaaaaaacccctacatcgttgcctcccctatcccttttttccttcttcttctgtacttttcatctcgttatcatcatcaccaccacacaactactattaccaccaccaccacacaaccaccattaccaccatggccactgtttttctaaatcaaagaaaaataaaaaaattaaattaaaacaaacattaatggttgaagcaactaaaagtccacttgctcccttgctctgagtaaaagtcctcttctctgtatggctgcttctttgtatggtctggtgccagttgttggaaaaattttaccaggatctagattnnntaccaagtatgtttcattaacatcttaatatga

SEQ ID NO: 164975 - DNA, 837 bp, Cannabis sativa
  modified_base (773)..(775): a, c, t, g, unknown or other
gagagagagagagagattgaaaaaaaagataataacctataaattttaaaatacaaaaaaaacctacaaaaaaaaagataaatagaagagagatggatcaaatacaataaaaaataataaaaaaagtcacgaagaaaaaaaataaatagaggagataaaatatgaaataagatgaaaaacacaataaaaaagtatatgagatggtttctcagcttttaatcatcaattttaattaataaaaaaattatcacaaaagtgacatgaataatcacatgaacacttttacaaagtttaaaaaaaaaataaaaaaaaaataggttataataaatcttggctgacacatatcaattagatgacacaatttttttttttataacaaactcaattgataatatatattaaggcagtaaaaacttaataataagtacataacagtaaaagtataataaaaaaggaaaatacaatactctctatatccctttttattatgtaatacaatggtcacccttattatatatataaataaaattatggaccacttttctccaaacaaaattcaaagtaaataattaaaagagaagtttgcatgtgttttttttttttcgtttattattattttttcattttttaataattttatttatgttataaatttagacagatataagtaataatacttgtattcttttctgctcttcactttgctctcaattctttataaaacttacccatatatataagagaatacatgcatgtatatgtatataatcatnnnactttactgctacaagttgaatactattcctatattattgtagttttatcatgtagagtata

SEQ ID NO: 164976 - DNA, 863 bp, Cannabis sativa
atttaatccatataggacaatgttctccaatatcactttagctattataattttttgttgatatttttggttaggctttaattgattataaagacttcactatattaagtttgattttcaatagtaactattccaagctacttgtttcttttctaaatatcaaaacaaaacaaaaattttatttcgataattttagtaaaaaattgaccctacatttttctttctagtgttctatatatagggtttacatggtagagtctcctttctattccggtgtcaatcttgttcttttttggagggatggtatacaatgggtacaatgaacaataatgtccttgagacattttattactcgatggctcagcttgatgagttgaatgaattctatgatgtgatcgactagataggcgcttcttgatgaaggggcgatagttgtggctaagacgattaatgtgggacgtgttatctctcaacatgttccatggattgagatgatttgaattatgccataaataatttttggaaaatctagggatagaatacgtttgtttttttgcttcgataaggtggcccttgggattttgagcattgtctccttgcattgaaagagccgagggatgggtaaaatagtaatttgactaatattaattacgaactaacatatggaagactaatcactggaattgattatatcagtggacagtgcagtaaaactaagtaaatataattctataattactaagagtttaattccatatttttagtggagtaatcatgaaattaataaacaaatattatttgtagtggatagacaatgaactttcttggatgaaagaaacccccaccttttgtgtaacttttgt

SEQ ID NO: 164977 - DNA, 1256 bp, Cannabis sativa
ctcattttcattgtagtggggagtttgagaaaaaacaatctgaattatatataaggcaaaagttagactgaaagaatgtctaactaaactatttatgtttataaaaaaaattaaactatttatacccttcggaccaacacaactacggagtaggacaattgactatattaactgtgaactaatagagagagaagagtggcacaagtgagatcattttataacatttactaattgattttagggaaatttgcagcaaaagtccttaaaaagttcactatgatagagattaatcctcaacctcgaaaaataacagtaataattctcaaggtcacattttttgtaggtccgttaaattattgataattgtcacgtgttgagctattattgatccaaataataattttaattaaaaataattaaaaaatattttaaaatataattttttttcttttcttttttttctccttcgtcttctacctccagcaatccacccccactacccctatatcatttttcccccaagcacaccaccccaacttcgtcttcttcttccagccacaccctgacccggacccacccctatctcttgccacactccgatccccgagctaaccagagttccaccgcacatggtggccgtctaccgtcgaagggaaagcttgcaaaaactatcaaagagatctaaaagatccttacgaatagaatacgttttcgaaagtcgttttactcaatggatctcgaatacaactagatccactactacaaaaatagtcttttgcttcagattttaagtgacatataaagaatttgtgtctgtttgtgtaaccaatgctataaccgtagacgcaaatagtcttattttttgcttcacttagtaacagacgctaaattttttttgctttagtttagaaccgaagaaaatagtaaagcactgacgcaaattagttttttgcttaaaaaaaactaaaaaaaacataaactttcagactactacaactcttcagactgccacaacaatccaacaataataaataccgccacaacagcaacccatcgtaccacaccaaaagcacgtcgaaccaccaccatcacactgtaccaccaccactacctacaaaaaaaaaatctgagagagagagatctagaacgagaaagagagaaatcggagttggagctaggcgcgcaagacggggaacaagaaaaaaattatgaatctcacctttgaaaactccattttcgagagagagagagagaga

SEQ ID NO: 164978 - DNA, 2190 bp, Cannabis sativa
cttcccacaagctatggctgaccactaccactgtccgactccaactggtggcagtggtctcccgttaaggtttcagacattgaatagaggtttttgggtcctgagacctccaaaatatgactcaccatcaaaaaacaagtcaaaacacaccccgaggggtccaagaacatgcatagataagcactgccatttggccatgttagtgctcgcaattggtacaagtcagcataaattgcctttagtaaaatggacataactgtctcaatttttatccaattgactcggttaaacttgcattggacgataatttcaagaaaaatcaaagtgtgtatcataaccatggatcaattatgaggttatcgggtccaaaatttggtcacaaggcagacttgtatattttactcgagaattgagtaacgtggttaagtgagggttgttggaggacactcgcatagcccacgtggcattgtatgcaagcattgacactccaaaacatatgttttcagtactcatcaccaatatcatgcatttctaggcaagaggtgacatcccatcactccatttcaaattggtgcatcctcaaccaaaaataataacttttccaatgtttgtgggattttttcctagaaacaaggatatttttatagctatatattttcatgtaatattttattcattaaaaagagtggtgtacgagattttttagtgagataccccggcatgtgggggatcactaacaaacccatagcctatataggaaaatgaagaggctgaagtaggaaaatgaagacatctcgaatgacttacattagagactttgataagtgggtcgtgtgctaaaattgagtacctaataagttaagatccatgtcgacaacttgctcaagctagcaaaaatactagccaccattggcaacaaaattaatgttatctttaaaactccgcattacaaagataataattattagaaaaaataagccaaaaaaatatattcaacttcaaattccaaagtcaccaagatatgaaatggactaagttatatatgcttaacaaattccaaagatgtgaaaaagactcgttagttttaactagtgagcactccacacctagtggacaatgagtatgggtgggcccaaatgtcaatacataaccaaaatgaatgtatgtggaaaaaagagacataaacactaatatattttcacacaaatagcaaagtgcataaagttagtccatagagagcactgtcacaaggcagctctcgcatgaaatactgtaggactaataaagaagactaaaaagacaagtcaatcatggaaggccacacaagggaatggcaatgctcgtcaaaattgaagaacactaccaacatggaaacacctatatgtaactccaatcctcaagactctggggctggtcaaaattggagaacactaccaataaaattaagtataaaattacccctaattagaggtcattcttaccattttttattaattaaggttatgtgtgtgataatattatgttatgctcgattttcaaaaaataaaaaaaagtcaaccttgcgactttgaccaaggcttataaatgtcaaataaatcaagacatccttcttgagagccccatggaacttctagaggactcaataacatcaaccaaccatttggtgcagggactcacacatttgagtgtgcccaaactagggttcatgtgcccatgcgagcgttttcaccctagaaaccttaatttgtgaaggaaactaacaaggacatgacttatttgggcatgaaaatgaataggtttgtgcataaagttaatatgccattaaatcctcaagaaaagagacatatgtgcccactgcaatatggaaatggcagtgcccatcaattttggtgggtattgccacaagggaatgatagtagtctctccttacaaaccataaaggaaaaattattcaaataggttccctaaacacgaaggagtgaaaaacaaatgagaaaaaccatttcccacttaggaattaccctagccgaccactgccataatttgatgggcactgctacaagaagatggcagtggtcggccatgaagaggggaaatgatatatttttttccaacaatgcattttcatcaatatatgtcaaaactaagtgaaagaagccaccaagtagtatagaaactacttggctgacc

SEQ ID NO: 164979 - DNA, 898 bp, Cannabis sativa
aaataaataaataaataaaccaaatttaattgctaacttagattacttatttatacatttttacacacgtgatatatttatattgatacatataatattattattatttaaaaattataatatgtatattttattttttaaatattttatttgaataattttatttaattttaaaataataatattaggtttacgaatataaacttgttatgtgtaaaaaaaatgtacatataaagtccatgatgacagttaaccggatgacactttaaatttgtcaatagtttagtagtttgaaagattttactgtcaaaagttaaacttaaaaaattaagtacaagttatcgacagaaccactcttagcattagggggctataaccctcccaacaattttttttacatacattttcatatgtataatatattttcacatataaagataattatctatagtaattaataatttgcatctacaaaattaattttcttaacaattttcacctcacacaacttataaatccttctttccgtgttgggtgcaagtgagagtttagttgtaaaaaattcatattgttattagttttgataagaaaataaattataattttatatattttttcataggggtataatataatctaatcatttaattgcatatgcttttgtaatttgatattcatactcctatattttatattcttaaaaatttgagaggtctaattacattaaatattatcatgtaaaaaaaaaagaagaaattacaacttaaatataagctgaaaatatagaaaatgtctataggtataaatatagatgatgtttggtaagactttttcaaccagttttctatttttaaaattaaaaaagtaaaaatatattttaaaaacatgttctataaaa

SEQ ID NO: 164980 - DNA, 968 bp, Cannabis sativa
tgtactaattttgcctttgttactttaaaataatctttatgtgattcccttatgttaacgtattttgggtacaatacatataaaaagagatatgtttcaattaaatataaattagagataaatttagttaattgataaataaaagaagtatttttcaatttacttctttatttttacacttttacaaaaatactagattttggacaaaagtctacaattttactgccataaaactttttataaaaatactgtctttttataaaataactctaaaacaacaaaatagaacaattaaaaataatagtagaacaactaaaaaataactgtggaacaacagtgaaaacttaacacaatacacattctaaaacttacacaatatttttgaaaaaaaattccaccttacaataaaaaagaaaaaaaaattaaaatttcgatatgtagtgtaaaaaccacttttatttttagttttggacttcattctttttaaagagggttagttaatattttgtaaaattagagcatagttaggaggcatgaaggtgtctaaaactattatgatgcggcgttttaaaaattgctaatgttttatattaaattatataaaacgtgatacttaattgtaccaaaaacgatataatatgttggaagatattaaacaccactaatatcttttaccatttctcttttaaaaattcacttaataaatataacaataagtaaatttatataaacatactaattagtgaaagtctatttagtttattatatttcaaaactcatagtacagtatattatagtgtgtattacctcttcagctagtgctgtaaatacatatcgtgtattttgacatgatacgaaatcggtacgagcacgactaaacacgaaaaaaatataaatttgggcacaatacgatacgatgctacaaattggtacgacacaacataaaaaaatatgtatttgttgagaat

SEQ ID NO: 164981 - DNA, 1596 bp, Cannabis sativa
  modified_base (1134)..(1145): a, c, t, g, unknown or other
ggggggaggggggagtgacttagggttggggttccaggaagaatgaagaagaaaaaaaaagggaaaagaaaaaaaaattatttgtttttttttttctatttttttttaaatttttttaaattttttaaattatttttttaatatttgaattattaatattatgtgaaccaataaattttttccacatgtatacttatgtacaccgtgtcagtccaccttggcatataacagaccaaattggacagaataattgagaccaaaatagaattcaagtttggagagttttacccccaaaaatttagtaatgggagttgatcatgccaaacgtcgaagttcaggaagtttagccgataattacccttattattttattaatttaactaactctatattatttattgtaatcaactaaagaattatttttttatacatttatttaatttatttatatataaatatattgaagatttaaagataagattcccaaatggtacctgaatttagatgatggtcttcaattaacgtcttcgagtttacgacctagttggtttggctttaaaatctatttttgggcttttaaagctctaaaagtaattatgcagttggttgagagcaaccaatgaatttcaccttttagctccaagaaactcttttaacagaattcctttttagtagcattcttaggaagctaaaagtaaattatagagactcagtcaaataaggcctacatatcttaaatatataaggaaattaatctgttcttgtcgatcgatcgatagataattaatcaatcaaaagctttgctactagttcgcatatttatccttagtggtacatatggggtggaccaacagagaggcaatggagggcagtgtcccactaaaatagatgaggaataatatatattaattagttgcaatgtatatctgtaattaagggcttgattggtacgtcgtattacatcgtattatattgtattgtgctgtattaaattgagttatgttgtaagagaaaattagaaaacaccaaaaattgcaagtatttgttggaatatgttttaccaggatctagatttactaacaaacatgtttttaacaacctaaatataaatttctaaaacgatgaaaataaacnnnnnnnnnnnntgagaaaccttacattggttgcaacaaaattaaatgactccttccacacagatctctaacccttgtatcctttctgtcgcagagtatcacaaagatctgagcccgattctccttcagttgtttggattcttcacagccttacatactatgattgaggactcatttgttatgtgtggacatatactaaatcactaatgctgaattttgttttgtgaagaacactaaggattcaaaaataagagaagaaaagaagaggaagaagtctcaaaaacctagagagaaagaaagataggtttattgcctttgaagcattagttggataatgagactttttttttttccttttatattacttttcttagggttagggttaatttatttggaataaaaaaatgattcaaatggagcaaaaatagggacctagtgtgggcctaacactagttagattttt

SEQ ID NO: 164982 - DNA, 685 bp, Cannabis sativa
cgacttcctgaccagacggcaaaagcaccgtgtgacgatttttgtttttaggtcgattatggatgttacgattttttgggtcgcacggtgtctctgccttactctaggacaccggcagcaaaagattttagtcccaacctccaaacctaaggtcgatttcttttctcattcatttctcagtctctctttctctctctccctctctaatatgtgcatgatctcgatgttcgtcgttcgagttcgtggttgatggaatttgatactcgttgtggaccatgatttttatggtgtttgggtttgtggttgacaacgttttgagttgggaatcatggccgacgatgatcttggtgcaagaatgtgtgtatcttggcattctcttggaattgaatttttttagaatattttttgttacaataatttggggtctgtattcaagttcttggtgtgtatttttattcttgctatttgggtttagaatttaagttcataatacccattgttgatgactaattttagtatttttattttaaatattgtattgtatttcatgcaagtataagtatgaatataacatttaagctatatagtattatttgagattttttttttttttgaatgatgcattttttttagacttaatttagaaaaatagtattattaaaatatagtatttaaaaaataatat

SEQ ID NO: 164983 - DNA, 818 bp, Cannabis sativa
aattattaatttcctaatttccattttaggtagtttgcccttttagcttgatacgatcttttgtcgagatctgaggagcctttacttcattattttgggtgcttaaataaaaagggaaactagactgatcttccaggaacacactatctgaccttctagcatcaaggtactgaagctcctttcggatacggaccaccagtggagaaagaccattttgccatagagctaaggtgcgaagctactctggcttggcccaaattgtgttctttgggacccactggtaggcctttggtgctgacttagattccatgtgtcccttgcctgaaataggataatagatagaaagaggagaacattagcactttctcaagcaacttatatagataaggtactagaaagattctcaatggggaactctaagaaagggcagttactgtcaagacatggaacttctcaatgcaatgatcaatgtccaaagactccccaagaaatggaggacatgagaaagtatcattatgcatcaacagttgggagcttaatatgtataatattctgtacaagccctggcatatgctatgttgtagggattgttagaggttacaatcgaatctttgtttgggacactagatagttgtgaagcacattatcaagtctctttagagaacgagagatctcatgcttgtatatattggaggagagttaaatccaattagatatactgattatgatttttaatcagacaaagatagtcgaaagtagacatcaggatcagtattcactctttgtggtggaggtgtagtctggagaagcattaagca

SEQ ID NO: 164984 - DNA, 616 bp, Cannabis sativa
atcacactccacaagaggcttctatatttgatatgattgtcttcatcaaaatcacagcacgccaccccaatttgaagccaccctcttgcgtaatactgcatattacaattgcaattatacatttttatcataacataatcttaaaataaaacataggaaatattctttcaaatttaatacgacaccaattttgattgcatactaattaatgtagtgtaagaaataacgtagagacaaactactcttaccaacaattattgcagatacacgctcagttcatgatcatatcccttaatcttgttctagagatataaacaaaccacgccagtcgtgtccttgggatcaacatctcaccaagagagactccaataacaagcccgctcacaagtcccgccaaaatgaatttccaatccagttcaatcccagaatcagaatcttcatttttattgaaagaggatggtgggagtagtgaggctacgcatttcttcgatagcggttctccgcacaatccttgattaccttcaaaagagttgttttcaaacgtatggaattggttctcttgagctataagacttgtgagattgttataagagacatcaaacttctggaggaattt

SEQ ID NO: 164985 - DNA, 1389 bp, Cannabis sativa
acagaacacaaagaactatcaagaaagcaaaacagatgaaaaaataaaaaagaaaaatgccaattaggaatagaacgcaagagacaagcttgcacaccatcttacaatccgacaccaaggtacataggtcaagattcagctgagctaccacttccaaaccagcaagaatggcaaggacttcaccttttaaagctgagtcaaccttagctttgtcaataaaaaaaagcaattgatctcccagtgaagttcttgaccaccaccccagaaacagccactccgtctttataagccgtatcgacatgaatcacaaaatcatccgagatcacagagttctcactcaatctgtcatcctcctcctgaggagggacccccatttcaaaagaagccttatcttcatataacccctaaatctccacaaaagtaccattgatcttagagagtatccgatcgacatgaattttagacttattatgaaaagagtcattgcgatgaccccaaagatggaacagaaccaacgccccaaagattaaaaattctaactccaagtcatcagcaggataccaggattgaacaaccattccacaaaatacttaccatatttggagcttgatgaagctcgatgaatttcgatagggctacaaaggggcacgagccacaaaccactatcgagaggagcattgaatagaaccaaaaaagactcccaatgtacatagagatgctatcgaactataaaattcccctaaacatgaaagcattgggttgttatcaaagagcctcaaacacaactaaaagcctcggacatgaagaatcagaccctcattaagtcaccatcgtggggcattgaacgcaattgaaaaagacctctaaacattaacccacaatcaaggagcacccactactacaaatatcagaattcgcgacggtcctaaaaatgatttttttcggtgaccgttgctaaaaaaattaagtaactatttaaaactgttgggaaaaatttagtcttttcgacggtttaaaattgtagtaaacaaaataaacaatgtttttttaataaaatacaaatttttaggagagtcttatacctcacggtttagaatcgtcgagtatagtaccgtcgggtataagggcccattaaaaaattgttacctaatttcttgccgcatttcccacgtgcctacctactttttctatatcccacatgctcacttattttttttccatttcccacaccctaaaacgaaaatcttaactctctaaaaccttacccccgcctctgcaccatcgttctcctctctcgccgtcttcctccctctctcgatctccctttcttcttgtctctctcgtccatcgatctccacccatccgtcctcccgtcggtctccctctcct

SEQ ID NO: 164986 - DNA, 1515 bp, Cannabis sativa
  modified_base (917)..(923): a, c, t, g, unknown or other
aggtagttagggtgttacataatgcatttgacatatacatgtttttttatgctatgaaaaatattcttatctcatggtcttctcctataaatgacattcctgaagcaagctcacattctcaactgaaagcctaaggttggtattgcgacaacttctccagtgattctgcagaagagaaaaaatgacactgcccctacgcaagtggctgactcgtccaagaagcagcacaaatctgcttaagataaggggaagaaggtcgtgattgatcttgttgttagggcccacgacttcatagctcttcaggacaaatttgtgagcgatgagtttgtttctaaggtcaagggggttcctgccaaggacttgatgccacgttatgcagaattggcttcacaatttatgaccatgctctcgcgggcttttgtcgtaggttctaagtagcttgacctcctgaggaaacagaacatgcttcttcaggacggtataagaaaactgaagttggacgtgacctcgaaggacaaatacatcgaggatcttaggaaagccaacgagtaagcgaaggaaaaggtcaaacttttggaattgcgatttggcgaactcgttcacgaccttgaaaatcaaaaggagatcaggaagaaacaacatgatcaagccgtttctgattatatttatacgactttgtccaagcttcctgactttgacttcgcaattcttagagtgtaggcaattgaattagccaatatgcttttcgtgctatgtcgcctactgagacccaatgacttgggggaaatattttccctgaggacacttagaatgccaatgcagaggaagtcgcaaaatggtgctgcaagcaaggtggctgttgtgaaaattatatcaatttataattgcacaagtgtacacaatcacaaacaagtaannnnnnnataagtaatcaaagttcgtatccacagggacttttacactaaataatgcaaaatcaactaaaagcaattcaaaagttacaagtaaaaagaaagcaaaataactaatcaattcaagagaaaaaattcttaaccttaattctagagtagagaaataatattttaagctaaataaactaaaattaagaagctaagagtgattaaagttgtgataatttcagatttagaaaatagacttgggtggttaaatttcccctggtatgctccagttgatacagcaatgacttagcaatcctatcagagttaacagatttcaacaaaaaattagcaagctttttccaaaacttgcaatataccattcataacctcaacaaagcattcctacactaaatcaggccacaaaaaatccaatgtagcatcaaatctttagttatgcacggtagcaaaatatgcatattctacttttaattaatacctataagagatgtgaaaatcatgcatcaattagaagggttcaactaggtcttacttttccaagtaagatctagcttgctaaatgttaaaaatggccaaaaattaacattcattcaacatt

SEQ ID NO: 164987 - DNA, 1766 bp, Cannabis sativa
tcttcttgcactttctctcactacctttctattgcattcaaggtctgagttacaaaaaagattttccaactccctctcacatctgagatgggggtattactaggctctaatggtctagagtacaaagtggtccgaaggggacaaaatgtcgctttcgtgctacaagtcacaggtgctggagcacccttgtctggtgtcagggggtcaccggttgcaggcatgtggtccccgggtacaggttgcaggcgtgtggtccttggctacatgttgcgatggttgcagtgtacccttggtggggtcctcatacctcgcaagtctgttatcaccgcttctcgtacctccttgcttttagagtctttagaaggcgtggttgcatgctttttctttgcatgccttgtcctttgattcttcctccaatgtcattctcgtcgatatgcgttcacctctgccttacataatttataactctcaaaacacgacacaacacacacacgcacacatggctcgctgcgagccccctatgggctcgcatacgagccccctacttgcaccaacacatacacacacacgacacaacatcctcacatacgcacgactttcatgcaagccccctactcacaccagcacacacacgtggcacaatactcacacacacatgcacgacccgcatgcgagccccctacttgcaccaacacgccctcgcacacacatgcatgcaacactcattcatacatgcgcaacctctccttcttacgcacgtgctctcgtcgtttgatcaccactggatcaatcatcgaatcgcacgagtgcatcccgagaattacgagtatcgatggcaacgttgcaaaatacattttgagtaggcatgctcattgaatgcacttttgttaattgctctgagattagttaactaaactcaaaagttagcaacgctaatttttggggttaacacttaccctcagtctacaagaattctttcaagtgttcttgtcaactgagtgagttggggaatttgccctgtcgaagcgtgaggccctcttagttttctttaaggaggtgcctgccttgcattggaggcttcccttgcttgaaccttacttcatgccaatatgttggtgtggtggtggattctcttcaccttgtctaatcctcttttctttttttaggaagtgacttcagcctccctgtagctaagcgacattttcacttgacattggctgaacgactctgagggtagctctttggccaagcaaaaatttatgtttattaatttaactaaccctatatttatttatttctagtgtgctgtatgtttagaaaatatataaaatttatatatataaatagggaactcctttggtgagagcaacacttttgctctcatgaatgaggacattttaatagcattttcttttaaatttattcatttatcgtaggggtgttgtattagatttttctcaattatgtatttcaatactaaagccacatgtataaatgttatacatataaggtccgttcagtacatcgtattttattgtattgaattgtattgtattttaatagattgtattgtattgtactagtattatttaatacaatattatatttggtattgatttgtattaattgatggattaaactcctattgtgggtacatatgtataatgtatatgctataataaagtgaaatacaaaattaagtgaccaattatgttatgagtatcaaaagggtattaaattatcatgaaaataatgtgtagatacta

SEQ ID NO: 164988 - DNA, 935 bp, Cannabis sativa
ctacttaaaattcaacagaaattccccgactacattaagaaagttcgaggaagaggcttgttcagtgccatggagcttaacagtaagaacttgcaccctgtttcggcttatgatatctgtcttaagttgaaggaaagaggagttcttgcaaagcctacacatgacactattatcagattaactccaccattgacaataaggtaagtaaccatgctaatgaatttcccattgacatcatgatgaaatacaacacatgcatattatctttatctttttatcaattgacattgacattgacattttaagttaaaatttcgtggcaatccttaacgctactcttgaccataatcttaagggttcttccttgcctttatggattttcatttgaggtcatgtgtcttaaacttacctccttccaaatttattagggagcctcgcttatggcaaaggaataccgtggttacaagctaactgtagttgtcgaacaatacacctataaagagagatagtttacaagcatgaattaaaattacagctggctaaggttaacttagagtaagatgagatctttgataggaatttcctatcaattggctatgaacagcaagaacagtaagagaaataggaaaaccgaatagtagtttgtattcgagagccaggttctctcctatttgggttacaaccctaaccaatttcttcacacccttacaaatgaaatcccttcctctatttattctcttagcctaggccccagccacactctaatcgagcccccctctaactattctctgctccatagctataaatacgtgcgtgtcgtgctaatctggcccatattttcgtgctttttaaaatatgggtcatgccatgccggaccataaaaaaatataaaatatgggtcgtgtcgtgccgtgccataaaaagagatgggtcat

SEQ ID NO: 164989 - DNA, 3692 bp, Cannabis sativa
  modified_base (2468)..(2472): a, c, t, g, unknown or other
gtaaaataatttccaacaacctgtacagtcaagggcaaaggaaaagtggcagaaccatcatgaagagtcgttccaaagcctcactagaaatatgcgccaccagtcggatagccctcgagtacacaaaaggtcatcggtgccttcgagcctagacacctttctaaccttcaaaatagtgctacaccaaaaagaccaacgttagaggtgcccacacctaagagatgggtggaccccccaagtgatttcgttaatcagaatggaaggattgcagtcagtctttttgagtatagttggtctacgatggacttacgatggcggctagatgttaagtacaaaagatacaagagcaaaaaggtgaggccacgtgggtcttacctacaaaatcatttgcgtgataagctaaggaggcgtgacgtttcgagtagtgatgccaaaagactagaagagaaaatcgtttccctgatgaaattaggaaaaaagcaaagttgagcattatttaattctaaagatgaggaccctgatccttgtgttaagaggatcacagaaacccctcttcccaaaaacttcataatgtcgcttatcgaattgcatgagggaagaaccaatccccgaatacacttagccaaatacaataagaagattcaagtcccttgcgtctgtgatgacgctaagtgtgaatgtttttccccgagtttaaccaagtcagttgaacgctggtggaagcagctggctctgagatcaattgagtgttagaaagatttagagtatgcgttttgcaagaaatttattaccacgcccaagaaagacatagaagtagactccttaactaatgtcaagcagcaacccaatgagagtttaaaagcttttacacaaagaatgatggaggaaacaactcagatcaaggtcaccgacgaattcaagataatggccctcaagtcaagattggttgtaggttccttgttgtggggagagatgcaaaggaaatgggatgaaaccttaagcaagttcatgtcgtaggctaaacgaataattaatctggaagacgcttattgtaataccctaagattaaggaaatggattaggaaaccctaactagtaaattgtgtattattgtgtaattatattattatataatttattataagtaaaataatttgatagatgacatgttaagaccccgttggtgagccagggcattttagtaattttgaatcgagaagggtaaaactgagaaatttatattatgatgtgcttatgaactatattattatatagtatgcctgtttgtacttttttaggtgtgttctaacaagttggtgcagtatagtcacaaccgagtattttgggatttgtttcctggcattttattaatagtgtgaataatctgaatttatttgagtatgatgaggtgttaaatgacaaaattatccttgaatgcttatattgtgttataaggtcctatgggcattgtggtaatttggccttttggattatttgcgacaaaatagaactatttttaaaaataaagaaaagttagcttttgttcttagccctatgaacccaccccctccctctctcaaaattcatttttgtagatcttgaattttattagaaattgcttggattcaagcttggatttttaagggttttggtccttagctttgtgattgaacttgaggtagatcttcttacttacttttttctgaaattgttgctgagattttatggttgaaagcatgaaaataggttgtgttgttcttttatgcatgtggacagatttgatgttattcttgatgtgtttggcttgattttgtggcttagtggtggagtatatttttgatgagttatagataagattttagggtgtttttcatgtgtgaattcaaggtttacacttatattttgctgctgagttttaggttaaaagcatgctagaagttcaagttcttgagtataaatttttgatgagttatgctcaagtattgagctttattttggaatgttgattgaatctgaaattaaagtgtttgtatactaaattttaagccttagtgtatgtttcaaccctctgtataattatggataaatttatttatggtttgagagtttgatttggtttaggcttgaaatggtgtgttttggccatgtttttcgttgctagttttggattttttctgggtttggaacccaagggttccggcccagctccttgggcgccgcagcctgcctcatgttggtggcctagggttcgatcccaagtattgcggccctatatggggagtgttgcggcccgccattcggttttgggcagattcgaacgcgttatttgaatcctcataactttgtgatccgaactccattttgggagttctatatattgttggaaagctcgttccgagctttatgtgaaagttgaattagagattaaccctatatttgtaaatcctggaatttgtgactaggattannnnnacttggtcaggagcacccagggatttggaatttccaaagttgcgggacatcaggtaggactgtagttgcatgtagagttatatgcggtggtgcttgtgctgaaaaatgttatatgtgagtaattggaaactgggattagggttattaccctaacatgagtggtttaatggcctagggttattaccctatagaattattgatgtgtaaacactatgccatgtttaatatatgtgtatatttagattaagggttatgcgttcaaggcataagcaggttggacttagtaacccaaactgagattaaccgttctaaggtcttattgtatatagacgtgtgatagtaacacgtaggtctacgcctgatagacataaataggcatgtgagtgtaacacgcaggtctgtgtcatatagacaaatctaaaaatggcattaatacctatgtgatatgttaagtatgaatattgatattttatactgtcttgctaggcttgactcacgggtgctctactgtgcaggaaagggtaaattggtctctaatcagccatgagtgcgagagttgggcgatgtatgtacatgtttaggccacactagacaaagtgggttgggctctaccagtgatgagcttttgtaactctattttgctacttaggtcagccattgggaaagacttgttatattttgtttaatatttttcgggataccgaaacatgtaactttttttggaagttaaagttattacaagttttattttcattctgatttcatttacagtttaaatttcccacacttattttacttagtaatcccatttaggggattagggttcctttatcactttgggtaacgtgcctaaattttagggcgttacagttaggtatcaaatcacccaggtttttaagcttcttgtagacctgccaaaaatgtacaataattgtcaaagacgatctcgactcatggtgcagtgagtcttgagagtaaatgctttactacttatgtgatcgtttatttaccgctttcaattttaggtagtatgcgagcatttagagtatttacgtgatatatgatgtcatgcttaaaatgctatttgataaatgtttattttaatgaaataaatacttgagttaggagtaaggcaataagtacataagtgttttattggtgcttatgtaaagaccgcttagtttaatttggaaattagtagttaatcatgtttaattatg

SEQ ID NO: 164990 - DNA, 3858 bp, Cannabis sativa
  modified_base (3035)..(3041): a, c, t, g, unknown or other
actactccatttcccccacgcctaagagcacaaaagcctcaaatatctctctcgttcttcttctttgtactgtgttgggaatgagttgttcttccatcgacaacgagatctgactagatttggccaaagcatacgccgacaaccgtgccaagggctggatgttcttcctccagtaacgagattgagatgttcctatcccctcatgatctttggcccttgtatgtacccacgtcatcgaagcctcacccttgatggctctggtttgggcgtttttaagcccaacgagacaaaacctacagattttttattttggatcaatcaatgggagagaagagatgatgatgagcactgagattgcaaaaaaaaaaattaaataataaatagcaggccagatgtgtggatcgaacgggcagtgagcttgttcgtggacctctgatttcaatagccatggtttgtattctccataagaagaaaaagaagacgagagacatgaacaataaaaataaaataaataaaaagaatcccagcaaaaaaaaaaaaaaaaagaaataaaaaggatattaaagttttatttatttattttaataatttttattattttattttatttttttaattatttttaattaaatttatgatgtgaaccaataaatttttgacatgtgcccttcttgttagcacttaacagagctattaaattgtggtaccgataaacttacaaaaaaatgtgactttgggaactattatcgctatttctgaaagatggaaactaatatatatcaaagcaatatttttggagacttttgccgtaaatttattattattttaacaagaaaaaacttatcttaaaggccttttttttgactaagattgtcaccattgtgtcgaaattatgttatgtccaattattagagctaagacttccaaggcataaatatactagtcaatataacctctactttgagagattaatgaaaataaatcaaattctaactaaaattaattattttgtaaaaaaaaaaagataacaaaacttaattagcttacaaataatgataataaaacaatcaaataaaataatagaaagaaaatttctccaaatttattaaaacaaaattaaaaaacaagattcaaactaatatgtaaaaatatgtaataacactctttaaggttgtatatataaacaaacgaaccaacaacataccacaaactaactaaataatatagtacaagataaccaaaataaaatgacacaaactagccaacaaaactcaaaagaaaaaaaaaacaaagcaaaacaaaaaaaaacaaatatagaacataaataatccaaaaggaatactcaagatattaatataccatatacgtgaaaaatgaaagcaattatacaaaattaagtttattcaaagagagaaaaataagaaaattaaaataataaaaacactttaaaataaaaattcttccaattaatagatttagaaattaaattaaaagttactaagagatccaaaagaaaaccagacaaccaatataagttaattcaaataaaatctaaataatttagtataaaaaagttaataaatattaaaaattagcaacgagaaaaatgttatgttaaccaataaaatagtaattaagaaaataaaaatgacataatatactataaatcccgaaaattagcaaggtcaagtcccaagattagctggcgcttaaccaaaagatcaatggacacacacccaaaagatcgctccgaatgtatgattatgcatgtcctgcgagccacttagcataaaggccactcgaccaccatgcatggaagccactcggccactattcttggtaggctgcttgaccaccatgcatgaaaatcactcggctaacatgcttggcaagtcactcggccaccacacatggaagccacttgaccaccatgcttggtgtaaaggccaaaattaggctaaggcccaatctcttatgtgatgttttcaaagaatgctcaaataagatcatgttggactatttgactaattatgatggtacgatcaaaacaccaagctcaacaggccaaaaacgatactcaagtcatacattaacattacccatgacccaacattgagctcacaatgatctgacctgtatatgaaactgagtcttatcactcatctaacaatttctaaagtgggcaattaaactgaccacgtaaataacgatccacctcataaagtgggagaggagagcttccaaaaggggtgagcggtcataagtaacgtccttccatagatgcctataagagccactctcagccactgaaagagacagatcaaaatcaatcatcgcaatacttctgatttatcgtgaaatctctcattctctctaaaactacatacttatttctgcagataagataggtggtaacttagttcactcatttatttttgtcttttttactatattgttgtcaatcttgctgacttgactgtcgaagtccctttaatcggcaccatctcgatgtcccaaggtttcccagttactctcttctttgttctataggttgtcaatgcccgcgtacaatcatcttggattgattgtggattttaacatttacaatttagcgcccaccgtggggtcctgacaaactgaaaccgagcaaagtgctttgacctttatcgttcagtcaatccacacaagagcaatagcatatcacatggaggaatgagatattaatgaggaacaaaccaacttccatgaccaactcgccactttcatgactcaaatgaaagaaaattttgaacccatccaaatcaatgatctgtgtcataaacctagtaacatgatatgacccatccaaattaatgtttatatgagcctatatgcttgcttttaagcttagatacatacaggagcctatttaactttggatatttaaatgaactaggtttctaaaaataaaatgaccaccatgatagttttatttagactcaatttgtattgggcttattcaattaatgaaaattatttatttaaaggttaaattnnnnnnntttgggccttgtgtgagagttagtgggccatagtagtgggtatgacatactgaacccaattctccctcacatgaactatctcaactgtgaagactcatttatcttatttaaataattatattaggctaattatattagtttaacctaattaaaaattatttagcaacataattaattttaaaatatataaaattaatttttcattacattattttaaaattaatttagaaaaaaacacactcaatttaattaaataaattctagataattattttctagtaaactaatttatattattctaatatttaattaaatataaaaattaattatgaacttgaattatattcaagatacttaattaattaattaattttcatttaattaaatagaaaatcatatttaagttgaaaatttattaattttagaacaacttcaattagaatattttcaaattatattttattttaataattatttattttaatttttcgatttttttaaatgttaaatttaaaaattaaattaaacttaaaatttaatttcttaattaattttagatcaacttaaactaagtaattttcattaatatttaatttaaataaattgattaaaatatattataattagaaaactaacacttagtttataaaataaattctagataattatttttttctaataagtaataaactattattttgtattttttctatgtctatttaattaagtagaaaattaaaatttaagttgatttagttcaagatactaaaatattagataatttttggtgaaatttaattaaatggaaaattatttt

SEQ ID NO: 164991 - DNA, 1949 bp, Cannabis sativa
taagaggtcgacggtagcactcctctatttataattaagggtacaatcactaaaagctttatttaatttagtcataatgataattatatgctatatctaattttattattttattttataaaaaaatggtatgtgtattaaataattacagaataattttttgtatgatatgtttattattttgtaattaaatagttgtcttgtgattgaatagttgtgcgcaaatattatatatctaggtactaacaaattaaaatcatgggtatctttgttatattgatttaaaatgtagttcattgtgatagacaaggtgatgccatgtgtgataaggactctacctagtaggtaatcttttttgagttcttttgtctttctaataaagaaagccagccttttactctacaaataactaggcagtaataccgcatgacactaaaattttatgaagtaaataattgatatatcgatattatatttaagaaaaccgtgaaagcacttcaaacaaagtttcgcatcactcacactcgaattcttgcttttctgactttagtgatgtttagtaatattttcgtttttaaattttttaatcataaaaattaaaataaaattttttcgtttttaaaattttaatttaaaaaattataaaagtattttgtaattattttaatttttttaattttaaaaacaaaaataaaaatgtgttctataaattttattttatttttatttgttgattttatttaagttttgtccgagatcaagactgggggagtccaagtctgcggccaggttcgagcttgattttcaaggtctaagttggagtcggaatttaagatattaattaaaaaaaaaatacatttttttaaaaaaattgaaagtaatttttttttatttataaaatttagattcttaattaagaaattaaaaagtgaaaacagttttatagaacatgatttttttaaaaaaaatatttttatttttctaattttaaaaataaaaaactgattaaaaaaatattaccaaacgcaccctaaaatatatatagattaattgatttgtacctaatacactcatctaaatgaaaccatgtatatttcaaaaaataaaaataaaaaaagaaccatttgtaatatatttatttatatttactgtcaaaagtatatatgaaccaaataaattcttattattaaaaaaaatatatattccttatctaataatattattatttaacagaatattcataatttttttgctttaaataaataacttttcaaaaaataaataaaattatagtatgatatattcaaaagtatttctgtaataataatagtattttaatgaattagacaccattggagagatactttaaaaattgatatagaactttgtaacatataaacaattaatcattttattcctcgcttttattcttagagtctgaggaatttgatacaattaaaaaaataattgaaagaagaattatagtaaatggcatcaaagactatgttagtaaatatttccaatttaaaacttgtagtaaaatgatcttttttttaaaaaaattatttattatttatattatcttttagcatataaaaaaatcaatattttttttttatatatatatatatatttttagaaatagaagcaaattacttgcagattatagagatatttattagttttgttaaaatattttttttttctaaaagttatgtcgattttcttaattttttatgagtgattgtgagttgttgatatatagattttgttgtacaatatatttttgttttgttgtatactatatttttattcttaaatgatatttattttttattttgctatgtagaatggttgtatataaatttattaacataatacaaatattttaacgtatgtgttgaccgaggttttcggcaactaataaaatatgaatataataatgagct

SEQ ID NO: 164992 - DNA, 1636 bp, Cannabis sativa
aaaagatttgaaaggacagagagagaattttcttcgagtaggcacattgctttagagtacggaccatcgagatcagaatacatgtcatttaatcgtgcaaggagtgaagccaagaagttcccgtacaaccagaagttcccatacgaacttgggagcaaatactttccaaaaattactctagtaacgtggcatggtataatgtatcacgtgtcaagtattgaagatactagacggatgtaagacaatcgagaagactgcccagaaaacgttgagcagagtatatgccaaatagagccatctagcatcagacgttagctggatgaggcatgctgagcagtatttcgaacagctaagaagacacttctaggatgaatattcgatcaacaacctcacggacaaaatgtccagattcattccaactagataaaatatctttacttatctactatgcagcaaaataaatcaatgataattatatttgcaaattaaaatgagtatattatttcaaataaattttaattaattatattatttatataacatgcatgtatttattaataacttctattatatatttgattactaaactaattacaactttatattgaaaaaaataatagctaatgatcacaactattgatgaataaatttcattgtggtgcgccacaccaactcataataatattcataattaatatacattaattacatatttatatatatggccaatttattattgtaattgcttgcatctaaatttttaatactatacgtggcaattgtttttaattatattgtgtcaaaatttaattatcctatagtgaaaaaaaaaaacctttaacaggtatattagttacatgtatagatagatatattgttattataataaggattgtatttacaagattaggtggttattaattttgtgatatgacaataaattaaagtggaatgagaatcatgggttcgaatttattaaattagtttgtagttttggtttggtaacaaaacatagacccatgagggcagatagcttgggacattaaagaatttaagtaaattggcaatagtagttagaagtagaactactagtacctatactagtaccaaaccaattaaagttgataaaaaaataagtattgttattaggtattagtggtgcctaatatttttcataagtgatactctaagattgattagtaatattctctgaaagttcttttcttaagttatatgagactcgatatataccaataattatataaaacctaaaaagatactagacattaataatatattttaacaattctaaaaagaaaatcgatgaaattatattgtcataactgcccacgtggttattttttcattaattagtctagctacatcaataaatagaatattaaataatacataatatcattttattagtttacacaattcttttttttttttgaggtatagtttacacataatttgtaaatgaaagtagtagtaataaattataggatgattctataatgcatccccttaaaaggaatgtattgatgcactatttacttgttttagcatctcaattttttttttttaatttaattttttttcatattcataaatgttcactactacaatgtaagcc

SEQ ID NO: 164993 - DNA, 961 bp, Cannabis sativa
ttttttttttttttactttcacataaagttattaaggagattgatagactatgtagaaattttttttggggtgaaagataaaatacaggctaaatgcatttgacattttggaattgatttgtaagcccaaaaagtttggaggtcttggatatagagaatgttctaagtggaataaggcatatatggcaaaatacttttaggcagtttctataaaagaagattgcctttggatgaagtgggttaatagtatctacttaaagaatcaagatggttgggtcaggagttaaaacaagatgtaagttaatattggaggaagctcatgaatttaaggaattgtttctcatagtaacttgttattgaaagaaattaaatacatacaatattttttcttttgcagattgtatgatcattggttactcctattttgtaataatatagagaagagaactatatatatttgttgtataagtaatttataaccctaaaataaaagatataattatattaattgagtttaatataattatattaattgttcagtgattcgctctccatgtattggtttgtaattagttttgggcaaattattattttatccttttaataacttatttatcctttagtaccattaactcactagtgaaagtataatttagattccatctaaatttttgttcaacattccatttctagaattaacacttaaagggaaccaatattcgatcagttaggaaaatcagaattccatgattgtaaatcatgttcccatccatctacattattacatttccaaaatagaagtcgtaagaatcttctctgagaaattttaacgattaaatcaaagaaactaataacatgaacaagagtttatgataactcagaatttaggtcgatctataattgatcatcgttatgatatgtgatgagtccatatttatcttataaatatgatcaatttatg

SEQ ID NO: 164994 - DNA, 1535 bp, Cannabis sativa
ttcgtttcccacgcccatcttgtgccatgtcatgtatttccaccccgatttcctccattaaaacttcttataataataattacaaactttaaattttgtagcataagaattgttctatattaataaaaaaattaatgcaataaatttaaattagtattttaaaataaaaccaaattcaattttttaattagttttaaagtttaaattaaaaataaaaaaaaatgaaaaagataattttacgagtattacacaataattaattagttggaataattattatatgatattataacttgaatattatacttttttagttataattattgcttagtagaacatcaaattaattaaaaattaatatataaatttaaaattaattaattaaaattttaaatgatcataaagtaaatatataagtaagaaaattatagatttagagttttattagttggatttaattaataatatttaaaaaattaaattatgttgtagtttttaagaattaatttaaaatatttagctaaattattaataataattattaaattaaattatttgaaacccaaatacttaattcatacttagtgctagtggtgcgttttatagcatttgtctatattattatcatcatcataaacttacaagtatgttgagcttgccgtaaaaaatggttgagacagtgttaatgaggtcctccctttgggctctaacacttaagtcacaaaccgaaccagtaacctcataacctttgctcttccattcttcaactctttcgttcaactctgtttctgtacgagaacatgtgtgaactgttgccccaagtccagctagctcctctactatggcaaatctaagaagaaagaaattttttactaaaattgtagactaaatatatgattgaatttaatgacatttttaagaagttaataaaataaaaggctaacccgatgcctttcgttccgcctgtaacgagggcggtgaggcccttgagagaccatctcttctcactgaaactctcagctacggccgccatgttttgtgcgtgttgattattttatttccttattttgactctgatttttgtcttgaagtgttccgcactatataaatacgtgtataaattaaagtgtgtgtaaataaataaaacaactaaggcagttgggttggtgcgattatatatatatatattgattttttaagaccaaaactcaaaagtattttaaatcaaattatattaaggtatatcgaacttatatgattttatgattgtatgaattatcaattattgatatgagatatatatacacttatattatttcaatagttaaaaaaaaaattaaaaatcaaaatctcaaattttattttaaaaattaaaaaatatatattatttaattaaaaaaattaaatatacaaatattacacttattattatctcattaaaacctagtatatacatatatatatatactaggtgattgttacgtgtcaaaccacgtagtgttaattttatttaatattttagttttttatttgaa

SEQ ID NO: 164995 - DNA, 912 bp, Cannabis sativa
agtacgtattatatgcataatgtatggatagtgatcaataggcaagatgaccaaaatcaaataagaaaattaaaattaaataataataataataataataataatgataatagaattagaatgtgggtaaggcaacctaactttattaagatccacagattttgcggggttgtggcccgacaacgaggacccaatgctggaagacttgtgctttttgccggcccacttttaattttaattaattgataaactctttattatggtgtggttaaggttaaccaaatattatttaaattataaatcatacttagctgtggttaaggttaaccaaatattatttatataacatttcttcagttacacagttaggattagatccgaatatcattctacacatttttaatactctctatagttactttacaaatcgtctaatccgactataacgctcaaattaaactgaataaatcgacaaaaaaatataacataaataacttagcaaaaaatccatttaataaatatattatgcaagttgaatattattctaacatgcttaaataactcgaataaactgatttatacatttttactaaaattatctataatataatctataaattacgtttaatgttaaaactattttacatttaaaaattgtattttatagtatttaattctttatagttgataattttaattgtatttgaatattgaagttgaaatttataatttgaagaatactgtttttttttttttttttatgaataagaatcattgtattgctcaactaaaactttacgatttacaaactacattcctcaagggaaatttgattttctatacttaaaaaaccttaatattttattcttaaaccaatacattttaaactaaaaaaaatatgacacttttttc

SEQ ID NO: 164996 - DNA, 639 bp, Cannabis sativa
agttttgaatccaagttctaatgttcggattcaggtttgggttcagattcgaacatgtaagtaaaattgtaaaatacatattttaaacacacaaaaaagatatattatatttaaaaataaaaaacaaatttttgatatcttctgttttttaattttttaaaacttaaatttttaaataattcaacaaaatgaaccctactaatttttaaaaactttattccatctttaaaaactaaaaataaattttatactacgaaaacaatcaatctgagagggcttttcgctaaacttcatccaaggtagggcaattaagaagaaaatgactttaattaaactgaatcgatctaatctaattacaaaaaaaaaaattagatatctaatctaattatatttaagaattatttcagaaaaaaaaaggaaaaaaattcaaactcagagaaaaaaaaaattgaaacaagaaagaaacaaaagaaaagaaagactgttgaagagaataaaattttgtcgtgtaatccctatgactctatgagtaacagtgtgaggcacgtttactatacagtaatcagaatcggaataaattaatggagaaatgtaacagaataaataaaaaataatcggaatcaatatttataatatgtt

SEQ ID NO: 164997 - DNA, 1086 bp, Cannabis sativa
ccatgtttttttagtattggaatgggacagaattgttaaaggaatttttattccacaattaacaactactactctatgtaagtaaacttctcatagtcatatatatattacatgtgaaccaactcatgtataataatgcaatgacatgtgaaatttgaacctctaaatccacacaacaatgaatctaaataatgaaaataaatgtaaaaaataacattcctctcatatcatacaacataagctatttactactactattactacatatagtattatatttttatggaacataccagcaagtgagctaaaatcccagctttagtttccaccagcaaagcctgctaatcgagaaatttcatcttctagacgagaacagtgagtcttcaactgatcatgaagttcattattacttgactcaggctgagtttggtgccactcagacagaccattaacaataactttcaaaccactctgtaatagttccattcccttgctaattccatcaggaagtttcctttttctgctgtgttgcttctctacatcaacctccatggattgcttttcatcatcaatttccattgtttcagatacagcaacagtttctgttttgatagttgggatcttttgaaacatttccttcaaagtcagaccctcctttgaaagctgtcctagctgctcacccccggatgatgaagtagttatgtcgatatcagttcctttgtcgagaaatactttgaattcagacatgaatctctcctcgtttgcctcttttccatattctaaatcgtatgatagggctgcattttcaggcacgaatcgccagagctcatcacacgaagtgcgggctgaaaaaaacccgaatgctgtgattgccaaatgaataagagcccagtgcctttcctttaacatcatttgatacaattggctagcggcagagattttggtactgtccttatcagcttctgccattggcatgtgtgcgagtcctgccatgaaaagagcaaggtttggtttgcattcatacaagtctctgtcaaaggctgctgaacctgagatgaacagattttcaagctcaagaagaagctt

SEQ ID NO: 164998 - DNA, 515 bp, Cannabis sativa
ggtataagtattataagcaaatgttaattaaatttgttttatttattactaatcttgtcaaaaattaaaaattaaaaatgagctgattataaagggattgaaatgacctcatctatgtatataaaaaattatatttaattttagttaaggtatcaactcattaatatgtatataacaaatttaacatgtttacaatataatttacatatgtaaaaattaaaaaatataatttacatataataaatttaagaatgtgtattcttacatgagtcattattatattattttgggttaagtatgttaatccaaaaaattacttgttaataaataagtgagttgtgccaacttgaaaatgacttaaactcatttaaggtaaattcaaactcgattatttcttaagtttcaagtcgtgttataaattgccaccccttcctttgatctacacttctcttacttttttttttttaatggacacttctcttacttaattccaactataagtgacattatattta

SEQ ID NO: 164999 - DNA, 1859 bp, Cannabis sativa
ataattagaaatatctactctcatcaaatgaaaaatgtgctcattatcttgctccaatatttgtttctatatatacagttcaaaacacatgatctcatcaactttagccaagattatttcattacaaatctatgaaaaattatatggacactaataataaaacttctctttctctgaagattcttcaactgctgttgtaagattttaaactgtgtaaaatggcccgtagataatgcaaagttaatcaataataataacatagcactatgctacacatatataatcaaatatatagttattgcacatttgtaatgtcttaaaataattataaaaatatatataggtaataagatcaatcaaagtatatataccttgcgagctcggattataagaagcatggagatattgcagattcttaattgcttcttaagccagtgttctcattagcatagagacttgtataacttatgtccaatattttgcatatttctaaaaacgtcaaatttaattgcaaaactggtagcagaatgtctgaagtgttgcatggaggattctaatgattcttccagcaaggtatgaatgatgatctttgggttgctttcattgatagtttagttttggaataatttgtttttttttcttttttgtttttctgtgtgaaagtaggtctctttctaaatactttgatggtattttgtgtttaatcatttgcttaagtatctaatctttgatgctctctaatttgatttatttatttgatttaactagtttttgtttgtgagtttttatcttagttgctttatgtaatcaatttttttgtttcaaatttttaactagttgataaatataactagtttctttatattatatttgagttattatgtgttattatttgtatttatttattttgttatgaacctggttctttttatatttatgactcaatattttttagaattgatctccacttttttattttaaaaaattataacgggttttatgaagtactatgtgttctgaggtattttgttgtggaactaattttgtttttaatttatatttcagtgttttaggaactgattttctctttaattttatataactggttttattttaattataatcggtttgagttattctgtattatttgttttaattccttttgttgtggaacctgcattagtttatgtaagtagttttgtattagtttatgtattagtagtttagtttataatcgatttttttgagctattgtgtattatttatttttagttatgttgagtggaaccagttttattttaatttatgtctcagttagtttttgatttagtcatttcaaaaaataattcttgaattatttatttcaaaaactaatttttaatttaattattttaggaaacgattttttatttagttaattcaagaaaccggtttttgatttatttattttatttaattggtttttgtgtgtaattttttatcttagttgctttacggaaccaattttttatttgtttcaaatttttaactagttgatgaatataaccggtttctttatattatgtttgagttattgtgtgttattatttgtgtttgtttattttgttatggaaccggttcttttcatacttatgcagaattgatctccacttatttttttttttaaaaaaattataaccggttttatgaggtattttattgtggaattagtttgtttttaatttatgttttgatattttaagaactgattttatctttgtcttttaattgtaattggtttgagttattgtgtgttacttgtttgtattcattatgttatataacaaattctattttagttataatcggttttgagttat

SEQ ID NO: 165000 - DNA, 1609 bp, Cannabis sativa
  modified_base (786)..(810): a, c, t, g, unknown or other
atcaaatcaaaattaattaaatacacatggttcaaaaaaaaaaaaaatcaacaaaagatatcttcaaatatctccacactattctcctataatatgagcttaactttttttttttttctaaagtaataaaaaataatctatgcatttacatagggattatattaaaaaacaacaaaaaattaaacataataaaaacaaaaaattaaacataaaaatataaattttattttactaaaaataacaatttatataattttccaatttacttacataatcatatcaatcacaaaaaaaaaaaattaaaacattaagtactaataatttgaaatatgtcgcaacggatatatagcaatttatcataataatttttaaattcaaatgttaaattatactaataaaaatataatattttaagatggtatttaattagcaatgaattttaaaatttatctttattttttttattgttgaaagcacattatatatgcaatacattttcttatacataattatattaatttaatctctttcacattttcacatttggcgtcattattaaaaaagaaaacaggaagaacataaaaaaaatattttttttttgaactattatataaagaattttctaataaaaattatttttaaaatgtttggataaattattcaaattttataaataacttctcaaaatcgttttaagggaagttctgaaaaataaaataaaaaataattattgtaaaaaatacaattaaaatagtcaacgggtcacttattattattattattatnnnnnnnnnnnnnnnnnnnnnnnnnattattattattattatttggaagccttctaacatacagctacatagtatataatatgtgttgtctaaatttattttcttttaattatttaagtaaccaattattaataattataattataattgacttgttaagggaataattaaaattgactctttttaatgcaattaaattgactttatattgtcaaagttaaaataattttttttgaaaatgtatatttattttttctgaagtggcttgccaaatagctatgtgtcacatttgtgtacaatttacgtatatatacacatattattactcttattttagtatgaacaaaaatatattttttttaaaatgacataattataaaagaaatattcattaaatttaagagtctaataatcccgaaaccataattaacaactacttttcttttaaaaaatgacaattaaaaagaatattattggatacttcacactctttcaatatttaatcgttgttagcttattagatttttagttgaggttgttgttagcgttttctttattcatttcgtaaatgacttgataagtatattattgtcaattctattctttgagtgatttatcatatatacttttatttgatttgtggaaattgctatttttctcaaaaaaaaaaaaaaaaaacacaattaaaaacttataatattcaattataatagttatagttataatatatatttttttaaatttttcttaaaaacattaattcacatattattgttaaaatgattttatattgaatggaattttgaacaatcgtttattgcaca

SEQ ID NO: 165001 - DNA, 2793 bp, Cannabis sativa
gggaagaagtgcttgtgggacacaaagtgtatgtacttctggaggcaatacaagccaatcttcataggatacccttgcataggtcaactcatataagtacaaaatttcctccggggctggggcgatctgaccccaggacctacaaaatataaaccacttggagagtagcctttatgcgattggcagaagctggaaaggaggaattctagctttgacacaaaattgtgtgaattagttttgagtggaaggtgggctccataggagatatgggcctaactccatgctccataacaatctacgctggtgattcttcaaggatgaacatccggtgcaagatgagtcttgaaatgtttcgtacacctccatcaacaaagtatgtctccagtaggccataatttctcaactggtttggcctttggtctatttcctagatggaatcattgagtacaagaggagctggagatgcaacgcgggccttacctttgccttttcatcgttgtttggtccgaacaacttcagaaggtccctcatctgaagctgggtctttgatatcaacatttacaggaggtacgtccatggggatgcctcaagaatctcctcatgattcacgagtgctaagtggaaattgttatcatcaccaaacactgaaaaaagtggaagaaaaatccaagcagttaataccctacatccaaatgacaaatagggtaccaagagaagcctcccccaaaactacttagggggatcccctccggactcatcaccaacaaggttactctcacaaagcaacctgttatggtaacaaattgggaacccaaacacacaagagtagaaaaaagcccaaattccctttatcacaaacaaagcatatcaaaggggaaatatttaagaaactatggcgaatcaaaaatatttgacctaatcatctgaactagaaaaccccaaataaataacaggcatacgtcttaacccaaactgaagggaaagtaccttgatagagcctaagctcaaagagatactatctccaagtacatgcagaaaaattctagatgcaataaccctaattcctaaaatttaatcctacgcatgcaaagcaacaaatttcttcaaacaaaaaactatatttcacaatcaagtccaaaaaaaaaaagaatagtttatgtgggggaaatacttacttgtaagacagattaaaagaggagaggatggttgtacgtcgtcgttcagatttccactgactattcggtgacagggcctcgcctagctccaatagcagattaattgtttgggaaggtgatgaacgtcaaggaaacacatcgacggagtcaaaggagaatgggttagactttggtttggagaggtgagtaggggcaaaggtttctgggaaaaaagttcatttgagagggttctctgggccaaaaattgttgctaaagtggagaaggaaaagtgacttcaatcgccaagactttcatttatatgggcgaaaacggttcaaacatttttgaaatgcacggtcaagattgaattaatcagaagctacaccatccaacgattggagataagaaaggtttgcatttaatgcacctgaaggaaaagaataaattatttattactcatcatttcgtggttgtatccccaacgtgttagaatcctagcatcttttcaagcccagtcgttactcccttcacacgacaaacacgcttaaattcagagtgtgggcttcacggcttcactaaataagtaccatgcttcaacaaatcaacaacaatattgtagaacatgataacccttcggatgcccaaggcaatgcggaagacttcttcgacattccaaatgcttggtcaacaaatcagagacgtgaggcaagcatctgggagaaagctggaagctcctagcactcctgagtcctggaagcttaggggataaatgttattcgtatccccagatgaaatgtagtggaaatcacagaaggatgccatgttagattactcattattaatgaacaacctccacttcttggagtcacaaaaattcctataataccagatcttacccgaaggctctccctgctagccaagatagaaaatactctatgattctcattaaaaaaaatgttaccaagagggaataaaagtcacacgtgctctaggatggtagcagattagtttggttcgggaaagccttagccaaacgttcctggacctctctatacctaatctagagctaaacctgatggttacataccttctaacactaaatcagattttgtcccttacgttaaaccttggtagtgtgcgtacatgctttgtagcttctttttgtccaatgacttgtctagacaccaacttttcaaggtaaaaactttgagcagcatgtgtcattagtaccacgagttgggttgcagcagttaagcaccacacgatgaagaagctcactacctacctacctacaattagatcaccatgttatatacgccagccatgaaaatgtgcttagtacgaaatcctaggtgggtgaggtatgccatcacccacacatgtgcctataaatacccttatttttcatgtgtaaagggtgaacaatcttttacttacataacctctatgaaaattcctataagcttttttattctctaacataaacaaacggaatatatagttagtattcatactgtaacacttgtagtacttaaacactcgtcagtcagacaaatacaatggactcgtggactagaaattattaacgcttgaaccacataaaaattatttgtctattatttattgttttatattttc

SEQ ID NO: 165002 - DNA, 859 bp, Cannabis sativa
tgtgtttttttcaataagaaacacaatttattaagataaataattgtaacatccgttcatacacactcttttatactaataagaggttgttagtatcgacaacaccatttgcaaaccgtgaaataacattgtaagaactactaccaacaacagctaataaaaaattaatatctaataaatagactgaaaaataaaatttgagtgaggactattaatccaactaatagccacagtagaatcattattaataatgaaaatactgaaactgaattgatgagcaagagtcaactccattctaattgaaagtagctccgccacattaactaaaaagtcacttaaaacattagatgaccaaaccagccaaaccacacccgcagcttcccgtatcactccacccaaccgaacaaaacccctcacaggaaccgctgaagcattagtcgcaagagcaaatgactcaggaggtggtggcagccaccgagtaggtggctggctaatttagtttgaatagcacagtcccaactgaagacatcgccgaacatgatctttgaattcaataggtaattatgggctaattctagaacaatatatattcttgactgtatattaccaaacaacattgagtttcgatcataacaaagccaccataaggtaaccatcattaattcaaacatctcacaagataacttttcaaagagaaagaggagaatttccagcagtggtccatggatacatcggcgaagcactgaccagacccccaaacggtgccatattggaattaagccaacacaggaaaataaaacatgttctggagtttcagattcttcttcgcattgtgaacaacaaagaggtacctgactga

SEQ ID NO: 165003 - DNA, 896 bp, Cannabis sativa
gatgttcaaccagaaggtactcaactaccaaaggatttagcccacccatagccgcatctattcactcttatatttctttatcaactttatgtatatatttgtatttcaggggataagggtccccctttttgtttgtatggagacaatattttatacccttgctacaggatttttaagtaagtagtactatttgattaactatttagatatctgcattttaatctatagagtctgcaaagtttcaatgcttccaacatcgtgaggttcttgttccaaaggcatgaacctttagatttttaattaaatgcttagatttaaatatttttcttgataacaagtcatctgtagtccttggaatatgattccaatggcctgaaccttggtatcaacttgttttgaagaaaaatatttgaaagtgtttttacataaaggatttttgaaacttaaataaccaattagcctgagctaattaattactttaaatatttcttggtaaatatcacttgttatcaggactttttgaacttaaatatttaattaaactgaattaattcatttatttaagtagcctggatattttatttatgttaacttgagttaactttaaagtccgaacttctattttaagttaacctgaattaactatgtattatactaaattgatttcaagtataataaggtagtggcttacttccagttccctaaggttccgatttcggacgatactccctactcttatacttagttaaatgctagattaactttaaatataataagctagtggcttacttccagttccttgaggttctagtttcaggcaatactccctactcttatacttggttaaatgcaagattaacttcaaatataatggggtagttgttggaaattatttt

SEQ ID NO: 165004 - DNA, 940 bp, Cannabis sativa
  modified_base (282)..(286): a, c, t, g, unknown or other
attttattacaatttgtttataattaattatttatttgtttgtattattcttggttggtatataatatagacaaaatttagggataatttttacattttagattcaaatatttttttatatatatttttacagtattttataaaaaagatacaaaacatacaaaaaaattacataaaaaataacatacaaattaataagagtacaatataaaaatattgtattttctgtaaataaaatcgtaaaaataaatttaaaattctatacaaccgtatttttataannnnntttgttatttttatatatttatgaaatgatctcaaaaattatagtacatttttatattttataaaaggtgtttgagtagacccattaatctatttcaacattcaaaaaaaaaataatctaattttttatcattatatatgggttgtacttatttaaaattactgtaaattttaaaaaaaaatctatataaaaatataacattaaaaataaaatttaaccaattatttatcataaaaataaaaataaaataactaatatttgtgcaataaaataatatatgaactttattttaataaaattttctcatatatgccaaaaaagcatattcgaacaaattttttgtgcagtgtttcaatgacgtgcaccaaaaggctttctacaatataatgatcattagaatattctttttggaaaaaaattattctcattcattattgtctcattgttgactctttattaatttccacaaattaataaattgttatgaaaagtcaaaaccacatcaaaattaaataaataaaaattaaaaagtgggaatcaacacaactaattatactctgaatgggattaatgggtcattaatgcttaataatcaaggttattttgtttcattgtattgaattacactaatcattgataatcaaggttattgaa

SEQ ID NO: 165005 - DNA, 2272 bp, Cannabis sativa
tagaaggagcggtagtggcggcggcggcggcttcaagggaggtagaagccgtcacaataatggtattttggggtgtaagagtcacaaggcggtgagagttgctgaaactgtgcacacaaatgatagtagaagtaattaattaaggatatcaaatcaaggtaatttcattagtcgtacggtttattaatatagtccttttccagctatattatacattagttaatgttattagcagttttcatgtataattttgagctacataaattagtatttagttaagctgaaacaattatatatatattggtatggtttgattcaattcattcatgataaatatgacttccatgcgttaatatatatatatatatatacatatatttttggttgtattattttacaatatatacctgtaaattaattatgaagaattagagagattaataataaatctttttgaaagaaatatgtccggagcttcgatttatatgtttaatttttttttttttaatatatgtatatatatatatagttgcatgatataataagctttccaattaatatataatttttttttaatgtataaggaaaagaaattatatacatgaaaaggaagtaacaaaacttaattatatgcaaagcctttcgtgtcactaaaagggaaaacagaagaaaaacataaaaagtgagattctgatttgtatggacatttggtcttatggggatatcaaataattataaggacttatgataagtttaaccacaaatttttgtattgaagatgattcctaccaccaatatcagttgtctatataataacttgggcctatatataattttttttttgacccatgcattggcagactactagtattttcggctttgatttggttatgttctcttgatttaagacttagtgacctttcatgttttggaatattgttcacagttgttattttttgtccagttgaaaacccatgttagcctcacttatatgaagttacatgtctagattctagagccttactttggcttctatagttccatggtttttattttaacacagccgtatatagatgattaagtcgtatattaggacgctcaatatggggttataattatatatttgacttttattaattattttttttaataattgttaaagaaagtatatttaaacaagaatatagtttagtataaattcgccataaaattatttactaagcaaaatttagaagagaaataatataataattaataaaaatttatatatacatatatatataaaaaaaaaaaataacagcacaaaaaaaattaattttatatgtatactcgtatagtcttctacactaaaaagatattaaaaatgtagaaaagacttaaaaaaaatattttttaaaaagaaaatggaataaaaatgagagattttatgaaaaaagatgagcttcgaaaaaaaatgactaaaacattaataataggtgtaaagaaaacaacacatacaactccataaattactaaaataatcttatttagtttgaaaaaatataaaatatgaatgagtacagaaaaacctgactaaagtggtgcccatcatgtgataaaaaaaattataatattttgtataattggaaaaaagttaaaattataattaaagtgaagaaagatatgtacatgttaagagcatctccaatgtagagctaaaagtgttgtatatatgtatattttagtcaattcttataaaggtaaacttcaattgtggtgtataaagttatctaaatttatcatatgctaaaagtagttgtgccaaatagtttaacacaaaatacagcatgggctaaattttacaccacaatagatattattattttatttactcttttgtaacttattaatgtaattattcaatttttacattttatttatatatttagtagaattttatatacttttgttaacttaaattttcattaattaagaataataagcctatgtaataaatatgtcacagaaataataagaaataataaatgaatatataacaccagatctttttacgtggttttgcagttaaatctgcatactccacaagtctatcttatttatgatattttctgaatacaagatacaattgataatatatatcttttgttctttctaaaattctccggatccgtccctttttctgtgaaatctgcccctatttacagtgttgaccgaggttttcggcaactaataaaatatgattatactattgagctgtaagaaagtgagagaa

SEQ ID NO: 165006 - DNA, 837 bp, Cannabis sativa
cttctagttcaaaagtatctcatttctttcctaccataagtttcttgtgcaggcatcattgtagtgaccagtactgcagcactttaaagagaactgtggacaaaaaaaaaatgagcatgaaaaagaaaaatgcgacctcatcttagcaattaaatttaattcacatacagctcaaacaagaaaagataacatgcttacaagcacatgcgcataaaattagatgcgttatgcatttacttaaaacttcggcaaggtcaagctcacctaccttaagagttgtatttaagttattccttgcattgctaaggagctttatctggtcatgattgtctattaaattctgacattcttgacacaaactgatacaaataaattaattaagtcaaaaataaataacaattgaatggtgctaaacatagaccctcagacatgtttaattgaacacatacttatcaatagaaacaaaactttcacgaagctgatttattgtcttcacagataaaactaatgattcaagcccagctgcttgctcaacctgttgtcgaaaaaggattatgttactaaatttatgggcttgccattattcaattaccaaagttctcaactcaaattataagagatcatataatcttaatcaaatatttaattggagttcttttaagcttcgagtttaagtttgaatactcacctgctcagcaaccattgtactaagttgagcatcatttgcctgacaataagcacaatcaataacaattttttctttattagaatatgcataaaattgatcatttaaactatattccacatatgccatgactcatgaatattgatcaaaat

SEQ ID NO: 165007 - DNA, 1187 bp, Cannabis sativa
ttttagttgacaatcaaggaaaaccaatgaaacagtaatgggagaagaagagagaaaagaactgatactagaagctgattcttcattaatgaaaacagagcaattacaattcattttatagtgaacacaacagaaatcaaccacttaacaaccagcaaaacaaacataacaaacccttaacaaactcctaaccaacttctaacagacactccatcttacacactttgatactcccccttaagatggagtgtaaatattacaaactcccattttgttcttgagtgtttgaaattgattaggcagcagggcttttgtgcaaatatctgctatttggtctttgctagaggtgtgaacagtctttataatcccttcttggaccttctctcttaccaaatggcaatcgatttcaatatgtttggttctttcgtggaacacagggttggcagcaatctgttgggcagctttattatcacaaaataaagaaaatattaaggacgcaagcaagcaagctgatatattattattattttataatattaaatcttatacaatttaatttaataaataatataaaaaactctatacctaattataatacaacacattaatataatattttagacattaaagtgcttaataatgtcatatgcttgtagagctgtgttaatcaactcaattttgttaactatctattcatactggagccaaattatgatcttgccaaagaaaataataaagaagatagagtgtatttcgaggtcatatttgtggaagggtcaaagcacatcacaaggggctgagttgattgcttgggattcggtttgccagtctaagaaagtagggggaattggatatttagaaaggtggaagagtggaacttggcagcaatgtctaaatacatttgggcaatagcgaacaaagagaacaacttgtggattaaatgagtacacaatgtgtacattaagggggaagattggtggagctatcaagctccactacaagcgagctggtactgaagaaagatagtgacagccacggagaaattcaagcacaatatcgaatttcagcagctgatgtgcgcaggggcggacccacattgtagcgaggggaggcagtcgcccccctgaaaaaaaaatcgagaaaaaaatgtatatgtattttaattagttacaacgtatatttgtatt

SEQ ID NO: 165008 - DNA, 806 bp, Cannabis sativa
aaaaacgccaccaaaatatcttcatatttaataaaaaagaaaaatgataaataacaaacttctttttgtctagacgataactcattcaagttttattgcaactttcaacatggaacatattatctttaatcttttgggggagcattgtaattcggcactagtagtgtccagtactttttataagtagcattttacgatttattaaagatattctttaaaaactattttcttaagttatatgtgatgatctgatacttaattacattaatagcggtataataccgaaaaaagtattaagtaccaataatattttttagcaattttttttttttttttttggcatggaagaagatgatggaatcttgtttaccaaggtagtaattaatacattatttaaagtttgtaacattttaaggaactcattacaacatttcaaaaaaaaaaaattaacttattatatacttaaaaaaaatattatactaacatttcaaaaatttgtggtgatttaattcttcacgtgatcacataccaagagctactttaatgattaggtaggtaatttattactttcaattatgatcccattttatacacgtagttacacatgtagagcacgcgatgactcgaaataactgtattctatttctgagtgataatgactggaatcacatatcacaaaaaattatggatttttttgagtttgaaccaaaaaaaagtaacaatattataaaaaaaatatttttagatggccaaataaataaatatacagcccaaataaaaaaaattatacaaataccacttacaca

SEQ ID NO: 165009 - DNA, 1160 bp, Cannabis sativa
gaaaataagcttaggttagctggttgtgattgggacactaattatcaagagaaacaaactacaaaggcatgcaggagcccacttgaagcaaaacactacacctgtattacatatgagacatgcctaagaaatattatggtcaattgtcctcaaagttgttgtagtggggttttgaaagaacagcaagataattatacataaaatatgaaatattggggtattttgcttcatttcaaaagttggggtatggtggggttgggaagaaaggaaaagaaaatttcaaagaaaaatgaattagtattttattttaaaagcagcctgatctaaacttccaatccataatggtgactagttagacaataccatgtgattacacaaggagtatgcctcaatcatcagaccccatctaagctaatttgctctgcagtcttgaccattcatttcaaagagcattggttataaatacacatatgagtgttttcactagcatcccaactcctcaaactcacaagtactcacctttcttctttaggcacaatattttattacaatcatgggttttcgctttgctagcttagttcatgccaagcaactcattcagaggcctttttcaagcacaaaagatattccaaaaggctttgtggcagtttatgttggtgatgagagcagaatgaagaggtttgtgatccctgtggcatacttgaaccaaccttcattccaacactttctaagtcaagctgaagaagaattcggattcgatcatccaatgggagctcttacaattccatgcacagaagattctttcatcgatcttatttctcacttaagctcctaagcttatgagtttacacaccaacagatgctaaccacactaaacttattgttacatttttttaggcatacacaatgccatgttgtaaatattttttccttgggaacaaaatttgtcccaaaaatgatacaaattaatgaatattattggaatttttctcagatattttttatgatattggaattctttttcttctggaatgaacataataatcatagaatccttgtcttagaaagaagttaattttttaagggtgcgtttggaaaaccacaatgtaattggatttgtgtataattggaggtaattacataatttggcatgtttgtct

SEQ ID NO: 165010 - DNA, 1399 bp, Cannabis sativa
tgaacgattggttaatggccaaactaatcttgaattaaccatctggaagcgtaaagatcaactcctactcagttggctttgatcgtcaatgtcagaatctgttcttggatctctagcacaatttcaaagctcgtatgttaggttatttttagtagtaatttcagataaatttaagtatatttttaatttaattttactcgtatttggagcaattttacacttgttgtcttttatttttgcagatttaaaataaaagaatattagaaaaatatcaacgaaaaaaaatatgaaaaaaaagataaaagatcgcataaaatatcactataaaaaataggatcctggctagaaaaaaagattgtacacgcgtcgaacacgtggggaaaaggacacatgggccacagacaaattatgatttttgtgactaatacctttagccatggactttttagtcacaacataaaaattattatttataattaatcacaacttcttcacttttattagttataagttttgttgtgactaaaaataagattttttgcagtgaataattgtaggtatttttgttagagagtctcacattattaatatatggaaaaataataccatatagctacttttcttattaattctcaattgattataagatggaacctcatgcatcttactatatatcaaatctcatcatacttaatttattatacttttgcattaatctaacatagtatcaaagataaataaaattttaacgagtatcgaattaaaatccaataactgaaaaaagaagagccaaagtgccttttgtgatcgagtcgtccaagattagaaaatatatgttggctttggctatatcaaaaaagataatttttgggttaaattgatttattagatgtatgaaaatgaaagtgaatggtgggagtctagacaaatcaaaattccagttggtgttggagaatattatagtgcaaattaaagttgagttaaagaatttctactcaacgatccaatttaaatctcaacctaactccgctgcttaggctatagtcaaaagctatctccttctttatcctcgggttcttatgctgtaaatgtttgaaagaagaattaagtgttccaaagcataggtttgtcgcttggctggttgcttggaagtgcctgagaaccaaagatagattgatttctcaaggtttcaacgttgaccctaaaactcatcatgatcacctatttttttcagtgtaagtttagtgaaaggtatacaaaagagttgttgaattgggttggttcaagcttggttaagttgatgatcatcaatttcaaaagaattctcagtttcataagaagaagcactacaaaaaaaaaaaaaaattagtgatatttttttagtcaaaacataattttt

SEQ ID NO: 165011 - DNA, 1378 bp, Cannabis sativa
tattcttttaatgattttagtatatgtgggattattaaaaaaaataataaaaataggcattgatatatatatgtatgtatacataaattttacagggacaaaaatgaatatgctggataaaaataaaaaataaaaaaaaaatatgaaaaatataaatttataagggaaaaaataaatatatatatatacgataacaaaactaaaaaaaattaaatttagggaggaaaaaaggaaaatatgtaaaacatatcatacaaaaaataaatttatttattattattttttgtaggaaaaagaataattccattaagagaaaggcacaatgccaaagaaatctaaagatatcttcgaagactaaacaattagagtaagttgggcagaagatctaactgctaaacttgagaatttcaacttaagagagagctaacttagttgaagaataggcaagagcattatagctcgcttataatgagtaatagaaatatgaaagaataatttctaaactgaaagatatcattaataaatatatataccatacttattacagattgacatcttattagagaccgatttaattagaagcaaacaatcagaaaacacacaaatgcgaatataaccaaccacttggtgaggagaagaatctgaaggagactcaaagtctctaccacatgaggtacttcaagaagacgaatagctggagtagcaggtgaatataacacttcttcattagtacgagacccaaacgcctacatgcccaaccccctcctttcaagacaaatatcagtgtccatgaacaaattaaaatccccaaaatttaactccctatatggaaagaagaaataatccttgaggcgcacaaaggggccacggtataagaatggtgttgagcatcctggaaccagcatagatagctaagagcccatctacttactatattattagaaatattagctttttatcatgcacaaaagtaatgcagcgataccaaattcacaaacaaatgacaagaaattctccaccttcttctttggacaatctatctataacccaaaccaaatattcgtaggaagttgaaactatattaaaactatcaaaccccctcaagccccacctataacgaatggactttagggaaggacacaaccacaaagtacactacaagaaattggagctttacctactaatatatattggtaggtgaaagatatgttatttactaatatatatgaagacttattagtatgtaagcattgacaataatataatattctagaaccattattgttgggtaccatgtaaaataggcaggtattagactttacgtacatttatattaaaggaaattttttagcacttagggctgaacattttgagtggg

SEQ ID NO: 165012 - DNA, 2161 bp, Cannabis sativa
  modified_base (2083)..(2084): a, c, t, g, unknown or other
  modified_base (2130)..(2130): a, c, t, g, unknown or other
agcagggtgaactcccgtcctagggccttcgagagcaagtaacccaaaggccaatatttaactggctaggcccaagaatgggtggaaacacccaagaaaacaacttgagtagtgagtctagtcacttcaaatatctagatccacctaactccagcaattggtgtgatctatccccagtcaacacatagattgtaccagccaattaggggagaacgggcggccaggccctacccggcatagggctggctggacacgaacagctacctataatggggttttccagcaaagccaatccacctttctaggagtggtcggccaaaccttggaaccttcagggctacaacctattcaagaagggccaatcagccaagtccctgcaacaacagatccttctgtgcaacaacaattggatcaaataagagacatgattaagggcctagttggcccaaaaccttcaaaccttgaacttgataggtgaagaggatgacaattcttgacatatatcaatgccttgccctttcccaaattcaagatgccagtatgaaagatgtatactggatgaggaaacccactggctcacatcaaatactccgggatgcaacttgatctctagaagattactggtgatgtgcggtgtaagatcttcctggaaaccctgtcagaattagcttagcaatggtactttaaggttgctttaggaagattcaattattggaacgagttttcctgagaattctacacatagttctcatccttgaggttgataccattgcagctacaagaccttgtcgaggtcaaacaatgacaagaaaaacctttaaaggattacatccagaggttcatggctgatgccactaaggtcaaaggcctaacagaataagggcggtatacgaccatactcgggggcatcctcccattaagtgacttttggaaagaaatcaggaggatctcaaccaacaacatgaaagagttccttgacagagttgatggctttattaagctagaggaagttgttcgacaagcccagacagtgcaagtcggcaataggcagtctcaaggtgccttgcagccccatgactttccaggtgcgcaggcaagcactagcacttcagcacagacctctagtcgtaagaacattgggggcaagcgcaacaacaatagctttagaagaaataatggcaaaaaggggaagcacaacacttctctcacgccacgaaactagaaagataaggaggagaagttcacatgcttcacccttctaacggagaagcttgagaccatctacatggccactcacgtatcccatacaagaatccccctcctagaaaaagggagatgagcaagagggacatgtcaaagttctgccagtttcacaatgactttggccatgacaccaatgagagtcaaaatttgtcgatggagatcaaattccttataaggaagaacaatccccacttccatcgttatgtgtagaacgaccaatctcaggcacaagatgcccaaattggagaccctatgccacctccagtagtgggtcacttaggggtcattatcagcaaaccccacatcgcaggagagaccaacaaggctagggaatgctatgttcagacactgcatcataagcctaaaagcgacatcccagtcgtcaaagaaagggactccaagcaaccaaagcttgaagaacccactatctctttcacagaaggagatgttgctcaagttaatttcccacacgatgaccccatggtcattactgcataaatcgggaatatgatagtggcaagatgcatggtggacaatggagcctcctccaacatccttttcagatcaacatatgaaaacatgaggctccaactaaccaatttggaacccaaaacataagtaatgtatggcttctttgaccaaggtattgtactcatggggtacatctgattgctgctgattattagagagaatccaacaaccagaactttgatggccagttcatcttaatcaacataccctcagctttcaatgccatgataggtcaactagccttgtacaacctaaaggtggtgacatctatctgttgggttttatgccnnaaataaaactcatttcaatataaacagatttacttattaatatagntcagaaataacatttaatgttccatggttca

SEQ ID NO: 165013 - DNA, 1158 bp, Cannabis sativa
tgcagattagcataggctcaccatgcaaggttttaatcttgcatcctccaatctcatcttttttagtgtgtcgttgtagaggatgttaattgaactcccattgtttaccaacaccctcttcatccttttattggagagctggactgttacaacgaggggatcaacatgcaaatattgtacatgttttatatcttcctctgagaagttatttcattgatatatctcttttggggcattattagtatttctagcaatgtgtggccctcccaaaatgaccagtatatcatcgccttcaacaggaggaggtcgcattctctggttatttgggttgttctactgttagctagtttccttgatgtcttacatattgtttaaagtatccttgcgagatctactttctatctcgtcctttagttgtcgacattcttcggtagtatgccctatatctttgtgaaatcgtcaatattttgttgaatctcgcttatgcatgtcttgcaagcctcatgggctcaggtttgtaaaatgcaaccctattttcattagcgaggaatatattctcatgagtatcattcaagtatataatgaataaattgaaacatacttgtcgtgctttttcaatttctttttattcttagatgaatctctcgagtcatcctttctttttgagtttgaaccacttgggttgtccactttagtcgagactgtacttggtgttgccttactcgtgttgggtttacctccggagcttgttttcaacagcttcatttcatttcttgcttcctctttgggcacaaatacttgcgctctttcattgaattcattaattttcctcactgggcgaccatgtagatcatcccacaattcacctccaaccgtggataggtcagttgtgatccccgcttgaagtgtagtgagttgaatattttcatttaggttttcgacctttgcagtggctgttgtaaaaaaacttaaataagctttaagtgacttgcctgattgttgctttatgttggttaaggataatgatttaagtcgtctgtttctagtagcttgaaattgctttttaaagtccttcgacaactgtgcagctcgttgctaatcaacgagattatttgaaatcgtgaataattaaaattttgcttatttaattaaaacata

SEQ ID NO: 165014 - DNA, 966 bp, Cannabis sativa
gcctaataagctaattgctcaaataacaaacctagttattttttttttattacagaatatgtaaaagttttgggtcttggattttagtgggttcttggtacgggcctagccagccttaaccctgagccagaacagcctttaacccaaagttgtaaccatcaactcccatgtgatcctttgttacatatattgcaataattaattgttttaaaattgacaaatagtgtccttcaaaatattatattattattggtacaatttaatattaagttaatacatttgaatttaataagttacagaaaaaattgctaactactagtaagacgtcacatcatagtaatattgctaactactagtaagacgtcacatcatagtaatattggacacttatatgacttttggttggaaataataaaatgaaatggaatagaaaggaaaagaaaggaaacaattttaattgagatattttttccatcattttgttagaattattattctattttgaaatataaagaaataccatttcaatgcaagatgagaaaaaatttaataattttgttatgcgatttaaatttgattctatttaattcatattatttcatttctatttcttttattcattccttttaaccgccaccgtaaggcatctccaatgtaatactaaaaaaataatgtattgttacacatttaagagtatctttaattgagagctataaatgtagtgtattgctattttttaaaatattttattaaaagttaactccaataacaatttaaaatggataccaaatttggctcaaactaaaaattgtgccaaatttagcacaaaagaaagtatatgtcaaattttagctcacgataaataccactttttttattacttatttgctactcattaatattaggataagttgaaaaatacctcttttattaatcaattaaccaaatttacctctaatttttttt

SEQ ID NO: 165015 - DNA, 1017 bp, Cannabis sativa
caagtaattatttacttttatttgagtagaataaggataaaaatcgaaaattttgttagagactagtgaagatttacctctctaagaagagtttccaaacacgaaaacaagatcattttttcttttaagaaatttttagttggaaaactttgatgcaaaggaaatatgtttttagttttcgggtatggctttgctgtgagtagttcagttactaaatttctcttctgaatctgattcatatcaggtctgtctacaaaactgttcctgattgcgaaccttgtcgccccagacaaagatctcctcttgaaggtttctatttagcaggtgactacacaaaacaaaaatatttggcttcaatggaaggtgcggttttgtcaggaaagttttgtgcacaagcaattgtacaggtaatttaactcggcaagttaagaaggcgtttttgtttgctgctctcaatgaaataactccctttgtaatgatactttactttcaggattatgagttgcttgctgctcggggtcagagaattttggccgaggctggaagtcgttgataacaacactcgagtcaagctccacagttagagcttgtaagtgtaaatcattgttgtttcgagtgtcaacgaaaaccgagcttatcttcaagcaaggaccattccatcagatatagttataccttttctttctctttttctaatttttctgatctgataaaagggtcattttttcagttactgtacagtgataatttagtgtctaaatctgtttaatttggatttgaaagaagtggacacttaaatttgtaaccattttgtttgtttgtggaacttgagaagaattgtcattataatacactgcatatacatattgattaaaagggctgcatgtatagttgaagatattaaacaaattagtaaccaatctgaattaaacaacatttttttttggttgcatcaattgttgactaatttgaacacttagtataatgaattgattgaataattgaaaaaataagtct

SEQ ID NO: 165016 - DNA, 769 bp, Cannabis sativa
aaattattgatcaccaatatatattaggttacatttaaaatgtgctcatttaaataagttcactatcccactaaattttaataatggtctgatcatgatttcgaagttagaaaaagttaatttaatttgcaataaaattattcttaaattcttaataatagcaaattaacaaatatattatcagtttagtttgaatcatggacacaataattttattattaaagtgataatcataataataatatctttttaatacatcacatttttgctttgttggtttactttttcgaacgttctaggactcttataatatatgatatatatttatttttttataattaatataaagagctagctcttaatataatataaattattctttatgctactttaattagatcatttttttctttttctcaagagcctcattaatttctttatgggcatttggattttggagaacaaaaggtgtcctcttgtttttctttaatgaaaagaaaaaggaaaatgacatgaatatcatagtcataattatttctcatgagaacttttgtcaaaacaaaagtgatgagatataattatgcatgcacttacaattgcccactatacatatttattggaaaattctttagtaggaacttgtttttggtcccatatcggtaaaagtgtttctgcttttaatatttgaaaaaaaaatttattttaaatttttttagggcattttacaattttgtatacattattttaattaattacaaaatatgtgcaa

SEQ ID NO: 165017 - DNA, 1537 bp, Cannabis sativa
ttttttttttaatatatatatatagaattgagtttaccttatttgtgtaaaacttatttaaaaataccatatttatgtttatgtaactatgtttaatttagggctattttttatttttgcattacattcaaatagtttgcattaaggtggtgtttggttggatataataaaatagaatagaatggaaataaaataatttttatttggttgcatttcaaattctaattaaatgttctttccactattttgatagaatggctattttattaaaatagaaggaaagatcaatccaatgtaatatatatatatatatatatatataataatgcttattttatcaatttctttaatgcattttaaattttattctattatattcttattctcatattttcattctttccaagtaaacgccgcttaaatgtataagtgttacatatactagaagggtcagtttctaattctatgtttgtttatttatttataatattaaaataaaagctttgaggatattttctctgtttgtaattgtctttcgttactactttccaatagctacgtttaatcattcacgttctaacatggaggatcattacacatcgatgacactggatgaagaagaaactggtggcttgtaatatggggaagatgatgagggactttcggaaattgatgataggtggtgtcctgtgggaagatttatcacggatagggaaattaatttcctagctatgcaacataaaatgacctctttagggcgactaggtcgtggtttatatgtcaaagagctggaactgaacctctatctttttcaattctatcatgaaatagatattggaaaggttatagagggaagcctttagacgttcgacaaaattcagttggttttccaaaggttacgaagggggaaaaatcctcgatcagtggtgctgaacaagcttgatttttgggtacaattgcatggtatgtctacggagttcatgtcccagcgagtagtaagggatattggtaattatataggtgtatttgttgaggctgatcctaataatttcatgggcatatggagagactatcttcgagttcgggtatcagttcatgttgactagcctttaaaatggaaaatgaagcttgagaaggtgggaaggccggtctgttgggctattttaaacatgaaggattaccaacgttctgttttatatgtggcatcattggccactcagaaaaattctgtgaaaaacgttttgatattccatcacacatgttggctagacctgtgttgccttcttggtcggccagatctgtgttgggcaaggtctggccacccttgactcctcggttgactggtgtcggttgtgtgttgattggaggtagatcacactagttgctagaatttggtggatctagatgcctaaagtgatttgtttcacttcttgaatcaccattttgggtgtttccacccactctcgatcctcgttggtcgaagatcgatctgttagcccaagatatgtttccaagagggggggtgaattggaaattt

SEQ ID NO: 165018 - DNA, 1876 bp, Cannabis sativa
tttcagatgctccctatccagtaccctggtactggcaccaggtttcaagtggtagtcatagttggctagcttgtttgttctaggttataatacttctatgacaatatagggtctcttcctctctcattgggagtcttcaatgttgctttcttggttaacatctttagaagactcaaaggacacatcttcactgctgctcccatgctcctgatacttgttggaaataaaggaagaatgttcgtcactaccccttgtcccgagatgtcttgggaagtaggggagattcttcatcaatgcctatctgctcgagatcatcttgagaaacaacatgggattcatcgtcactgtctctcttctcaatctcatcttgggaagcagaagaggaatttgtttcaatggaggcattcgatgttgactcttcttccctttcatggtcaatgttcattcgagactcaagaaatggataagcagtgtaattggttgcttctagttgagaagctcctctggccttcttgatggtctcttcaagcttgatgaaagcatcaactttgtctagaaactcttgaatggtgtgtactggtttgagtttcaagtctttttagaatggactcattattgttagtctaactgtcatttccatgaacttgacatcttcactaagtatctttgtgtgcgtggtcacctctaagagttattgtaggcaatcctttagaggctcgtcttcttgttgcttaatgcatacaaaattcttgggctcgattatctatgccttaagagggagaattggtcattgaatgcttgctttagtgtctcccaagaatcgatagatctcagagaaatctggaaataccactgctgtgctacttttgatagtgtgcctcaaaagatttgacatcgagaatcgtctcgaatgctttgtaggtcaatttgtactttgaaattgtgcatgtgagagagaaggtcttctttaccagtgtatggatgctactggatttttaaacgtggaggagatctccaaagctttgatccgatctaagaggggtgaacgtctctcccattctagctcaaactcagttggctttgggttgtcatacttcttactaaggtgacaagagtatcaaattctgccctatagacatcacaggtggtgatgtgcatatcagttggccgttctcgacttatgttacttcgcaagttcttttgtcttccaagtcgatcaaagtatttggttgacttgggtcttgtggttatgggctggtcgtgtggccttgttggcaactgtggggatttatcccataaaatgatagagtcgtctcttgagtgtttatctcgtgagcggtttcttgtattattataccaactcttcctcagaatgacatgtgtggaggaaattgaattgattgctcaaggtcaacatatctccatgcacccatggaaagtattagtattggtggctatcaggacctcgggcaaagtctacttttggtgatgttttaggttatattaaatacttaatatttttcatttcgggtcttttggtatttatgtttctcggtctcataataaaattgttgataactgtgctagaatagaccttggattagataatgagaattgctaaaagatactattggtgcttagcactttcttcggtgtcatactacttttgatataattaagtattgaattccatataattgaaaaaaataatttttaaaaaatattattaacaaatcgtcaggtaaagtgctaaacaactattagttttgaatggttacttatttgtttaagggatattagcggctaaaccacctgaactttacggtttgtaacacttaaccacaaaaactgaaattttggcggctaaactacctaa

SEQ ID NO: 165019 - DNA, 2242 bp, Cannabis sativa
tataactatatagaaaatcttgagtatagtatagttgatctcagttattaattggattatgtttttaagttttggataatcatggattttttaccattaaccaaagaatagatctcaaaacataatatatctgcaacaataataactggtataataattatgcatacattatacacatatatatatacacacttatatatataggagctaaaaagaaaaaaagaaacaaagtacgtagggttcttttctgaccatggaaggataccatgctccccaccatgagtgggtccaaaaaaaaaaagaaaaaaactttatttattattctatattcccaaaatcaaatatataagagaaaatctcaaaaaaaaaaatatataaataagagaaaatgggtggtgtgatttttggtcaaatctatgtttaattattaatttaattcatgcacagcatcatttgaataaaccctacaagtcactgtgaggtgagtctcttctttattattattgtaaagattttcattcaatattattaataaaaaaaattaaccaactgacatatcaaatcttatctatttatatatatatatatatatattttataaatatatatagaacatagttgaggatagcaactacattttcacacacacacgtgagatgtgacacatatatatatatatatatacacattacatatatataaatgatttgcattgtgttaatgttaattaagaacataatgttgaacacttcttatatctttgttaagtgttatatacaaatatcaatataatatgaattcaatgccagttttggaaaaatatatatttatatatactatatttaattgcaaaaacagaaagctgtactattttttttaatgcataatataaatattaaggaatttaaatagattcgtctcaattttgtatttttctttaaaaaaataaaaaagagcattttgttatgtagttgtttgaatgtatttcgcttctaataattaattattaaaaattattcgatttttcaaaaatatagaagaaaaaaaaaagaaataagttttaatacatatatgacatataaatttaattgcaataaatataacttttttttcaaaaaaataacttaaaaatataaaataaattatcatagataagaaataataaaaatcatttttctaaaaaacttaaaaactcataaataaatttttacttctatataataaaaaccagtaatttagatgaaaaaaatagtttcttgataaaaaaaatcagtttcttgatgaagaaactagttaaaaataattttttttaagtcaatgaatcaaaaaatcagttactttcatgtaatcaaaactagtttctaaaaaactcgaccatcaactaccaaaatagtcattatccactaagacaaaaaaaaaatagaatgaaaatatttaccgaaattgttattatcatcaaaaaaactatcgaaaaattcgcatggaatagtcgttttagtctccagagttgtcgctagtgttgaatgttaaaattctcgtcagaattaggtgttagaatttaaaactgagaaacaagttaaatttatcaactagttaaaaatataacagtgagaaacaaattatgttgcaagttaaccaaattaaaaattaaatataataaccaattatgcaaaataacaaagcaataactacatacacaaaccgcaatccataataaagctaaaaaatataacaaaataccataaaaattagaccaaagttaaatttgttatatttaagcagaaaattttttaaaatcacatattaagtgtaaattcttcattttattattgatatttaaaggctataaaatgaatgcaatacaatttatgttgcaactcataaaatagtttataatatacatgagcttggttgaaagaaatctcctcatcatttttacctttggacatattttatatttctaacctaataggattacttcttttgaagtttccctctcaagtgagttcaaaacattaattaattaattaattaataaagggtgcatgcatgcatgtgaatgtgatcaactttctttttcacttttaaagcatcttcttcacacataagcatgcatgcgccagaaattggagaatatcaaggctctcttcttaacttgatgttcttttcaaaatcatcatactaattcttaatatataaatatatatatatttagaaaaatatataatttgaataaataata

SEQ ID NO: 165020 - DNA, 2445 bp, Cannabis sativa
agaaaataagttggaagcagctaggatttgctgggatgaaatgttggcaagaggattaaagccaaatgcttttacttttggagcttttgttagggcatatactaatgttggggacatggagatggctgacaagtattttaatgagatgctagcgtatggtctggtgtctaatgatgaagtttatgtagacttaattgatggacagtacacaaaaagggaaacttaactgaagctaacttagtactgatgcgtatgctagctggtggaattctcccagttgtacaaacatattgggttcttataaatggtctatcaaggaatgggaaagtgctagaagctctaagtatcttatcagaactttgtgagaaaggattgaatcctgatgtgtacatatgcaactctctcatcactaggttctacaaacaaggtgatgtagacatggctatgctgcttcttgatgagatgcacataaagggtgtaaatcctaacattatgacgtacaatgttttgattaatggattatgcaaggcaggtgatgttgaataagctaagaacctattcattagcattgaggaaaagggattgatccccaatagtgtgacatacgctacaatgatagatggttattgcaaattcggaaatgtagccgatgcattccaactatttcatgagatgccatcaaagggagtcccagcagatagttatgtttacaatgctcttcttgatggatgctgcaaagaaggaaaattgaaggaagcacaagagctttttcgagatatgttgcttaaaggctttgcctctacaatgtctttcaactcattgattgatggactctgtaaaaggaacagactagaagaagctaaccttttattggaagaaatgtctgaaaaacacatcttgcctgacaatgtaacatataggactctgatcatctattattgcaatgcccaaaacatgcaggaagcgaaacaacttttcttaaagatgcaagtaatgaatcttaccccaactattgtaacccttacatcacttctaaatggttacaacattataggagatagatctaaaattctttatctatatgaggagatgctagctaatgggattgagcttgacaaagtaacctattgtgtactaattgatgctcattgtaaagaaggggacataaaagaagctttaaggttgaaagatgagatgttaaagaagggtatacccatgagctttggcacatgtcatgctctaatacaaaccctctatgaagcagaagagtttctacaagcactaaacttccttaatgaaatcggagaggcagggcttagtctaagtctttctgcatgtagcatgataacttagtctaagtattgtatttctctcatttttttaaacagttagagcatttaatttctgatactaagaatattaagttttaaaataaaataaatatatgaaggcgtaaaaatcaaagaaaataaatgcaagtttaagtactctgcactctgacaggagcattctcctgaacaagtacggatggagcgtcatcatccgaagagtcttcctgctcctccaggacggcttttccttttccctccacaggggttgatcgccgagcaggcatgccaggttccctaatctggagagcatgctctatgggtgcttgctcggtcgggagagtcttcttcttcttgcgcgacctctcctgctctgaatattcttgagcatactgtttggctccagcaccacccttcaacttagcctcacgcttgagttgaatgagctcattctcttactcaactccctcagcctggctcggcctggacttcttccatttctccttcacggacttaggtacaaattctgccgggtaaaggtggtacttctcaaagttggcctttgtggtcaacaaagtgatattcggagctgcctctggcagttggggaattctctgggccctttccctaagcctcaatgtgaagggaggacggaagtatacggggatttgctgaaaccgagtatgagcagtctccataccggccacaaagtagtatttattaacaaaatacccaattttgccaaccttcgtattcacggtgcccatcagccacttgtcgtccagctgagagaagtagaagtaccctgacttgctctactttggggtagacttcaaattaaagagccagttgatttcgtgcagagacggcacaccccatccttgaatggcgtagaggacgaacagggcagataagtacttgattcccttgggtgtgaactgggtcggacaaaggtggaagtagtcgcaaacctgttaaagtacgggtgaaaaggcagcattgccccttatttcgtgtgggcacccgaccaggaacagtaccctgccttcagacttgttgcctggtgatttggagaagggaggaagcactcaagtctgcccagatacccagccttctc

SEQ ID NO: 165021 - DNA, 688 bp, Cannabis sativa
tttgagaacatgagtaaagaaagactattctcaagaaggtaccacctagcttagttaggaaaattactacacgctttatacatcatttcttaaatatgtggttataatatgttgatggcataggataagaggagtgacttattatcgcccttcaaataatgatagggtggcttcaccgcaagagcattttggggcagtttgtggtcgaaattggcagaaaggttgattaggctgaagacgatgtgtatctttaatcaacatggaaaccacatccaacatgattggtctgtcaatggaatgatcttgtacacataaaagaccaatgtgtatgcaccttattgcttctgctgcagaatacaactttgccaatgcatcatcaaccaagtctagttctctgctttcgttccacagttgccatgtctacgaaaaacaatcatttcttaccaaataaatgaccagttgaaaaactaactaataaatgtgaaattaggaaatggtagcatgaggttgggaacccacataagcaataaggcttagatcttgctcattggagtggaagctggagttcttcttcccactgattatttctaatagcatgatcccgaagctaaatacatcagatttttctgaaaatatcccacacatggcatattcaggagacatgtagcctctgcattagttgattgaa

SEQ ID NO: 165022 - DNA, 1313 bp, Cannabis sativa
cgcaaattcttaataccaatagcttaggcataatgtcctaatgccaataacttaggcgcaaagtcctaatgccaaaggcttaggcgcaaagtcctaatgccaatggcttaggcgcaaagtcctaatacgaatggtttaggcacaaagtcataatgccaacggcttaggcataaagtcctaatgccaattcaaagtcctaatgccaatggattaggcataaaatcttaacgccaatagcttaggcaccttgagaatagctaacacctccgaacttggcgcaaattctctctatgtcctaatgtcaatggcttagacacctttagaatagtcaatgcctacggggttagtgcaattctctccaagtcctaatcctgtcatggcttaggcacctagagaataagtacaagacctacaggcttggtttaattctccccatgtcctaacgccaccaaggcttgggaactttttagagtaaaaccaacgcctctgggcttggtctgattcacttcaagtgccaacgccgctagcacacttaattaaggaagtcgttcccattcaagactttgttttctgattgagattcttccacctcaggaataagagcaatgtcttcaggctttgtacaaatatctctcataccctaacgctcgatggacttgaacactagtgaatgagaccaatgtcctctaggttctatccaactgcttttttcgagagtcaccacaataatcacacatcctcaaagcaaagaagataagtcgtaaatcttcattgaccaaaggccgaataaagacttttaggctaaatgttgtccaaatttttgtcaaacaaggacaaatgatagtccactcactaactgacacaattgccaataaagttaatgtgatatgttaggaagctttcccaaaaaagttgaagagacaagacaagacaagctcatatgcctacaattattgctttatttatgtctcaatgtatttccttccatcaagtgaagcattttagatgaataaaagaaataattctcatgattgcctataaataggaccatgagatcctgtcaaattctagagagagaatttcatcttttctatctcaatacaaatgatttatgaattaagatttattaatacccaaccacgtaaaatatattgtcttctactcttttttcttaatttaatttctcttcaagtacaagaaaactttaactatgatgaataaattacatcaaaattgtttaaatatgattattgaaaaaagtatgtgttgtttagacaaaggacttaaggttttataagtcattagtgagctga

SEQ ID NO: 165023 - DNA, 1054 bp, Cannabis sativa
  modified_base (1009)..(1011): a, c, t, g, unknown or other
aaactcttttaagagttctcaacagagtaggaaagtgaagataaacctagaagacattgaagaagaggtgaattattggaaacctttactggtgtgttatgtccttggatccaatccaccattacacacccttgaaggatttgccaaaagaatttggaatgagaaagttgacaaagtgaaaatgatgtcctatggtatcttcattattagatttaactcaattgatagcagggattctgtgttgaatgggggttacatcttcttcaatagaagaccagtcataatgaaaccatgaaaaggaagatgtgaagaatgtgccaatttagattcatcttgaggacttagatctcaagtattggggtcagaaatctttgttcaaaattgttggacaaataggtaatccaataatggtaggtgttgtcactaataaaagagaatggctaagttatcctagcgtactaatagaggttagcttcgaccaagaattgcctggactagtggaatttgagagcgaatatggaatgaatacacatgttgttgttcagtatgaatggaagtccaatctgtgtaaacactgctttggtatgggtcacacgacagaggaatgcaagaaaaaaactcagacaaagcaggaaagggcaattaaagctgataaaaggaatgataaagctaaagaccagctggatgctgatggatttaaggcagtcactaatgggaaaagaaccagaagcaaggaggctcctccaggaactaaactagagaatgcttttagcattctggcaagtagtagtggagaacagcatggaatacaggaagaaccaatgaaggaaaaccaagctaatataagagttcggggagatccctctcttggaaatggattcctatgctggaatgttcggggggccaacaacactcaaaaacagaggttaattaaacaattcattcaggctcagggtgttggtttggtggggctcctcgagactgttggagattattttaccatgatctnnnatctactcacaagtatgttgatcaacaccctaaatatgaactt

SEQ ID NO: 165024 - DNA, 1673 bp, Cannabis sativa
  modified_base (76)..(90): a, c, t, g, unknown or other
  modified_base (1639)..(1647): a, c, t, g, unknown or other
atatataaatttttgattaaaaaaaatatccaataacattaaatgtcaaaactaatatttttctaatcttataatnnnnnnnnnnnnnnnatatttcaaaaataacaaattttgaaaagtcgatatggttagcaaatttaaaattctagctaagattatttttaagttttattaatatattaatatcaaaataagatttttttttcaaattttaataataaaagaagtaatatctgatcttataattaatataaataaaaaaaacaaaaaataatcagaaatttaaaaattaaccataagctagtttgttgagaaaaataaatttttaaattcaaaagctactaatatctaaacaaattttaattaattaaaaaattattaaaaattaattttattctgataattagatttttatttgaaaaaatgtattttacacaaaactttaccaaaatatgaatttgtttcacagaaaaatgattttttaataaaaaaatatcagaaattgaagattggacacaggggtgtgcaacgccctacgcgcgtgtttgtgcgcaaatgagcgtggcaaaagggctgcaagcagcctcgtgtgaccaagaattcttggtgtgactgaggttctaataagccttgtccaagaaagctcagacaagtccctatctgaatctcggtcatgaccgagtgaccactaggccatccgcgcgtgccaaattttggatattttcttccaaactcaaaaactcataactaattcataaaaatctaaattaagttttgtaaaaagcctaatcttataaatttttcatctactttccaaaaaaaaatactttcaggacgaaactcaaaatattttcatcgtaaattgtgattttcataaaatcatcaaatatgttcataaagcaacatgaacacatccaaatcaacacaaacattgttttaaatccatatttcatgaatgttaatcattaccatggatctaataccacttgttgggaattattctaccaagatctagatttactaccattatgttgtttaacatcctaaatattaatttttaaaaccaaggaatttaaaaacatataaagttcaagaaaccttacattggttgcagtggaattaaatgactccttccacttagatctctaacacttgtaaactttctgtcgcagagtattatcaagatctgagcctgattctcctttaggtgttgggttctttacaatgttacatactatgattgaatactaacttgctatgcatgggcatgtactctatcactataagggacaaaatttgaagaagaagagaaaggagaaggattcgaaaattagagagggagagatagtgatagagaagactcaagtttgcctgaaaggctagtgaaaaccagctgtcagttttgagtctattactatatatttatagggatcttattaggtttaggtttaaattatttgacattaaaaattgataattaaattgtaaaaagaccttaagtggccgggcattaggatgtgggctaccatttacaattttaccatttttctcaactctttatccttttctttaacaaatgccatattttttaattcaacaacttaaattaattattaaatgaaatttctgttgggttttnnnnnnnnnataaaactctttacaatctgattagt

SEQ ID NO: 165025 - DNA, 1952 bp, Cannabis sativa
  modified_base (1610)..(1615): a, c, t, g, unknown or other
aaaaagatggtattcttttcctgttaatacttataaagtttatttggaaagaattcccatacttcgattttgataattatagatattatgttgaggggaacatccccttcttcattgacgttttcatctgagttttcagactccatattcacatctagttatagggaaaaatatttggtagcatgggtcagaacaaaaatttgttttgctcggcatttgtctaataaaatccatgtttgtttcaaaaggaaaagcatcaggaaagaatctgacagcaaatattgtggacttacacaaaattatatcaagtgtgactgaatttgatcctttattctctcaggtgtctagcctgattacagagcttgcatctgcagcagcagccgaaaagaagctagtgtttgaagaagccatggaagagagattatgtgcttactcaagagctgtttctcacttccctacagcagttaaagaggtaaagaataaagggttgatacatttgtgtttctctattatatgagtttatacatatcataatttactgagtggtgagttttattttatggtctcagttcaaatggaggaacggttggttctattctctttctgaaaaggctattgctgaaggaaaacccgatccatgtcctctacatacagcttggctaaaagaattaaaagttatttagacattgaattttttgtatcccatacttttatgagtagtttacttacggagaatgcatatttatcttttaaaaaattgtgggaattcatattttgaaagtagaaaaaaaaaaaaataatttagcaaaccataagttgctgttcaaccaattctgttttccctttctacctttatttttcttttctaatgtgtcagcttaaaatttgatttgaaaaggattaataagtcattgtgtgattacggtttctcatgttcttctctgtgcaactgcaaatcattgcggtctgaggagcttcggcgccaccctcagcctgatgtttttctttctcttagaggttatgtgatctttagttctctaatctgtaacttggattatgctgttgattatatatttattttatcctactgttgattcttcgtacttattattatcgtacaaatctgaaagataatgtttataaatcctatatgagtactgctataagatatgtgttgttctataaataattagtgattttttataatatttatttaagtaaaataaattagattcaatattgagttgcactaataacgatattaaacctcgtagaagtattaggtaccatgagtgcgttttaatatttttcatcctatatttatagtcatacatgtaccatagctcctcttactataaataatgtatagtcatgggagagttattttctttctcttttttttttgttcataccttatacaaatttttgggaaacttttgataatttatgatgcagaaatcggaattgaagttcaaaaattatgagcatttttgatattgttttcaaaaagatgttcttagaaatgagaataaaaaacaattttttaagttttcaaaataaaaatcttgtttggctaatagttttaaaaaatattttttttatttttattnnnnnntttattttattttttaaaaaaacacttcaatattttgagactctgatataaataagacttgaacaagacctagacctggacccctaatccaaacctcagacctggcttggacccgaccccagtcccgaactcaaacctggccttgaacccgtacccgaccccagcttggccccaaaccccaaactccaaatctcagtccggcctcgaaccccgattcggactaaaaataaggagagaaagtgatgaaagagaaaatgatgtgtgaaaataatgagagaaaataaagagagagaaagtgtaaaaaaataatgtgaaaaaataattataaataattttt

SEQ ID NO: 165026 - DNA, 1091 bp, Cannabis sativa
tattattattattattaattacatagatagtaatgtcttgctgttaatttttgaccaagtctatcctcttctcaagttaggtttctttctttctcattttaattatgaactatatatgaagcaattttcgtaagtatatatacatacattcaaccaacacaagaacgtgaaaatattaattacaatacttaaattttgtgaatatagtcaatatcattttttttttctttcagaaatattatattattatttttacgggctacatgaaatataatcttaataatctctttcagatattaaaaaaaaaatcaacattttataatttattatgatcaaagtgaaaaatatgtaaattaatctctttcacaagcctttacaataaaataaaaaaaaatagtataatctaaatatacatttttttaattatttgaaacattacgtatatatttcactacaaaaaaattttatttataaaaaaattgtgactaattataatgagtattcttatagtgtgactaaaagattcgaggctaaatgtattagccgtaaaatcaaatttttttgtgattaaatgtatttttaatctcaatatttgttgtgactaaaattaaattagtgacaatttttatctaaatactatatagtcacaacttttttttgttactaaaagtcacatttagtcacaaaaatttatattgtgactaaaaaattatcactaaaaaattatatatttttgtagtgtttattgacttcgtttgttataaaaactcaagaagtttaatcgatgtaaagagtctcactttgctaatactggaaaagatagtaccatatataagatgtatgagctatactttcattgttaattgattttaaaataaaatctcatacatcttaccatacaatcaccttcatcttagtttttgtatctcacttttgtcacacttctaaattataacaaagcattaattctctgcatacaaatacaactccaacttgaatcattctcaaaaagttctcactgtcgagaccagggccggccctgggcataggcgggctaggcctgtgcctagggcccacctagtccaggggcc

SEQ ID NO: 165027 - DNA, 1015 bp, Cannabis sativa
gggtcccgccggtaataacttttagggacggaaaacaaagtttttaccaacaaacctccccgccggtaataacctaatttgttgtagtgttataaattgcaagtatctcaatataattatttaaagttgattctttgaaaactttgttggaaaaatttaatatactttatgtatcaagtataatattgcaatattttgaaaccatttagtatatttactttaacaaaatagatacataaaagtaaacattttttaaatattaaatatttgaagtgttttttactctattaattaattctatgtaaaaaaatttatattatatatgtttaaaaaattttctttctactttaaatttatataattcatgtcattaaggttgatactgttaacaactaaagtttgttctgttttgttttaatgttagtcagttgttggttaaaggtaggtagtagttactttctgttagttgttatattgtaacaaactctcagtacaaataaaggtaaggtctaatccttgattaacttttgctgtgctaatcttggtttataccaattttcttttactctgctttcttgctctgtttttttctttctagtttgtattcttacatggtatcattcgtcaatgtcgtcttctacagctgatcctgcacctgcaataataactactgccactactactgctgctcctcctactcaatcctggaatccgttctctaattccctcaagtcatcccatccattattggccatgacctccatgaaatactcttcactggagttcctccaccccagcatcttgtcaatggtgccccgaacccagagaatgctcaatggagaagaaaggatcaactcctcctttcctggttacgattgtcgatgacataatccattcttgcatctgttgcgaactataacagctcctttgatgtctggcctgccctagaacaaaagtttgctagccaaactaaggcttgactgttgggttttgtgccctaaataaaacccattac

SEQ ID NO: 165028 - DNA, 1110 bp, Cannabis sativa
tggatggtttcatgatggtttatacttatttgatgattgtacggaaatcgcaatgtatattgtaaaatatttttggtttcattctggacatagttttactagaaagtagacgaaaaattaatgaattaaggcttttacagaattcaatttgaattttttatgaattagttacgattttttgaatttggataaaaatatctaaatttgggttgcacacacgcgcgcgcacgaggtgcaacactcggcatgagtgttgtacaccctctatatcgtaagccgtgtaatagtcctttgaaatgagtgttgtaaaccctctatatcgtaatccgtgtaatagtcctctaaatctagatcttggtaaaatatattccaacagggattagcaagttgaatgtggaagtcctctgaaatgagtgttgtacaccctctatatcataagccgtgtaatagtcctggatgtagcccccaatttttgtcaccttgggctcattggttgtgcccaaccacatatagcccagttggttgatgtagaagtatcctgtccaaatctgaccaaagttagacttcagatcaaagtaccaactgatctcgaatggggaaggtgcggccagtctatcttgaaatataacacgaaaagggcaaataagtacttgatccccgtcggagtcaactccactagatagatcccaaagtagttgcctatgttttggatgtaaggatgaaaaggcagcatcgccccttgttctacgtggggtctagagcacgccatccaacactcgggaggagcatgggaaagatacaacactgaggtcaagtcagtgtggacgtccccaattagccccctactttggaggtttctaaaccttatcggattaagctcagatggaggagattcccaggtagctccatgttctcaaaattcgtaaactatacgctagtgtatgtgtaacacccgtattttataataataaactcgtaaattaattttaataatttatatattaataatcatatggatcgggatcccgagtgtcaaaatacaagttaaaagtaatttacttctatatacatatatatattttttttaagtttagtggacatgcatcctca

SEQ ID NO: 165029 - DNA, 635 bp, Cannabis sativa
cagtagaatcatgaccccaaatcagtttatcacaagaagaatttggtgggcaaggaattgaaagaatggctgaagcttcatcagagaaaaaaagaccatgaatcacatccacatcccaaccacccaaatcgtaccgcaaacaatccaccgtgctaacaactctgagcaaattcaaagacaaaacagagaagccatcagtcaaaggaatccaattgtcttcataaataaaaatatctctatcatatctaactctccaaattgccttgcatcagataattcattttctcataaaatattcttccaaacagaaaaatctcttttggaagacttgattgtcaaggtctatttctatgatacaaacttttcaaaactcagagccgccaaggaagaaggatcttgataaagcctcaaagcttgtttagccaataaggcttgattgaaaagttgtgaatctcgaaactccattccactattatccttgtgccgacacaatattttctctcatttgcaccagtgcgtttttatcttacatcatcaccttgttagacatttatatgtataaactgaaacatacatgattatgaataaagtgcggaattaataaatcatatatgcactataatttaaggatcgaa

SEQ ID NO: 165030 - DNA, 632 bp, Cannabis sativa
tgttggacagggcgttacatttactaagttctagggtgaacccttgcccgccctaacaccatccccagaccctggacccaaacccagacccccaggatgtcagaccctggactcgaacccgaaccccaaacccggacttgaacctgtaccacgaacccggacgcaaacttgaactcagacccaaaagttgaacttggacccagacctagagttggactcgtaccttggattcggacctgaacctgacccagactcaaccccaacccagaccccgaccccgaccaagatccaaccccgaaccctgacccggaccccaaaccccgactcgaacctgaactttggactcggatcctgaatctcgactcggacccgaaccttgaactcggacactactacaaaaaagagtattcatgacagttttaaaaacgcttgttttagggaaccgtcactaaaaaaattaagtgagtgtttaaaactgtcgggaaaaataggatattctcgacaattttaaactgtcggaaggtataggcgacgttttttaaacgtgtcttaaaagggaatggcttacggttttaaaccgtaggcaattctcatgcttcaattttacgcgtttcggatctgaaatgtcattt

SEQ ID NO: 165031 - DNA, 2190 bp, Cannabis sativa
caaaagtaaaacagtgtgttacacgcatatttcttttaatttatacgtgtgtaaagtaaattatttgagtactgctttttatattttaaattattctaaattttttaaaatttaataaataccttaaataactataagtttataacatatattaacataaaataattagagtaaatttttttctttgaatgctgaaataatagaacttccattagtgcacatttttataaggtgcacttagaagcttccattaatacatattttgaaaaatatcaattgcaactcaaaatattatattatttcagtatatcttctatatgtatattatttcatctactttaacatttaagagtgtattttagtctaattttattttttttataattgtatacattataattatttagaattgttgtaattttttgaaaaaaaaaataaaaaatttaaagtgccaaaaataaaattttaaaattctttgttaaatgaattattagtttttttttaacacagaataataattattttaagtttactcttatgtattttaagtaaataaataaggtcaatcctatggtctctcatgggacgaagtcctttacgtgtgagattcatattttaggcaagtgatagttgttgaattatataggaatcttgtacttgtttaactttttacttgatataaccggttaggtgaaactagttgaaatatataatgaaattaaaaagaatcaatttttattatatttttgtgtttgattgtattttaaaatgttgtaaattcattctaacatttatttattttatttatttattttttaaaggaaaacatggtaatactattaaattagatcaattgttatgggagtacataaaaatttaggacaagcatttgtctaaatacctcgtccccacaccttgcacaaatcggctgaactagtatatttcgtttaataagttgagagtgtgctcgataatacatccaacacacaaagattttaaccttctgtggcaccctcaaattcaaacaccattccaccaagctcaaattcaaggttgagcaccccttattctcattcaccaaatctaaaaccgtgaatatccactcctcatagaataataaccatgtgaattgtagtgccaacaccaaccatcccacaacactcacttgccaaagaaataccaagaatgacattaacatccatcaacaagaacacctgtaataacgccgtaatattccacacaccacctgttgtactaaattcttgaaccaaccaatcaacctctggcctcgaagtgatgggacgaaatgttctaggcctaggaagccatggatctctaaaagcgacaatactagttccatccccaacggtcttcctcaaccccttacgcaaaagctcaagcccccaaatcaaactcgaccataaatgagatgaccaatttcaatccttcgccgccaaaatagatgaatgaggaaaatatttatgcttcaacacccaaccaggcaacgaatcaggatcccaaagtaatctccacacttgcttggccaccatagcttgatgaaataattccaaatccttgaaccccaattctcctttcgattttagttgacaaactgtttaccaattcacccaagcaatcttcctcttgtcactttttgtaccccataactgtaaaataataaaatcttataatttaaaagtgcagtacataatataatgggtaatatataattaatatatcaatttttactactgcatattgtgtcatttaaaaaaataaaaaatttaaacaaaatgtgttaaaaaaaaataaactaaatatatgtatctaaactacaaagcaacatacatacaactaaaaaattgttagaaagaatttaaaatatacaccataaaaaatacacattaaaaaacaactaaaaaaataattgttgaaccaacaaatattctgaaaactacttaaaaataattgaaaaaataataaaataaatgcacatatatacaacaaaaaatgtgtggaataaactaaaaatatacaccataaaaaatgcacataaactaaataacaaatgtgcaaaaaaaaacataaaaataactgttgcccctgattttgcccaatatacatggaccaaccggacaaggacacgtggatcaaacagcttaacaattaaattatttgctaagtctttat

SEQ ID NO: 165032 - DNA, 837 bp, Cannabis sativa
attattattattattatatacaactaattaatttaaattttatttgcaacatctttatttaaatttttttaaaaaaagcgagatatatgttaacttcactcaaaagataaaaaaaaaaaataacaactccattgtgcaaagccaaaagtaatgccctcattgttaaagtaagaccgataaagtagattagacatgataacacgattcaaaaactgtacgagagttagtgggtttgagtttaccttaaatgtgttcggatcgtgttcgggttaatttgttgataagagtcttttaggctctaaaattattgatttctccataattagatgatgtttttagtgttttttatcatttttttttaaattattcaggttttggaaaaaaattgatttttatgagtaaaaattaataaatttagtatttttaagactaggtgatgttagcagataaaaagacacactaagataatgtttttctagagtttcaaaagtccatgaagactcaaaactcgtggggtgaaggttcgctacagcgagcaaaaaaagaaaaaaaaaagaaaaaaaagtgtctggcagctctgtcgccacggcgagccatcctgtggccgcagcgaggaggtggttactgggcagaattcgaattttatatattttttaagagagatatcttttttatttttaagcattataaataggacttctagggtacgaatttcagaaccttttagctacgaaattgagatagaaactaagagagagaataagaaaaagatgagagtgcgacttcgagtgttcttcatcatagttctttttttttttctccttaaactcttactat

SEQ ID NO: 165033 - DNA, 738 bp, Cannabis sativa
tgtagaaaaaaattaaaatattgttggtttatcatcttcatagtctgatcattagtcgtcgtcattatatctaacatgttgtcatgaccgaacctcacttgtagtaactgttatgtctagataaatcattatacaatattgaatctataatttttttttttaaaaaaaaactcactatacaatatttgtaattgtactttgtacttaatttattttaaaaaataaattgaagggaaattaatataaaaacgtactagaatatatttatatatatatattttgataaaaatgatagttatattaatcatgtaaaaaaatggtgctatactttagagaaggtaacttgcctaataaaaaaaataaattaacaaatgaataagagatttcgaaaaaaaaaaaatagtgtagcatagagaaaaaaattagtgtgtattataatagagtatatagtataatattatgtgttaattaggaataatatttttagtttgttgtttttaaatattttattggtatatagattcttttttcataatgttttattgtatatatagatataatttaaatgcatatttgataaaaattagaaaaaataattaaaaaatgagaaaaatacgacgttaccaccatttttcttatggattttttatactaaaaatatctatctatatatatatatatgggtatgctcttaatgagtattacccatgtatagatattttattcttgaccattaga

SEQ ID NO: 165034 - DNA, 1709 bp, Cannabis sativa
ctccccagtgtacttcgagccagtacacccagctttggtaggtagagtctcaagtgcttggctcgaagagtcagcagcctgatttgccgtgggaatgggctcttcaatatgtgtgggggtcagaggatgggtctgagcctgagtctcagtcttagggaccttgagatcaacagcctaggaggctcgcttcttgttggcaattgtcttcttgggccttttaagaggctccactttgacatctgataaagtctccgaggcagtcaaccttctcttttccttctttcctaaagattgaaagaggtcctcgagattcatttctggaagacaaaacaatgtattaacatttgtttgaaaataagtaaaaggggaagttgggacataatttctggcctaagggatttaccataatcataagaagacgaggtagaaggactacaatattcactaaagtctctacatcctgccatcctaaatatgtcataggggttaattggttctaaatcccagctcgcatctatatgacctgccctatccagcatggtcctatactgctcggctatcccataatacgagtcaatacaactaatttggatggagggaattccaggtgtataaattataacagctatctcgaaaagacagtaaagtagtatgctcggccctaagcactatgggtgaccaaccacattgattacctcgggatgctcctttttagcttcctgagggactgcattttggaggtagtgtgcctgagccacataatcctgagattcctcattggctgggatcgaaacctactaccaagaagaatacttgtgaaatttgtaatcacaagtaaactcctgctcggtgaggagatccacggacctgaggttaaccttgttcaagaggaactcagctgattggagaccgtatggaagacctagtaggagcctgcatcgttcagccatctcaggtgtaggggtgggtcttttcaagacagctgtcaaaaaaaaaaaagcaaaattaaagtcagcaaaactagaattaaagacatggaataatttaaccaagtcttaggcaacgtataattcgaaaagtggttgtgtggattggggagagaccagttgtccagaaaaagtcctctttgaagggggtcttgtttggcaacccaacaatgatcttatcgtcgcctgtgtgagtcctgagataataaaaacctccctatagcattcttcctcgcagggactgccttcaccgagtagaggtattctatttccatgggtgtggggcactcccagtttaaaattttgtactgaaccttcaaacttgcgaggatcttgtatgaaataggaaccaactggaatggggcaattccaagatagttgaggaagtccttaaagtagtctcgcaaggggataattgctccagccctgatgtgttcgaggctcaaagcacctatccctatcaacccactcatactggcctcaccactggtcccctcagatgtttcgcgagtaagtcgttctggtggataacaactaaactcgcaaacagctaccgatctaacccgacagtttctcttgtattcgataccacaggtctttaagatggtacctacatagtctccaatggctcaaaccttcgactcgattagttcagcctcagaggtgacattagggtcctggggagtctttgatttatgtggcttggaggtcatgatttcaaaa

SEQ ID NO: 165035 - DNA, 2461 bp, Cannabis sativa
aaaaaaagccatatctctagaaatttaccacactattcaaccggattatatttctctgctctgtcaaaagagagaggatttggtttgccctatcccttatttgcaaagtagagatagagcgtcgaaagaatggcatcgaccagaatttgtagtgcctgatcctacagaggccatacgcaataaagtactttttggcatacccaccgacctttgacatggttgtgcaattagtgtcacccaaccattggtgactgatctaactaaaacaaaaatatccagtcctgttctacttcaacatagatttcagatcaaagaagtatccgatctcgtagggggtaggctgaggccagcctagctccctatataagacgaacattgtcgatagatacttgatgcttttaggcataagttgtttcagacacattccaaagtaagcagtgatgtccaaaaaatattaataaagcggtagcactgctccacgttcaatatggcattcagaccatgccaaccaacgtagaagaagtcggtgcacccagtaatttctacggggaatcttgcagtagacatcccctactaagccactagcaagaatcttgctaaaggcttcatcagaaagattagaagcaggagagacccaactaactccctgtggtcttgagtctagtatctccagcttaggagactgctctaggttatgatccagttcaaactttgaaggctcatcgagcttgctcagtggattaccatgagcctcatagcgacctaggggataatctgggaggacagaacaagtcctgtaacttctcctcctcctatacactagtccagcctcctctagatcggattcagcatccaaactctttgctccttggccaatctctatctcagcatcagcatggggctgagcggtctcctccaccactctagcttaccccttgtggccaccctagccacatggggatcatatggaggcgccctatggagggtctatttcgttctagccataaatgcgaagtaaatgagggacctacgcggctgtcacctcccttattcaacacctagtggtacctacatggaagaaataaggagaggtgagcaacctaacgaagttaagaacacattcaagtaaatagtacccaatggtatcttctaggtaaaacacaatgtacaaggtcaatcattgaccaagtaccgtcttaagtacacctactaagacatatagtaagtcttaagctatataattgactgtaatggactcactacctagtcttatacagagtttccaagagaaaccatgcataaggccatagttgtatatgcctccaacacaagaacctagccaaggtcaaaagagggagaaaacctggctgcccagttggagccttggccttagccgactagagttccaggccttagtggctggccagaccccaagacctagtatagtggtcgaccaggaatcctaattctaggcataggtcgccaacctaggggtacaaccccttgggctggccagaccccttgacaatcacccttggtcagaaaaacctcaaacaaggcctccttggccagccagggtctacatggatcaaaacttgtgttttttcaagaacttaaacatgttcttcacgactcaaagagccaagaatcacaataaaggtcaaattcatatcttttttgtctagaaatcacacattatgtatcctaaggctatcatgcggatcaaaataccgaaaggataacaatctaacgtaagaatcaagacatgttcaaagcaagaaatagtgttcatgcatccatggcaaaatcaaccaaatcaagtgaagatagcaggaatagaaagtttacccattgcaagatgtcgttgaagaagaaggtgggaagctcagatcatcgaaacagcgcaaaactctcaggaagataaagcttgtgggttcgaccttttaaagagaaggaaaagcttttctaaagcaagtttctagtgagagaaagtgaaaagtaaaaagtgagaagtgaaaaaaggttttccctccaaaaaacacttatgtaaagttgtttttaaccagccatgagtataggaactgtttctgaccagccatgagtataggatttggacgaagaatgtacatgtttgggccacactaggccaagcgggttggggtctaccagtgatgtattttgtgactctgttttgctgcttaggtcggccaatggaaaaggacttgtaatagtattttgtaattatttttgggatcccgacttttgtaacttttagtttataaagtttaaattattacaagtttattttcattccgtttattattaaagtttatttttcgcgctaattgtattagtaatcccgtttaggggattagggtttcttaagtgtattgggtaatgtgcctaatcatttagggtgttacaatttggtatcagagcgccaaggtttttaaacttcctg

SEQ ID NO: 165036 - DNA, 676 bp, Cannabis sativa
atggccaaaaatctggaatataatctcatcattctaatcattacctaaagaaacatcggcaataatagtagaaatcgtgtaccttcttgaccgaatttgttgcattaggtatgagaattcctggtattccatctaaggtatccacggctgcctccataaattgatggatatccccgaggcagctatagacatcgaacctttgaaaagaatatcccttgactccagaatacccttccattgacgagagtcgctgcttttaggacttacaacccagaagctatcatattttcagtatttattcagcaagcaagcaacccaaggcttctctttgtttgttgcctggtaccaggccaactttgtcaacaatgccttattcatatcctcgcaccttcgcaggcccaagccccccaaagctttcagagtacagatctgatcccaagccttaagagccaagaatctatccttctcaacatttccaagccaccaatatttcctcatcaaggcatcttgttggcgacaacaggataaggggattttgtttgtagacatagcatagaccggcattgtaacgccctgaccctcagtgacgccacgtgtgtgcttttataaacttattatcactaatctataaattttagaaaagtgtggtttaatttaaatctttaattaaattcaa

SEQ ID NO: 165037 - DNA, 1410 bp, Cannabis sativa
tatgtaggaatgtagaagtttaggctagaatatacattgtatattgtatatataagggtataaagctgaaaactaaataaactgaaaagtgtggcactacgaatattaataaactgattagtgtttattagacataatacaagagaatgagagatgttattatatcgagaaaccaataaaaaagtgaattaggagcagggtagtagaggtcaatacattggtcttccttaaacaagcttattatattcaaaatggagtgtttgaacatgctttagtatgaatttaagattatgttttatgagagacttgctgtgtttcattagtatagacactgaggaaaagagggtaattagctttcaatatttctgatttatatcatttgaagatgaaaagttaagatataagcaatctaaagaagtagaaactttttgattttgaaagaaataaactaatctgaagtatcgtgggctaacaagaaacacatgatctaaatcagcaaaaatcttagctccgtgtatctacccattgtacactcatgcatttacacattagattgcttatagaaacctagagtgattagcaagcacacttaaaagaattaaatacaaattttaactcaaagtgtgtgaaaagtatttgttggattttagacttgggggctcattaaactcacttgaatatgttaggtatatgatataaatactcagtcaacttgaatttttgatgaaaattgagttcatatagtgttagggagaaaaatagccgtttatagctattggacgcgaaaaacgagactgccattgggcaaactggttgccaactggtaaactggtttcaggtgaaccggttaaccttttgggaaccggttaaccggattcctggaagtggcgaaaagtccaagtaaaatgatatgtgatttagaaagtcaatcaaatttttttttaaaccattgggtgagaaaacttgtcacacaagttagtgggccaaaatttgaacttataaaccttagtgtattgtgcaaatcactttaacaagactaaagtaaacttatactatttgattgtgtgtagtccttatgtagatgagtttcgtagcttaatttgcatgttatgatccaaagttaacttttccctgagagttgactttgacttttgggtagacttttgactttgagcttttgaagtcttcttttgaatagggtcttgaattcttgatcccttaatgaattttttgcttttatcaagtatgaagtagttgatatatttgttgaatccacttcgggtcatttttgagaatttttggtaaaattaccattttacccttggagttaattttgccttagaaaaatttattttaccttttaattgtgctacaaaatcaacaaactattagtaacaaataataatcaaa

SEQ ID NO: 165038 - DNA, 788 bp, Cannabis sativa
  modified_base (145)..(145): a, c, t, g, unknown or other
  modified_base (183)..(183): a, c, t, g, unknown or other
caagtatgattaaaatggaacaatttttttctcaacaaaacacaatataccacctagtataaattgaagcagtaaaaaagtaacaaatagtgtgcaacaataaaattagaaaaaatagtaccgggtgtaaatttttttttttttnaaaaaaaaaaaaattacacaatacacttcaaattcaanttacacaatacacttcaaattcaaaatcagaaatttttttaaatatagttttacgaattttttcatctatatttatatggattctatttttttttatagatttttactcttttttcagaaaaaaaaaatattatttttacgttactttcctgtaatagcaacttaaaatataatgttgttctgctggagataaatcttgctgcaaaagactcagattccattctttactaatagttatatatgtggaaacttgagtaaagatcgtttcatggaatccatggatcgattccactccaaatatgatcaccatcacccacttttaaccgcattccctgcattaataaatcacaaccccaacaaattccttgccaagttagtgaagacatgcctccactcttggcagccaagaaatcattgttagaaaaatacatcccttttaataaacgactaagaagagaattgggatattgaatatttctttaagcttgttttgctagcaaagcttggttaaagtgaaaaaaaaaatgatctaaaccccattccaccatctattttagttttacagagaaatttctattttttccaatgagtcttcttcttatatg

SEQ ID NO: 165039 - DNA, 2293 bp, Cannabis sativa
  modified_base (2247)..(2249): a, c, t, g, unknown or other
tggcaaccttttcggttccaatgatcctatatgactgatcattttccattagagctttacctctgtcaattgatttataatcaaaaaacaattctcgtctcggacacgtatgatacatgcatttggagtcaagaatccactctctgttcattaaaaattttgagatggagaaaaattctctatccgttgagcagtcatcactatcttccgcgactgcagctgaatccttcatgtggtgatgatgcctattctccttcctatctccattgtgagatttattgaaaccttgttgctccttttacttcttgaaataactttgcaagtgtccaaatcttccatagaagtaacactttcaagtttccttctttctagactttgatcttgattgagtatgatggtgtttactcttcggacttacttttttgggtgatctccctcttgccaaatatacttcttacttcttggattttttttacaattgtaattcaaaatccttcgatttgagtgcggtaagaacatcctccaacacaattacatctctgtcatatttgatggtagctttgactttttgatatgtgattgggagagatctcaacaaaatgatgctctggctttcttcatcaaccttatgatttatattagccaatcctacaataatctcattaaaactgtcaataatatcatctaaagaaagagaagaaatcattctaaaactatataaattttctagcaaattaatcttgctagtaattgatggcttcatgtagaattcttcaagctgttccaaatcctttagccatcttttctgcgacaaactttctcctcacactgttggacatatacatgaagatcgtgtaataagccatctcttccatttctgctttttcatctagtttcttttaagccaataatttctcatctccaataactttggagaccttctgatgaacttaggagtatcatctaccatgagtggatgattcaaatttgttttcaaggagggtgtttttttgagtttttttattacaaggctctcaatgagtacactaaactgttaacacagattttcgttaactaataaataagtcttttctgtaataaatgatctccataattaataaaataacaatattaataatagtaataatgacaataagtgacaagaaggtttttacgtggtttgaagttaaatcttcatagtccacgagtccatcttattctgggttgataaattgtatactataatacaattaagtgttttacaaaatgaataatagagaaaatattatctctttttccaaaaaaaaatgatcgatcctttgtttcttgggttctgtccctatttatataggagtctaggataacatttatttccttgagatcttatcacttgtaaccgttcataaaatgtagataatccccacatttcatatttatgcacacgagaaaattataaataaccgcataattactttttgtctttatttatagacggttatgctgactatgcttcatacttctcacaattcattaatacttttctagacactttatcgtaagccagcatttatgtgtatgttgtagtacatctctcgctcttccattaatgttgagtgaggtatacgcgagatgcttattacatcctgacaagagcgaaatgaatcatattgaagttgtctttattcacggacatgtgagtcaatgagctacaaaactcattatctacccgttccaaataattttataatgtattatgcttatcccgagatggatttattcatctcgctggtccgatcagtcggcacatagttattactcatatctctctattacttacatgatggtgagtttgagtatttctgtcaaatgtatttcctgaggcgattcatctgaatgcatttattgatgcttaatttgagctggtttgtattccagctatgttacacgtgtcaacaccatattgctgctagaaatatgaatataacaatacttaaaataaaaattaattacaaaataccttaaaaaatcttaattacaaactaattagttgcattttaataaaaaaaattattttatattatataatttgagatatattttagttacctccaaaaattatctatatacatcttaataatcaattaattattctgttatcgcaatatataaccaagattttttgaaatgcaatatagagtagaacctctatctaagaatactctattcaagaataacctctaaattgtnnnaaaaaaatcaagtctcaatttaggtcaattataaataagaataa

SEQ ID NO: 165040 - DNA, 1846 bp, Cannabis sativa
ttttttttttttttttgacttgaggatggaaaattcgaacttgagactttttcttcgtgaaaagaagtgtggaactactaaactatgtctataactacacttgttacaatcttagtttaactaattaatataataataacaaaaaaataacagtttttttttttagcaacaagaaacatagttgttgaactaaaacttgggttttcatgcctcagttatgtgataaaattaagaaaaaaagagttgtcatataacgggacaaaccctcttgagagataagtaataataacaattaaaaaggtcaatggaatttaggcaaaaattaaaaaataaaaataaaaatagaaaaagtgagtaatatggcttttgagacttagagagacaaaatctcaaggtactctcgtaaaagattcacaccctaattagaatcatacattgtccattctcatatattcctaaagatgtatgttctctacaagaagagacaaaaatcaacccttctcaatattttttttcttttgatagaacaacccttctcatttttcatcccatactatattgacacataaaagagaattaaaaatttaaagcccacaacttaaaaatttactttgtctattcccactaaatttatcaaaactcagtagtcattaggtcagtaagattatgaaccaaattaaactttatgtacttgaaatttttttgtctatttttggagagtggatgaaatggatgcatgcatgaataacaccaagttgagaagcagcaaatccggaatttgcatgtgctactaacatggtaggaccattaatcactaattacttcatcaatatccaaatttgtatacttctttctcttttatctctaattcaattgtctatcaaatcaaagattgtctctaaatttgaaaaagaaaaataaccctttaattaaatttgcaacaggttaattaaggcttctttgctatgatggaaccaacgatattagtcatcatctaaggtccattatttaatttaagtacacaacaacagcaataagtcataatttaaatatatgagatttgacaacaacatatatataatacaacaatctatgtatctcttttgaaatgaaataataatttagaatgaaaaaacacttcacttaattataattaaattctctaattggacatgtgcaatgattggtctttatttattatttaattttttgtgctgtttccatttttttggtcctcagaaataaataatgcatttgagaaattagaatgcaaccattttcacttcaatattattatttttaagggaaattctattaaagaaaatatattgagaaatgaaaaaggacaactatcagattccagaattagtacatgttagatttcaaacttgtgacaaccgacatagaacagatttgccaaacgtgctatttttatgaaccttcaatatttgtatccaacttaaaagagagagtgaataattggcatgcatcatgtgtacataatttgactgatataaattctgttgggatgtattgccttgcattatataatattatttaatggtttgataattacatgtactattagattatgtaaaattatactatcttgactataaatttacacttagattcggatctaggttttagtttatttctgttggaacttaatctaggtctcaatttttgttgaaacttattttaccatgatctagattttttaacatgtaaattagattaacaccctaaatatgaattctctaaaataatgaagtaaacacatataaagtttagaaaaccttacattgatggcagcagaattatatgactctttccgctcagatct

SEQ ID NO: 165041 - DNA, 822 bp, Cannabis sativa
cgaccccaactcttaagataatcataaaccctttcaaaagaaaataaaaatctcacctttatttttctgggtaaatttttttgattgaaaagagtgaaagaaaaagttgagaattatgagaaaaccccatctgggtttctgggattctgtcgttttgagtcttttttatgtcgttttgttgttctcttttggagttgagtctcagtccaatgtcgacggaaaagccatggaagctcttaagaagagtataggtaagaacagtcttgcttggggtgactctgtttactgtaaatgggaaaaggtttcttgttcaaacgctggtcgagttcagaagatccaactcgggaatcagaacttgggtgaaactctcccgccggaactttctcagttgacggagttacagcattttgaggtccaaactaaccaacttaccggtgagtttccgaacttttctgggttgggttcgttacagattttacttgctcataacaacaatttcagttccattcccgaagatttcttcaacggcttaacctctcttgatactataaacatcgattacatacccttttcaccatggtcgattccagagggtattcaaaacgcttctttgcttagagatttctctgccaacagtgctaatatcgttggaaagattccacctttctttggtggaaccacttttcctggcttgactaatctccgtttggcttttaacaatcttgaaggagaattacccaagagtttctcaggttcgagtattcagtcactttggatgggaggcgggagagaaagagggctggaatcgagggctggaatcga

SEQ ID NO: 165042 - DNA, 1868 bp, Cannabis sativa
tcggaccccccgggaattccttggtttctttttggagtttatggtcccccaagacatgaagacaaagaagccttctggctttctttaggagatgcggccctcactatgaatgatcctttactgataattggggatttgaacggtacacatcaagattctgaatgcctaaattatgtcaattctagtaactcatctcggtatgcttttgatctgcggcgtatggtgaatagagtgggtcttgtggacctaggatatcaaggtccgggtttcacttgggttaagggatctagccgtagtatgaatactggaagaaactacatcaaaagggcaagacttgatagaggactggccacgacagattggagaattcagttccccaatgctatagtagaacacctttcggccgcagtctccgatcataggccgatcctactcgatactactggtggaattcgatgtcgaagccggcttttcaagtacgaaaatatgtgggctcgggacaaacgttgcttttgggtggtcaaagaggcttgggctaagcgccttcaccataaccctcttgttaacttccacagaaaagtcaagcaaacaagccagaaactcaactactggaataagacacaattcagaaatatacaaaatcaagtctccctaaaaagagcagccctgcaagaagtggagaaccgacaccaagacgatcttctcgccatcgatctggcaaaaaatgatctaaacgaagctctccttagggaagagattcactggaagcagaaatcaagggttcagtggctgcaagagggagacaaatgcactaaattctttatggcttctacagccataagaaggagaagaaactatatccaatgtattaaaaggagtgatgatgggatttggataagagaaccgaaggaaattgccaaagtttttattgataacttctcccaactgttcactcaaaatgctctctcaagtatgccctcctcgaacagaatttttaatccctgcatctcagcacaggaaagctgcgatctcacctccatcccctcggttgaagaaataactgctgccctgaatgagatgggtagtgacaaggccccaggcccggatggtctccctcctagcttctactcgcatcattgggacactgtgaaagaagacgtgattgagatggtgtcctatttctttaaccatggttctctaccgcatttcatcaatgacacctccttcgtcctcatccccaagaaagaaggccctacatacaccaaagattaccgacccatagcattatgcaatgtttcctacaaactgatttcaaagattcttgctaatcgaatgagatcactgcttccaaggatagtctctcccaaccaaacggcttttgtcaagggccgaagcattacagaaaacacaatgattgcaagggaaattgtccactcaatgaagaagaaacgaggctcgagaggcttcatgatgataaaaattgatatggagaaggcctatgacaagttggattggaactttttaattcaagtcctctcctctctcggattccctactcagttcctaaattggattaaggcttgcatcatagtgaaggagattaagctgcttctcaatggttcaataatgagaaaattcaaacctacatgcgggctacggcaaggggatccgctatctcccaccctttttatcttggcggcagaaacactttcgagactattctttgaaatggagaataagaaccggattaagggctttagaatgggaagacaaggagattcggttacccaccttatgtttgcggatgacatcatcctgtttggacaagctactctgaaggaagccaaagcgtttatggattgtctcaa

SEQ ID NO: 165043 - DNA, 1706 bp, Cannabis sativa
aaaataatttccaacatggtcttcaacgagtgcctttagtctgtgatcttggaagctcgtatatgttaccagatgcactaagacttaagctcacgtggagacttcactcaatgaggagttggttaagttagttatttccctaactaacttaacaaccttatttcttgcagccatcgactttagaatcttgatcctaagcctataaataccatcttagcttgtcattcagaacacggttcaaatcaacattgagaggtagagagagagagaggtacatagaaaagggagagattagatttggattttgtaagaaaaatcttctgtagatgaagaagattcttgggtaagatcgtgagaatagaaacactaggagagaactcaacagagaatctatcttgactgtattgtacccgttcttgctcaatcaataaagaagtatttggtggtgttccaaaactggagtagagtcataaatcatatcgatctattggaattaaaccagtacatatcttggtgttaatttctttattttctacatttattgtttctagttttccatactctgttcatccctatttttcctccgattactatttgcatttgttaaattttctcattgctaattgtttcattgtttaaagtttatttggtttaattctccactattagtcataatttccctcaaattagagcttggtaatcgatcaagaatgcagaatcaagattcttaccgttgtaattcttgaaaaaactttgaatgacatcaatggcgagattctaattgagaaatttgatggaactggggactttgcactatgaagagaaagtgtgaaaggattcctagtgcactagaaagtctccaaggttctttgagattagaagttattggtagaaaagaaatcagagggaaaagtagaaatggaagagatggtgtactacacgatcatcatgtatctgtgaagtagtgttcgaaggaaaatcatcacagagaagatggcaaaaggagtttggaataaattgggagaattatacttgaaacaatcaattgctagcaagattaatttgcgagaaaagttataccattttagaataattttttccctatctttagatgataatattgaaagatttaatgagattattgtaggattggctaatataaaccacaaggttgatcaaaacagccagaccatcatcttgctgagttcgcttccaattgtatatcaagaagtcaaggcagccatcaaatatggcagagatgtgattgtattggaagatgttcttgtcgcatttaagtcaaaagattttgaattacaattagagaaggaatccaagaaagaagaagtgtacttggtaagaggaagatcgtccaagaaaattagttcaaagagtaaacaccatcactctcaatcaagatcgaaatccagagagaagaaaataagaaaatgttacttccgtggtaggtgtggacacctgcaaaggttctacaagaagtacaaggagcaacaaggcttcaacaaatctcataatgaagagggaaaagacattcgacaccatcactctaggaaggactcagctgcaatcgtaaaggttagtgatgagtgctcaatagatggaaggagaaactgttgggttttgtgccttaaataaaacccatttcaatataatcaaatttactagttaataaagatcagaaatcattttat

SEQ ID NO: 165044 - DNA, 1274 bp, Cannabis sativa
aaaaaaataataacaaaaaaaaaagacttaaattataaagggatgtactttttttcgtagatatgagctgcggcggttatttccaatctaaatgtgaaatagagtggaaacgaggattattttttatcttcgaatagcaaagagagcaaggaagtggatgatacccgcttaatatattagttatctttttattaaaatttttaaccgtaataagacaaaagagtactctcaactaattactcgtcgtatgcatccctatattaataaattgaatgatggtaaaaaaattaaaaaatttatgattaaaattaaaagcttctatgattttttttttaaaaaaaattccaatcaaactcatattattgattcaattacaaaaatatgatttttgttttaaaaattaagagcttctatgattttatttttatataaaaaaaatctattcaaatatttgtcaataaattaagaatgaatttactacagacgatcaaattgaggattcttaaaaaaaaaaaatcagaaaatcaaaatttttaagttctgaaatttcattattttttatttatttatttaattattttgaacggagaaatttcataactagtagttgtttaccttttgctcatatcacttttcacttgttgacaaattcatttacaaagcaatttttaattcctacatattatgaaactaaagggtttccataaccttttaaattaaaattatatacttataaatctattcagaaaaaaattatatactaaattgtttcaaaaatatagttataaattactcttaaaaagtcgtattcgaatctattaaaaattaaatgacataacaggaatatttttctggaataaaatggtgactgtgttactaattatacactacttgatgcatcttaagtaccccacttgtaaaataatattcattatttatttatttatatgctgaaactcttagcatattaattcgattttttttttttggaaaaaaataaaaatttccattagtaaaaataagataataattctaatgatatatatatatatatatcacttaaaaggagagcagaatcaataaaatagataaatcatatttacaaaaataaaaataaaaataaaaattctgttaatagatataaaaataaaaattctaataccaccttcaacatgattaactctggacataagtgggttaggcatgtgctagtactcacttagttcaaggtctaacaaaaataatttttcttttaaaattatacaattattttt

SEQ ID NO: 165045 - DNA, 985 bp, Cannabis sativa
atgttattatttgacaaatttgttcatacgtataaactatatgtaatgatatataaagtgtgatcttatcctactagtctaactatccaaaaaataatttcaaagaggacaaaacgctacaattagtccttcagtggttgtaaccactgcctctattattcaatctttgttttgtctgaaattaaggaatatcaggcatagtaatgagtagagtgacaatactagttggattttgtcatcttttattgttatgctataattgtagttttaacaacttgatttaattcaggcaggaggtccatattaccaagtgacaaaaggaaggtgggatggaaaaatatcaatggcatcaagagttagctctaacattccccaagcaaaccacacagttgatcagatgctaaaactctttaactcaaaagggcttgcacttgaagaccttgttgttctttcaggtgcacatacaatgggcttcgcccattgccagcaatttgttagcagactctatgactaccggggctccaagcaacccgacccagcaatcgaccctaaactcctcaaggccctgagaatgtattgcccacactttggtggaaactcagatatagttgcaccatttgatgttactacaccattttcatttgatcatgcctattatgggaacttggagagtaatttgggtttgttagcctctgatcaagccctatttttggacccacgtactagacctttggttaaggattttgccacagataaacagaaattttttcaggctttcggtttagcaatggaaaaaatgggctcaattggtgtaaaaagaggaagaaaacatggagagaaaaggaaagattgtagtctgcatagctaattaaactcaatttattatctttgtcctctctgtttccctcattattgatttgtagccatctgttttcaagttggtttttgttcttaaatgaggcctcttttttttttcttttttttt

SEQ ID NO: 165046 - DNA, 894 bp, Cannabis sativa
taagtgacataataattggttcattttagttttcgagtcagttaggctatatttttcgaaaagtagtgtttgagagtcttacattgataatgtgtggaaactaaataccatacataagattcatgggctactcctctaattattaattggttttgagatggaaccccatgtttcttaacattgtatcagagccaaactaaactctgatgagtgactgatctaaatccaaaaaatcggtccaaaaagacgagccaaaagaatcgcttgtggttcggggatagtgagccaaaatgagccattgtgagccaaaaagagttacttgtgatcgagtcgtgcaagacatacataagatctatggcctactcctctcattaccgattggttttgagatcgaaccccatgtttcttaattcttaacaagtaggattaaattaatcctaacaacctagttaatccatctagcatggcataaattaataccattgacagactttgtatcctacttgttttagttcatttgatactcctaaatattaactaacctaattaactctctatactcgagaagttagttaaaaacagttagtctattatgttagtttgtgtacaagttcagattgatcatagagccaaaatttggttctgaactaggataaaaatctggtgttcttattccatttctctgctttgatttactttctggtttagcttgttgatcactaatcatattgttgttagatgaatcttggtgttgtttataatttgactaatttgcaccgttaatacctaagtttaactctcagttgcagataaatacttaagtttaatttttgactgtaataatacataagttatatttctgaaatttccgataaatgtcaagtcattatccac

SEQ ID NO: 165047 - DNA, 596 bp, Cannabis sativa
ttactagtggtttctcttaaaatatgaacaaaaagaggaacttgatcattactattgttattttggcagttgatcatatattttataacaaaatcttattgaatgagctactccttcacttgactatttaagtactaatctttcagcaaaaaatgaaacaaaatattaagtacgaatcttcttcataatcataattaaaaacgacagagtggggtttttagagagccttgcattgagctacacgaaagtatgaatgtgtatgctcctctaagctagtgtggtaaacttgtgtgaatctgttaggacctctgaatatttaattgtgttttgttttacttcatatttattgtgggataattacactacatactcaaatttcaaacttttttatttttataatgtggagtagaatttttttcaaaaatattgtgtaagttttatactgtactgtgttaagctttcactgttattacggttgttttttaattgtgtattgtgtttacttttcactgttattttacggttattttttagttgttccacggttgttttaattgttctagttttatattctactattgttttataaaaacaca

SEQ ID NO: 165048 - DNA, 1205 bp, Cannabis sativa
gaccaaagccatggccagtgacatagtaagcaaaaaccaaatgattcctggaagccgatactccatcagtctccggctcgatcctcattctctccctcaaacactatagaagttccacagtataataatataataatctggagatcaaaatcagaagaagaagaagatacccagatgatgattaagttattttgaattttgagaaaataaataaataaataaataagatcatccgaaaaatgtgagatttttccttcttttatttttttaatttttttaaggataagtggtgtaggtcccaatccttatcccatacctttttggctgaggagcttttcaaactcaaacgaaactatggtactgttgaggttgtctgatcagtttttctttttctgttacacttatacttactgagggggaaggacgcctcaggcaggcttagatttagttgatgactcaaacggcgtcgttcgttgaacttgactcattgccacgtcaccattccacgaggtcatctatccattatattatcttttccgtagacttaggatgttgacccgaaaaaaccctttttaattctaattaagatttttttttgaatagattctaattaagacttttactcctaattgatatgtactaaattttttttgaatttttgtggtcaaatatttagattgttaaatttaaatttttttctataatttcattcaattttactattttaatgattatttatgtactaaactatgctctcaaatcatacctctcaaactttgacatatactaaatcatgcctcttgaattttcaacaatctcgatcgatagttcaggggtatttttaacgaccttaaaagtttaggggcgtgatttagtacatgtcaaagttcaaagggtaaaaatcttaattagcttttctttttgtaaggagacctgaaaaaactttaatgtaaatacattggaatttttttttcatgaataattttattgaaaaaaaaagtgaaatttgatataccatcttttttttttttttttttgaataaaaattataagatctattaattaataaatttgttcaaaaccatataacgcacttcagaggaaccgtcatccaactgaagcacacgacctgtagagaaacaagagtctcttgccaagcaatgaaccaacttatttgtagatcgttttacaaaacacaaattgtg

SEQ ID NO: 165049 - DNA, 876 bp, Cannabis sativa
ttcgacataataaagagttgtatataaactataaacccctaatacccaaaaccccagcgacagccagccatttccaaactccactgctttgctaccaactctttgggtttatttcccactacaaaaaactctgcaaaggcccgaaacatttcgccttactgcatcgttccccactcggacccataatgcctgaaacggacccaggaatcgacatcctccgagcctatgagctccgtctactccgctgcactctccctcctaccacctctgatgatggttgtaccaccccctctcaccctttccactcgctgattgccgacttgctgggcttcattgaaaccggtcgctatctccaagctctgacgtctcctgatgccgcgcaactcatcttcaaactcactgattccgacccggtcgactcgctcgatgacagtgccgagtgcgccgaacttgtctactctgagttcctaaagcgagtggaatccttcttgtcggaaggcgatgacagcaaggaaaagggcttcagagttgtaatcattatgtccttggcggtcgctgcatttctcttgtttactcaatgtaacacgactgggtgagtgggacagctccgagttaatcaaccattctttacaagagttttcgaatttttcaattgaaatttaggttttctttttcatcttaatttggaaattttttattgctttttatttttagtccgttggaattattgccaatagaaagcaaaagtgcagataagtttttcttcgtataatcagctcatgtctactgggtctcacttgcttagaaagttctctaatcttcaggtactatattgttattgttgtcttttaatttattttatctttaagctatttt

SEQ ID NO: 165050 - DNA, 678 bp, Cannabis sativa
agaccattttctattgttaatgctggttaagaaatatcttatattgtttcttcttctctgctctcagcatcatatcaagctgcaactcgggaacttcaacgtatctacggaaaggatgaggtaaccataccatgttgagatgagaatcttcctcataaaaggatttgaggtaggttagttcatatgggaacctgtgaatagcattatacagttggtaaatgatagactgatctggaattcgagtaatttgagctgttgaatgttcataggtttttttttggtcttttaataatctccaaaattaggatgctacacatttgttaaaaggattttgagagtaaatcatcagttcttttttgaattagggtgaaattttctaccttgtggtccaagcaaaagtgtattttgaatcaacattgttcagacaacatcctttttgcaaagtgatataatttatttaagtatagatattgatatgaacaaaagcttgagaattagaagggttctcctcaaaaccaaacaaatattgtacaactgcataaaatcagactatgggccagtttggcacagctgtattgtgggaaaaagcagttgtagctgtgctgtgagaaaaatcagctgtagcagaactgtggaaaaaaactgagccgagtgtggtaaattataaattttaatgta

SEQ ID NO: 165051 - DNA, 1665 bp, Cannabis sativa
  modified_base (1603)..(1621): a, c, t, g, unknown or other
agagggttccttgtacactggttctcgatgaaggctggcgtcctcggggattagctaatgttctcgcagctttatagttgtgcacaacaatcgccaatcgtgatcttgaacgggtaggctaccaagaactttagcaacttctttgcgagtgggattcagaacaggtcgagttggtctatttgcgatcaatgagaaataaacattaacgacttcataaggtaacacaaatataaactaagtgtttagatatgcgacgtactaggtcgacagttgaaatctgtcctaacccttggtactttgaatacataaaaccacttagatttctaatcccccatattggaaaccatgccccattgatttcagaagtggcccacttactgaagcagtagaaaccattgtcgtgacccacactttttatatcataaaaataacagaaatcctccattgagggctccctctgagtatattccatatacatcgcataaaaccctaaggctatgcgatagctattaggggttaattggaaggaagagacgtcatagcgtctgaggatagcttttatgaaagggtgaaagggtatcgaaaccccacatcgaagaatgggaactgaaataaccacatcctctctagggataatcgcaggattggtgaaaggaagatgaggccttttggatgcccgaggatgtatggttgcgagtcgcaacaaattcaacctcgtgaatgtatggaggtctgatttggtaactcgcgagaccaggtcctcacatgaaaaaggtttgttcagctgggtgttgtcaaccgaatctgtctcgcttccctcggcattctcttcttcccctaacttgcgatcaggaacctcccaatcttcccccatctcctcgacttcgatgtcaggggcatgccccgaatgggtaagattctctcgggcggacaccgtggattcactatcgcgaatctcgattgtcccaggttcagcgagttcctgaaccatcctctctatccgtcagaagatagtggacccaaacccacagctctggcaacaggaacttcctcctcagagatcgaggttggtatgaagttgtcgctcttattctgtttgtcaatgaaagccccacctcttaagtcgagcatctgactgtctgacaggtcgctcatctgaaagatagaagatcttttcagtgtggtgcaagtgcgagaataacataagagacctcacccgtataaaagaaatttagaaaatatggaggtctaaccctttcaaggtggaagtctcaaaaaatggctgggagttttccagtgacccaagaggcgtgcatttctaagcatgaccatagagtcactgggacatactcacccttttgagaaaatttggtcaatcaaaacatgcgactaagaaagcaagaaaagcgaaaattggctgcatgtcgcgaatggctgggtgtatcacagtaacccacggagtatgcatacgctcgcataaacattgggatacggtgacacacccaccattcgaaggactcaactaatattcgcaacaaatacatatgtaaatcaaaaggctaaaataaaccctaagttctaaactgttggaaattattttacnnnnnnnnnnnnnnnnnnnacaagtatattgattaacaccctaaatatgagcttctaaaacga

SEQ ID NO: 165052 - DNA, 2996 bp, Cannabis sativa
agatgtaccagctggagatagattgggatgaagaggttgctggtcagtctccacatgttgaccagcttcaatttgttgagttgatggtgcagaaacctcacaagcagctggaacatcaggagcctcattatgctctcttgataattctcctacatcagacacaacttgttggctggatagccaactgttaggaatagaaacagatgcattattgtgaatagcaacaggttctggagaattgtcaattaaaacaggttgatcaagccttgtatttggagaaagtaaatctgccatggtgtaatgagttttgggatgagaacagacaggtatgatagcagacactactgaatttgtgtgtgatccagacatgggactgctatttttgacagcagactctacataaggaaaaacaaactcctcaaaaataacatctctagagatgtacagtcttccatttttatcaaggcatttatagcctttatggtttagactataaccaaggaaagtgcatggagaggatctaaactcaagtttatgtctgttgtatggccttatattaggaaagcatttacaaccaaatgttttaaaggatttgtaatcgggttggatgttgaacaatgtttcaagtggagatttgtttcctaatacaggtgtgggcaacctattatggatatacacagtggttctaaaagcttcatcccaaaacttgaggggtaaggatgcttgagcaagcaaagcaagacaattttcaacaatgtgtctatgtttgcgttcagcaagaccattttgttgatgtgtagtaggacaaggatgcctatgatgtatgccattcttagcaagataatttgaaaaagatctaaattcacctctccaatcagtttgcaagactttaaggggttttccaatttgaagttcagcttcaaacttaaagttttggaatgccttaaaggcatcagatttgtttttcagcaaatataaccaagtgaatctagagtaaacatcaacaaaatggatgtagtatctataaccattgaaagagggtgtgtgagaaggtccccacaaatctgaaacaacaagttgtaatggttcagatacaatagtgtttgatgcctttggaaatggaaatttatgaattttcccaaggcagcaggcagaacagattgaaaattgagaaattttattgcttaaagagatgttacaagattgcaagacactatgaacaattttctcagagggatgccctaatctgttatgccacaaggtaaactcattctcaacagcagtattacatttaatacaacttgaaacagtagcactagagttgtttagggtgacaacaaaggtactttttgaactatggttactgctggtttttgactcaggttgctggtgtgagacagattgatgaaaggttgaagatccaatgctgaactgacttggttcaaaagaatacaggccattcttgtgcctccccatcagcaagatagaatgagtcaatttgtccttaacaagacacatgtcatcatgaaattcaaagaaaacattattgtcatgagcaaacttggaaacactaattaaattctttgttatttcagggacatgcaataagttgttaagaacaagggactgagatgacaattttggaaaaataaaggattgaccaaggtgttttattgacaaacctgagccatcaccaatgtgcatctgatcgtgaccttcatagtcatagcaattagctaagttctgaacctgtggtgtgcagtggttcgtggctcccgagtcaggataccaattggtgtcactgattgtgtttgatgtggctagattggcttgagttgaattctgagttgaggattgagtgctgctgctagatgaacttagagaaggtcctgagaaggctttgtcaaaacgataaaaacaatcttgaacaatatgtccaaatcttaaacataattgacattgtggcctgttattgggattcatacaagatctgcctcctctatttatgaaaaaattacctcttcctcctccaaaattctgaattggagctgtgtcatttgtacgcatgtagcttctgttattgaactgattttgtccattgttggagagtgactgacctcctcttccaccatactgctggtttcgaaatcttctgaatgcaaggttggcctcagtaactggatcgaactcagaagttgtaaagtttgcactgtaatcaatttctttgcttgatttttcgattctcgattcagaagctaggagaagagcttctatttccccaacagtatagttttcgattcttgtgttagatgagataacaaatgtgtcgtactcactaggaagacctttaaagatggcagctacatgatctcgatcacttagcacttctcccactgatgctaagagatcaacagtttgcttaactttcagcaaataatcattcagacttagagagccttttttcagattttgcaacttggttctgaactccaagatcttcgatgaaaccttcaaggtgaagtgtttttctaaggctttccagatctgatgagaagtgttgcatccaaccattcttgtcagcaaactttcagtcatagatgacaataaccatgaaaccagtagctgatcttgaacttcccaatcagtatacacaggattgacacgatttgctgcagcatctccttcattcaagaactcttctggaggtggctcactaatgaacttcatcaatcgatttccttttatagcagcaaggatttgctgtttccagagaaggaaattatgatcgtttaatcgaattgagatgctgtgattgaagaacacaggatcttgattagtgcgttgcctgttgagtgtttgagttccattgattccagcagcagtagcagcaccattgattccagcagcagcagcaccattgttgcccacggtcgccatgtttgccacaaggggcgggaattgctctgataccatattaaaccttctagccatagctg

SEQ ID NO: 165053 - DNA, 1969 bp, Cannabis sativa
ttaaaaaaaattggacagtatttttcctatattattaacctaaacaatcagataatacacaaatttttatccttatatcaccacaacacacaaatttcacaaatcctacttctctatgaatgaatatataaaatattcaaactcttctattaagttatgagaaatacaatattttaaacataagtttaaaaaaagatatgtggatttaatatctaaaaattcttaaataaaagaatgttatatcataataaaagtaccttaatctcacccacaagctcttaagatgcaaccttagtattcaagaactcatcaacttgttttagagtttctttcctatcctgtcaacaaaaccaattcaacatggattatatgtataatataacatattaaattaaaggttggtcaagaaacaagaactggcagaaaaggaggcaagttcctagcaaagattaatgagtactgctctgtaatagtgataagaacataattgaaaattctttcttgaaaatgatagtggaccaagatgcaaattaatcaagtctttcctaattaagatgagaaataaacaaatcaaacatgtcaggacaaagtgtagcccatgcaaatgatttgggcacatgaacatgtccaacaaattaacttttgccatattctgaatatttaagccatttgattaaatcaatgctataaattactatacctatcaatagataaaaactacaatacctattgtattagctcccctcaattatatttgttatgcaactttacatgatgattgcagagtattagagccatcgtacaaactttctgttggtttggtcatatagcttgggaatgctgcaaagacataaattttggaagttggcactatgctgaaactttcgattgtacacgtacttgacaaaaatgctggagtaacacaacacacaacaaaagattatgagatgacaacaatgctaaaccagataagaaaacttggttaaactgataatgctaagattttcttaattcctctaacaattggcaggaacaacattttttgtataaagtctcttaaggatttttcattgtaaattattgtatttacacagatacctaactctgattgtgctatattagaacacattaagatttgacacctaaagaaagtagaaagggtactagttgtgatgtaaaactcaggcttagaaattaattcagtaacatataccataaaaagaacttactgataaatatgcaaagactggaaaaatcttctcttatgtaatctcccagtcccagcagctgctgacaagggtcccaatctgttttttatatatcaaaacataatgcctcagatatgcaaatatatatttatagagaaaagcaatattagtgaaacctaaatctttcgacaacccaagattgccaaaaggctgaagcaaatatgatgatgaagtgttatagaagggtgaaaagtgaaaagcacacatacttgcccaagtgaagaaataggtggcgtacagggagaaccattgaagatgcttctctattctcaccggagaagacgaaacaggagaagaaatctcgtttgaggaaggagacgagggagaacacccgattagagacccgattttcccggggcggactgctccgcaaaaaagccccaatttgccattcttggccttttttttttttttttgtagtgtaatgagtcatatcctgaaagtttcatgatggaatcacacttctgaaaccacagctcagtttccctggaactttttccttatctttatttttaatgtacctaggataatatagaaataaaagttttggctttaaatttaagaaattttttaagttttggcatagagtggaattgtgctagtgttgagattttgttggttttaagtttgtgattaattgaaccttccctcagggaggatgctaaatggtggctttagccaacaattctcttgttgtggaa

SEQ ID NO: 165054 - DNA, 1219 bp, Cannabis sativa
  modified_base (889)..(889): a, c, t, g, unknown or other
gaaaactgaacccacgaagcttcccataagcttggaaattggaattactatcataaaattacccatgtgtacggttgtcagatttatcatgctaatgatatacaaatcacgataactggctcaacgaagagtgaatattttctagggattttaatttttttttttctttttttttttttgatcaaaggagaagggttcttattaatcaacaaacaaattacaaacaagcctcaaaaacaaactgaggcacggcagcagcttacacatcaagttagcagcctgcacattaaaccttggctattggaatcaatcccctttgtctatagctatacaatctatactttacaatccttttaatttctttaactatatgactaattgtgtaagagctattatcatgtgtacaattgtttctatttagccaaatatagtagacaaccgcagcaagcagcatgaccactactttatccttgaacctgctatctgttatagacaaaaaagttctccagcttgtgaactgcaagttccaagcctgaaagcctagccaactgaagatctcatacacaacctgtttagaaaaacaacaatcaaagaataaatgctgatgagtttcagcttccaacccacacaccaaacaatctgatgataaaatgttgatgtgaaaaattgcaagctgatctctagttaagagttgggtgtgcacagtttgccaaagtataaatctgtgcttggggatattatatatgttccaaacagctttgtagtactgatcttcctcacaagacaccatgttattataaagaaaagatgccatgaatttgccattccttcctgcagccataatctgctgttgtttgaagtctctccttaaatggcaaagcttcttccnataccagcttgtatccactccaagcttgtagttccatatgtcatctcctttcatatatacaacattaacccatttgacccatagaacatcatgcttctccataatagcccataggaatttagccaaggtagccatgttccatttagttccttccctgaacccgagacctcctaggtgtttaggcctgcacaccttctcccaagaaccaaagtggactttacaccgattcccagattgtccccaaaggaataatctgcaatgtttctcaatctctttgattacactttggggaagaacaaaaatgttcatccaatagttcctcaaaccaag

SEQ ID NO: 165055 - DNA, 766 bp, Cannabis sativa
  modified_base (211)..(217): a, c, t, g, unknown or other
  modified_base (273)..(274): a, c, t, g, unknown or other
aaaaaattaaagagctaatttaattcatgtcaaaatttaacggctcaaaatcacccattaaaatatgtctcaatatcttaataatattttaggcaaatcataaaaaacacataaatagttgacttcaacattctctcatttaacttaggatacaaataatattgatgctaaggctaattaggattttgtcccctaaactttaacatgtacnnnnnnntgccccttgaacttttctggctgttaaaaaatctccctgaactattgagattgttnnatttaaggacttttgtctaatttcttttaattttactattttagtgattgtttatgtactaaactatatttcttagactttgatatctagcaaatcataccccttgaatttttacatgtgctaaatcatgacccctgaactttcatccatgttagactttttttactaaaattgaacaaaagtccttaaatctacaatctcaatagttcatgaggcatttttaacgaccttaaaagttaaaggggcatgatttggtacatgttaaaatttggggagtaaaaatcataattagccaaatactgattataaattattataaggggacagtttttaaagatctctgtattatttacttattttgtaattgtagtaaggaaccaaagatttgttaatagataattttgcggccaattacttcatctaaactaatttcatcccaagcactataatttgtcatagagtattgttattgagcatcagtgttgtctaaca

SEQ ID NO: 165056 - DNA, 1361 bp, Cannabis sativa
ttggtctttgggcaaaactaaagagtttgtatgtcaccaagtgcttggcaagtcgtttgttcttgaagcaaaaattctattcattcaaaatgaattcaggtaagaatattgatgatcatcttgatgaatttaataaaagatgagtctagatttggagaatatcgatattaaaattgaagatgaggatagctcttaattccttgccatctaaaagttatgaactcgatacaatgatgtatgggaaggaaactttaactcaggaagaatcacaaaatgccctcatgtgtagagaattaaaaaaaaaaaaagagttaaagaaagaatcaaaatggcgatggcatgtatgttcaaaggaaaacatttaagaaaggaaacaagaatcaatatggaagctctaaagatcaagtaaagcaagggtcaagggccaagataagagggttgtcatctgcaacaaggccaatcatctcaagagggactattttgtactaaaagaatacaatcaaagacatggcatagaaaatgtgatctcaaattgtgaaggaagtgaggactatgatgtcctaatggtttcaaaagggtactatagtgatggttgggttatggattcaaggtgttcttttcacatatgctctgataggagcctgttccatggatatcagaaactaaagggtggtacattgtcaaggggtggtgtcaagtatttcctattcattgtagatgacttttctagatatgtatgaatacatattttaaaaaataagaatgatgcccttagtaagttcaaggaatggaagacactaatagagaatcaatctggtaaaaaggtgaagaaattaagaactgataataatttggaggtctacgcaaataaacttaaacaattctgtaagaaaactggtattgggagacacttgtgctcccaacaatctacagcaaaatggcattgctgaaaagatgtaaaagaaaacacttgagagagttagatgtatgttaatctactttgaacttcctaaatccttttgggaaaagctattgtgacagcgtgctattttattaacaaatatccatcatttgaaatttaattcatgactccaatagaagacaaaactggtaagcttgccaagtatgaacatctcaaaatctttggatgcatagcttatactcacattagacaagataagcttgagccaagggcaagaaagtgcatcttcattggctatctatagggtgtaaagggttacaaaatatggagtataaaacctggtaaccatcgaaagttcttcatcaacaaagatgtcaagttaatttgatgaagaaagtattagaatttatgccctaaaagtaagtaattaatggataat

SEQ ID NO: 165057 - DNA, 989 bp, Cannabis sativa
tacttgtctggtaagaaagaactataatcactttctatttttatccataaataccatgctaatgtatttttcatgtaagtttttcctcatcataattttatcatggtagactagattaaacccttaaagcctcaaactaaagagggtgtagttcaaaattcttcaaaataattaaaaatgtgaaaactattgtctgttttgttgaatcaaatctttgcagagatcatatcttgcagtagtaaaacttcttaatatttttttataatccaaaaccaaaaccaagaattattgacttttttagtcaagtgactctattaacctatgtaaatagaattatttattaaaaatattttcacatctgtccagaaaaacgtcataaaataatgtaaactttgatagtctcaatccaatgatgacatcgttgataacaaaactaagcttacaaacaacactagacctatttatttatcatgctagatcaaactctataatctttttattaaaaaagactctttaatctttacggcaacttcttaagttgaaattaaattgggtgttttaaggtgcattctttttaagggtacattaatacatctcctttatatatttttgatacataaatagttgtaatcttaggtatattgcaaaaagttttagaaaattcaaagtataatctataatttaaaaaatatagtttgaaataatttatttaacacatatataatataaaaaaaatatgaatacaacaaactatttaaatattttcaccatgctaatttttctttgaattttttgaaaatttatataatctttgataactatgttaccaactgtcataaaatataaattaaaattaaaactatttagatgttgaaaatgtaaaatgcatcggtagactcctttcaaaacaacatcaccatacgtagaggtgtgtataaatcatccaattcaatgataactgatcgatctaattacaaccgaccgtcaaa

SEQ ID NO: 165058 - DNA, 1020 bp, Cannabis sativa
aaaatttgtaattaattattaatcatcgttcctaattcttatgttgtggttataaatttgtggctacaggcattagtcccaaaatataatttattatggctaaatgtgtttttagtcaccatatttattataactaaaactaaattagtgacaatttatatttaaatgctatattttagtcccaagtaactttttgttgaaattaaaagtcacatttagttgacaacttatatttaagtattatattttagtcacaagtaattttttattaaaattaaaagtacatttttttttttgaaattcaaagctttattcaaaacgaatcttccaaaactaaggaagaataacaagcaggtaaaaaaacccactaagaacacgatcagcctccaaagagatgctctcgcaaaagcatgcgcaagcctattcgcagatcgtttaacaaaacaacattcaactgaaattaaagtacatttaattacaaaaaatttaaattataactaaaataacgtagttttttttttttttttaattaatgatgcggctgttatagatagtttctcatgtactttttttgaatcatactatatcaactattattttttttgataggaactttgatgttcaatttcgtatgtttatatttatttattttttttgtttgagattgaattggtagttggggagagggattaattaattattcattactcttacaaattataaatccaagccgcaaacctacccatattcaaaatgtgataaatgttagttagggagagttatagattcagaacatgataattatttattgagaattgtcaaaggcattattggtgcttaacacattcttcagtgttatactgctattggtgtattatgtatcgagtttcatataacgtaaaaaaaataactaggcgtcacctgtagaaggtgctaggcaccactagtgccaaatagcaatacccttatttattggatagatttttttcttgagaaaatttattattattattaatttct

SEQ ID NO: 165059 - DNA, 2286 bp, Cannabis sativa
gatcagtggttgagtcactaccacgcctactgaaattagatgtaggaggagcagtggtcccaccaacactttgtgtaccccaggattcctgaatgcattctgttttgccctcaactcgcaattccttctctaccatagtagcataagtagtcatatcatcagtggtaatcattaaatcatgcttgattttggggttcaatctcgctaagtactttttcttcttactaaaatcagttaacacaattctcgaggctaattgggccaatctatcaaactgggacgccgtgtactccgtaaccaacatattctcctattgggccaattgggtgaactctttcctctttgtactatgaactgcctcattgtagtacttaacattgaacaagtcttggaactcttaccaattaactctggtaacgtcacgggtgagagacaccatatatcccaccatagcagggcatcctcctggaattaaaagttgtgcatgtcacccgatcattgtcagtaacacccatgaaattcagtattctattgataactattagtcattgctcgactttcataacatccaaacctcagagaaatactagaggtgcttgcatacgaaacatttcatataagaggtccatatggttaccaacaacagcctgctccactaggacaacaagagcaggagttatctgcacctcaggagcaggaatcgcatgtgcaccctactaccttagacatcaaatttcttcacgtgatcattaattctggcttgtatttctacaaacctctgttctcaatcctaggtagcctgtggtgggttaatattaccccgactacgagctacacctcttcggcctctgccttggccacgaacattaaggggatatagtcctccttggccgccactggattcgaccaaatttccttggcttctcgtattttgcctagttttcattctattggactagcttacgaaatcataagttagcctggttagactgcgatcaaggttaaaatctaattactacttacttgaaaatttaaaacatttgcctattcagctatcaggcaactaaaaataagtgtaatgcaactaaaagtttgaaataagtaaaataataacgttactaagtaatgaaatataacaaaatatcatgaaaataaatatacaaaacaaccaaacgttacaaattcaacatcaaataaagtccactaaaaatataattaaaataaatatttttattatacataataaaaataaataatttttttaatatatatatatacaaatgtaattggattagatcggtttttaattaaattttgagaatgacatctaataattgatctaatttaattagaatctaacttttaatatccaatctaatcaaattgtaaatgggtatcaattttttgtagtttgattggattgaattggttcaatttaattagattggattaaatgttatccactcctattaatgtaaaactaaactttcttatatagtttataaacacacagtttcatcatattcaactattttaaatatatattttgaaaggaaaattatatattctttgtatttaataattttaaatatagatatgtattttctttgtattgttattcctaattctcttcaacaatctgatcagctcattgagcattatattgagtctatgatgcttatacagttaaaaaaaacatggatgttgatggcaataaagggtggtgaaaaatattttaggctctttttacctcgagaattgctaaaacatatcattgatgtgtaatacttttgttggtgtcatactgttattggtatagttaagtagcaggtctcatataatttttaaaaataacttttagaaagtatcgctaaccaatcgtagggtgccacctatgaaaggtgctggacactattaatgcctaataacaatgctcttttaccaccaaaaattaaaatccttgctttggaagctagtttgcattggataccaactacgactaagttggcaaagcatggggtgtcgtccaatacatgctggactatttgtgattgtgtttttgagaccatttttcatgctctatggttcatgatcaacaacttttggagtatgagggattgcttaggtgggccttacacttttataatgggggtgttcataaaatagtcgatccaattcaatccgcacgattcaatataatccaatctgcaaagtgcgaatatccgcacttgtgcagattggattgaagtggaaaattcaaactccgcacttgtgcagattggatat

SEQ ID NO: 165060 - DNA, 1686 bp, Cannabis sativa
gattaattgttctttatctatataattagtaaattacttaattattcataattaattcaaggtttatatgtataaatagaatattaatctcttaatatttatatttatatgtataagcttatttattttatttttatttttttttcaactgagatttttcattcaactaaacttactcgatcttaacatatatgatggataaaacatcagctggaatgttagagtccaaaaaaatacaatcaatatataaacggaaagctcaagtaatgtgataagcaacctaattataacagatcgcttaacaaaagttaaagaaatattagaaaaagaatttaaaagttgtcgacagttttctacaacaacaaatgtagaatttaaaaccaaattattactaacagattgcaaaatcattcttcaaccaagaaagcacttctttaagagcaataccttcaccaatttcgagaaacacacgaccttccttcagactgtttatacttggctacactaatttcttggctgtctatacttcatgttcataaatatatataaatgattttacataaggttttttttttttttaaaaaaaaaaatcaattggattatttagctcatttaatgtgacaaaaaagaaaaattatttatgcccctactttaataggaaaaattgtatttatcttttttttttagaaaaatatttttcttaactttcgtcgactcacaaatgcccttccgtgtattggggtaacacaataacaagtagttcgcgccttcaggagatgaaagttaagaaaaatatgttaaaaacaacccaagtcaccctttaagagagtatgatgttggccatgtccaactttaagctaaggcggactagtactatgcctaaggctaaagctcataattctcaaatttcaataaaaatatttgagaaatttatataaagtactattttttgtaaaatttttacactttcacgtttaaagtttttttttcttcatatttttacgatgttcataaaataataataaaaaaaaactacatgaaaataacataaaaaaataatatgctaataacaaaaaatcaacattaaaataataagattacaatatcttgtaaaaaaaaattacaatacaaaaatatataaaaaaaattgtattttatgtaaataaaatcttaaaaattataaaatatgtaaaattccgtacaaccctatttttatcatttattattattatttttgtgtatttttaaaataatcccaaattcttgtctatacaaatatggcccattacagatgccatgggctttctatttactaagagaattgggcttgaacacatcacctgaccttcctttcttttctttttttttttttttatttttttatttttgactttttgacatttttttttctcatttaataaaaagcaattaaaaatatggaaaatagtaaacaaaataataattggtgcatcgtcttgtgcaaaccaaaacttatgtacaccatgccgacctaagtattttgggggccacgtgcaaaagattaaaattggaccctttacaaaaattaaataaaaaaattgtggtttattgaaaaatacctcttttatttatcaattaaccaaatctacctctaattttatatttaattgaaacatacctctttttatatgtgttgtacccaaaata

SEQ ID NO: 165061 - DNA, 1032 bp, Cannabis sativa
ataataataatacatacgaatgtgaaataaaaaattctttatccttttttctttctctccccctacttagacatcttaagaaaaataaatttaaatctttaattcttatcttaaaaattaaaaataataatatggtgatacagttaagtaaaattatattctttctatttggtgttctgtatggaattatttttgaaaagctgtttagtaataattttagataagtgtcccaaaaaagtgaaaggattgagaaaaaatgagcagaaattatatatattttggtcgaataaattttgttttgttaccataagacatggattttctaattacaagtataaaaataaaaaatatggaacccgttataatgtaagtgaactataaaaatacagatttaaacaaataaaatgaacataatcatggccaaattaatttatgaaacacgatttttcttcacacaaaaacctttaaccaaaaactaaaaatacagaattaacattatgtagacaattataaacagagatgtcttgatgtatcttccaatatgctcatgtagatgtcttagttggtttagttatttgattttaattattctcatgagattctccattagcaatcattaatcaatctttctaactcaacttccttgccaacgatattttgctaagagtacgtaattcattacttgaacgtactgaaggaagaggacctttctaatttgcttttgaagggagcaaattacttgtttagtggctacatgaatgaaatgaagtcattttaaataaaatttgggatcacaaatcaacataactaaatttaattaacaactctgaagaggacctaaactcacaaaacaaaaccaaacataaactgaaaagaagggaaggagatgaaaaataaataagaagcaagaactaaaatatcaattccaattgagaacgttaaaggtcgacgtttcgaagagataccagatttgtcttggtgtgtatatttaataaattaattttcatattattaattaatcagttataaatt

SEQ ID NO: 165062 - DNA, 1470 bp, Cannabis sativa
attagaccctgtacctataaaacgtactgcaccagccagcaataggtccttagcttcaaaaatactttgccaaacgaagcttggattatcccccatttcagctgagagaaaggagctatgaggataatatcacaatttaaaaacccgacccaccagtgaggattcatgactcaacaaacgccaaccttgtttccccaaaagggccaaattaaaatcccttagacatttgaaacccaagcctccaacatgtttatggggacacatagattaattatcttttttgttcaaaataattaaaaacataaaagtctatctacaatattaatttatttttagtacaatattaattaatttatttattatcatatgtttttagtagaatacttatttatactattacaaatttctacaaaaatgaaaaatttaaaatttaatataattttatgacttaattattactaaataaaatacaaccacacgggaagcgtgatttgattcctatttatattagagcatctctaatggaaatgcaaataaatgatgcaaatacaaaatataacttagtttgttaaaagtgtactccaatggtgtgctaaattatgatgcaaaattctcacataatcaaaagtgatctaaatttgcatcacaatatagcatgatgcaaaatttgcatcacaataaatgtaatgtttttatatttaccataaagctatttttaatattttattatgaaattttaactaacatactcatttgcattaaatgacttgtattattataattttattattaaattttacatttaactttacattattagtattattttatattttttaataaactattaagtgaacattaaataacatattaaattttgaatcaagatttacaattatgcattggagcacaacagtaaaagttgatgtaaaaatattacaaaactactcttgtacaaaatatagctcaatttttacatctcccattagagatggtcttttactctctattttgaatcataagattttattatttattgtattaatgtaattatttatttaatttttaaaaaataaattatcattttgaatgccgctaactcacaaaagaaaagagaaaaaaaaattaaactatgaagttgtaacaataaattccatgaacaagaataatgtagtagtacaaaaagataaatcaagtgtcaaaactaaaaaaaaaaaacttcgtaatacaaaatcatattgatgaattgatattgttttacatattgcaattagattattgttttgttattttgtattactttgtagttatctttttgttgttttatagttattttcatgttgtttgttaagttgttttagagttattttttagttgtttttttattttactaaaataaagaaattttataattttaaaactttaacacggtattttgaaaacttgatatagtaaaatgtaaaaaaaaaa

SEQ ID NO: 165063 - DNA, 1897 bp, Cannabis sativa
aaaaaaataatttgtgacataaattcctaacttcaatttccggctatagataaatatttaaatttaatttttgaaattttatttctaaaatttttgtaagtacttaaccgttaagtatcaagtcaataacaatatggcagtcctttaattgatgcaaaaatataacttagaccatctctaatggaaaatgtaaaatttatactaaatccgaccaaaaaaaaaaaaagagtatgtgttatatttagcccactatttataattatgaactaatgtaaatatgtaaaaaaaagtattattattattgatatcatttaatattttattaaaaatatataaatatcattatcttttatttttttattgcttaaataatagtaatatagtaaataaaattatgtaaaagtttataaatcaaaataattagcggcactataataaataaaaaaggtaaaatttattatgagtcaaatttagaattatgttatatcttgtgccaaatttaacataatttttagcatatgtcaaaattgatattttttagaacatgattggagtagtatttttataatgtaacactgtaattcgaggtaattgaaggttttcaattaaactttctaattctcataaaaaatttccattttaaatattgactactaaaaatattatttttttggtgtaattattaactattttgccaaataatattataagaattcttagatatttaatgcctcatattcaaacatcactttattttttaaaatattatgtaattacttagtcactttcaaagaactaaaatataacaacacaccatttttttttaaagtattccattaaaagatgctcttacatattattagattcaaaacctaaattttagtatttatttatatataactgagaatatagacaaagtatttatgcagcaaattagtgaattaaaactcaaaaccagagaaaaatgtgttacctttgatttgacagagcgtttaatgagtgaccataatcctggaacagagataacaaagagacccaatgaagtgtaataactggccaatgagtaaccaacaacactttcagaaaccagaaacagtgaagaagaagaagaagaagaagaagtttctaatagctgttgttgaaggtcgagatttgcagcaatggagagagtttcttgaagagaagaccggaggatgagtttggtggggtttgaccttgttgtaatgggaagccatggatgtgttctccggcggttgtggtggtcggagaaggaggtggggagagtgagaagttgggtgtgtggataggtttttgagaagagctgagttgaaacttccattgttgttgttgttgaaggtttattattattattattagtcccacatcgatggagtgagagagatgagatttataagagataagattttcagagagagtcacatttgtgtgattgttctattttatcccaaagcttataaatagccacgtagtcttattctttttcttttttattatttctacaattgcccttttatttatagatttgaaatttgatccttaacaaacaaaaatttgaaatttaatccttaaatttttgaataatttgcaacataaatgttttttttttaatattagcagggctgaataattggacctgaaatttgaaaaattcgcaaaagaacgggtttcaaagattagagactgggtttaagttacacccgatttaccatcgggcgggttcgggtttcattaatctaaaacccaaacaaattagattgaactcgaactcacctgaaatctgtatctatatatttatacattttttaaaaacataaacttgaaaaaaaacttaattctaaacaatgatatatcatttttcttttcttcttcttttatt

SEQ ID NO: 165064 - DNA, 3412 bp, Cannabis sativa
  modified_base (1265)..(1277): a, c, t, g, unknown or other
  modified_base (1836)..(1836): a, c, t, g, unknown or other
gttcttatttttattttatttttttgtaggccccaacgacgtgcggtaaaaatcgattctaatttggtggtgttttggaattttgttttatgttgttttataattggatttgttatagttgtatctgggtctcactagatcaaatattttttagagaaaaaaaatctcacaaatattttaatatatatattattatattgcatcagttgtaaacagactcctaaaatttgatttttagacttgcgtcaacgctagaaagtttacttaagaaatagtgattactctggggtggagtaatgatttttagagaagtgtaaaaacctattcaaaatcgctaactctaccagtaaggctgaataataaggtttccttaaaggcaattaatttagacttggcaaagttcgatacagactgtggcataatttcaaacatggaataactgctagtgtgactccgtgacaacacaaatgaaattaccagacagtaaagaatcctaaaccctaagagaagtacaacatatagatggggaattcataaaatcatgaattttgtgactaaagagaatgtaatggtggagtaggttgatgctaaatacaacctatcagaccatattacatagataatgcaaaatactaaatttgatgaagacatcaagtatatcagattaaattgaaatgtacatttggttttatattagtgaaagtaggagtttgttgggattttatgccctaaataaaactcaattttattataatcttatttactttcaataaagcttagaaatcatgtcttgacctagtcatatgatttgttcacatgttttatacatgattataggtttaatatgaaacttttataaaatttcgaatatatagttattcacaattatagtattatcatcacagtagaaagtaattgtgattatattcttcaaattattcagtcccacgatttatcagtgcaccgaatttacactgacattataatcagctataaggtttacttacacttagctgagtggaatggcttttccaaggcttagtaaagtaaataaggattggatgtatcgactatacatcggactggaccaaaattgacagtggaaaataaacttaccattatatctttttgggtaaataccattttggaccttatgttttgcaaaagttaccaattggaccctctattttgttaaatcccaaaatgggctctatatttttcaaaatggtaaaaataggaccctaaactcaattttcaataatttnnnnnnnnnnnnnaaccaactttaagataatttttaatacgaacagatttagaaaatttaaccagttttgtcataacatctctttacattagattattattaagttttattttaacaaaaaattagttcagggtcctatttgtacaattttggaaaatacaaggtctattttatcatttagcaaaacagaaggtccgattggtaacttttgcaaaacacagggtccaaaatgttatttaccctatcttttctaagttaatatcacttagttgatcatcgatcatttgatcttaattatcttgagatggttgagctctagctttaatatattgcacgagttctttgacttgtgcattactagcttaccctaggacgagcgcatacttacatcttggaaactcggtagtacaattgagtgagagtattaatcgtagagatggacatctatagcttctatgtctattagaagtgaaacgatggttttcttagagctttgacttaacatgataaatgatagagtgctctttttggtaattatattactttatcgaaatatcatttacaagtagctnagtgttttaaggataaaatatatgaaagggtaaaatagtaattttgtcctactcagtgtagaccgtttatagtggatcaataatttttgtgattgaaacaaagataaattcatagcatatttatatgtggtatatagagcattttatgtaatcaatagtgaaattttgaatctataatggagttaggaggaattaataagttaaaaaatttagtaggtaaacttcaagatctacttattaggagcttagttatataggcccatggtcctctctttttctgagataatatcatcttgtagactcaattgattgatttatcaagtcaattagaattcaaaaatagactgtcttatttgagaattttcaccaagtttggacagttttgagaagaaagagaaataagggtttatttattaattagtacattttgtgggtttaattaataaatttattaaaactatattttttttaataattatttataattattaaaataaaattgttatttaaataattagatgagatatataagtggtaaaattagaaaagatactttagtttcattagttgaaataaagtggtaaaaatccaactctgaagcccacactacaacaaatgagactttttatcccactttttacacttgaaaaataaaaagtgggataaaaacttttgatcccacttttacatttagagccttaaataaaagtttggaacaaaagggccttgtttggaaaatggacaaaaaacagtgttgaaaaggctattcttatgcatttgctaaacacaacttagcattttaagtgagactttttatcccatttttacatatgaaccgggataaaaggttcccagatatctgggccttttaattattgggccgactacacatattaaatgaacaattaacttttaggggtcgtttggtatgcaggtttcatttcatgagaataggtttaacattgcttggagagtgatgaagagaatgataaacctaggaaagcaacattaccgtatttgattgatattagaatggaatgtgacaacttttttttacaataataattattttttttataaaatactaataattcaatatttctttttctttctaagtgttcaaaataatttttatttattatttttcatataatttcataaaaaaaaattaacaataataaataattataaagagtaaatttatatacaaattgataatatattttataaaataacataaataaataaaaaaaaatacttcatattttaaatatatttacatatattagtattcatatataaaaaaaaccaatttttaaatgcaaaagtttgtgtttgccaatagcattggaaagtgaaaaccacattttcattagattttccttgccagtcaaattaaagctcaccactttcacttagccaacattaaaatattaaaaacctaaccaaacataggaaactttcagattcacattcccacttctcccattaccgcataccaaacggccctttagggttttatttttattagggttactctcattccctcccacccccatctctctctctctctctc

SEQ ID NO: 165065 - DNA, 1767 bp, Cannabis sativa
acatttaattacagatatattaaaattgtaattaccaaatgtaattacaacttgggctaggattttatttattttatgtttgaattaattaatgacaacgaagccaaccaaaaaaagtagtaaacagaagaaatgacctttttttttttttttagtaaacagaagaaatgaccttttagttacttgaataaagaaaaaacattccagcaaataatattggattaatatttttttttaaaaggggattaataatttttaaggaataatattaataattaactggtcaaattttgcttactaaaaaatgagcaaggtcaatattgtgtcattaatgaatctattttaaataataataataataatgaatctattttgcttgtgattttccctttttttcttaattggaaaacagacacgtcttacgggactagatctcacacgttattttatttcttatttcttaattaataataagccatataaacaacaaaacccaaaagtttcaatactttttttcttttttattttcaaaaagtaacaatacttttggttaggaatgtattttcatctttgattatgattaaaaaagtgtaatgtgttctctcttttgtttatcaatgcaaattttgttaccattatattgttgaaaataaggataaaataggttctttctaatttagaagaaaatttaattttgatttgaatgtaaataagtgtgtatcgtactagcccgatttatatttttccaatgttttgtcatgctagatcataaaaaaataattaggtcacgtcgtgtcatgttataaaaaaatacggatcgtagtgtgtagaataatattacagagtaggctcgatatggcctgtaagttcagtaatttcatgtcatgctcaaatttgtaacgtactttatttggattagtatgtttttcttagatagactaacttattttgttatataggctcaaattcatgttttatatgtttgtatttttattataattgatgagttaaatattacaatttatgtatatttataattttgattacttcaatatcttttttaataataattacacataatacataagtatatgaaatataattataattattgtaatttaaatattactattattttaattgataaataattatttattattgttattataattaaattattatgttttttaatgtgtgatgatttcgaattaatttatttatgtttagatgttgtatttttgagtttattgtattattttaagcctaaactcatattttttttttgtattgtgtctaaacatatattttttttatccgactatgtttgtgttgtgccagtttcatatcctatcaaagtttgatccatagtttttttttttttttttggaacggattaacggatttgatccatagtttgaataacgtgagaaacaattaatctaaatattatatttgaatgtgtgcagctttttagattttcaatgttttggttaccttttctcagccaaaaaactatatatttatgtatgttttggttaccttctaatcaaagagtatatacactgaacagagaaaaataaagcaacaagtatggaaactatttactttaacactttcaaactttgtgacttatttaaccacatgagggtagctcaagtggccataagtaggtgtgtgtgtcttggaggttctgagttcgagtccaggtaaaacatgtagttgtaatatataaacgcttaactaaaaaaaaaaaaaaaaactttt

SEQ ID NO: 165066 - DNA, 4083 bp, Cannabis sativa
ttagcaacttggtaggctcttcatatcaggtaggtggcctgtcttgtttggtcgttgatggcttcctgttgagccttcaatgtttccatctctctatccctcgattcagcgaactgacggctcttcaaatgcaaggttcactgcaacacagagctcttcctgatcatgatgcaaggtattggtatgaccttgcatgagtccaagagcattgcgaaggttttgaatctcagtgtcatctcctatggtcgtctaaacattggttgctaaagggattccagtactgggagtacccaggttggcggtgtgtttccagtctcttgcacaccgcgtgtgatcccaactagaggagatgtcacaccttgacccacagtaggtggttgcgtgtttggttgctcaagattggtgactggtaggacccttgcattccctggagtctgcagtgtaggatctgcgactagtggatcaacctgatcaaccatgtctctgcgagtttgcaccaccattttgtgtgtctgattaaacttaaagcaaagagcaaacttggattattgctctcaatgaaagtaccaaaatattaacctcgcttttagccaatgacaatgagccaaataataagcgatagaaaatgtaattaagataaggtaagaaccaataaaacagtaaagaacacaagattttaaagaagtttggtcccattagtttggtaatagcctactccccttgaattgtattaactcaagaacaaagaatacggtgttttctctcttgaagctctcacaatgaaatctttgagtgttttctcttagatctctcagaattaattcttttcacccctattccagtgaggatggatcactatttatagggctaaatgcataaagaaaagtttcccttttgcttacaatatctataattggtaagaacatacattacatatttagaatacataaattgagagattcagagagcttgtcatatccctttgatacgatccctggattgtagggattgttttcttgcttcgcgatgtaagtcctggaattactaagtgttgatacgctgctcggaccatctacccttaccctgctcggtcaggcagactttatccgtgctggtgtatgctgagctctgtttggaatatctcttcagccaaatgtaggaaataggagccacgtgtcaccagtatatgctgtcacgccatagtgcaaaaaatgggataacaatccaatcaacttttatcttgccataaaggttctagctctcacaagtggattgtatcataaataaagaatacaaattaatgtgagacaataaaattttgtatttttcctattgctataaggtgtaaaaacaattgattataaattaatatttatgatcaagagaatgtaaattacaatgtagagaaatataaggtatgtcttgtatgtaggaaattgctcataaaggagatattcatttttaatagactttcttttagtttaattgaaagactatttcaggacaaacatggtactaattgcttattatgattttaagttttgtcaaatgtgacaatgaattattaaagtgtcatttataaatggtaatattgatgacaaaagttatatggtgcaatcagaaaattttgtatccaaagatccaaagaatatggtttacaaattaagaaaattcatgtataaactcaagtaagcttctcatcaatgattacataattttcattaagtattctcatttggttttgagatagaagcttttaatgattgtgtatatagcacaggttcagtgaaagtaaacatatgatcctaatattatatattagtgaaaacttgcttaccactaatgatgtactcattttgtattaaggattcaaggtatggtgcgattgttcttaggatattcttaaattataacaaaagagatatatcaataaagtattcaaaatgtttggcatgaaagatactatactgggtgataggcttgtagctaaagaaaataagtgtctaagttattaccttgaaagcaaccttagaatttaagaaatataaaaagattcttcatttagaatctaatataagctcaaacatgtatatgaatgtatttaacatacatatcaagaatgttggacagatatttaagtaatcctataaagaacttttggtatgcagctaaatgggttataagaaattaatggagaacaaaatactatatgttcacttattagaaataagaaaatagaaaatttttggagatcattaggatttttgattctgatcttataaaaattttaattgtgagattttttgtcacatatgacaacaaaattaggaatagtattaaaaactattaaagatataagttgtgacaataaatcaatcaggttgcttttttagtaacaacatgagctttacaaggtctaaggcacattgactttaagctaattgttatgaaaatgaagttcagagtaataaggtatctatagaatatataaggacaaattctatgtttttagatccgaattattaaggatataccacttaagtctttttaagagcttgttgctcatatatgaatgttgtattatttaagattgtgatggtttagtgggagtttgaatttgaaatgttctatcaagctaacacatatttatggtttgattttgtagataagtatggacttaagttttgagtactttaaatgtattatttctattgaggtttaagtataaagttataaagaataaataattgatctcaattaaggaggaccagttagaaaaaggcatgataagatcatattcgcatgtaaatttaatgctacacatctatgattgatctatgccatttatttgtattgatatacatgaccattgatgggtttagccacgctaaatgttgcgaaagccgctttgatcctatgttagtataatcaatgaacgagattgttttgaaatacctataattatgatagcaaaagttaagcgcttataaggttacacactatcaaaaaatatatgtaacccaagtgggagattattggattaaaattctcaatatggactcatatgtatattagtgtattgctattagaagtttaaccaaaataaaatgatcattttagtaattgtgagcattcggtattaaagtgtcatgggctaaatgtataaataccttaacagatatttttaatttatttaggggctaaattagaaatactttaaataataacctagctatgaggttatatattggtagtggtccccaagaaacaagagccactctattctcatcttcccaaaatcacaacaaagatcatctctatgatatagattaagatcatcagtatctatggattaaggtactcttccactatgtacattcttttctttgaatcaacaaaggtattctttagatatatatattttacacttaaaaataatatgtaatatgtttatctatggaattaaatgttattgcatattttatgagtgataaagaattctaaacagtaaacccaacattattaaaaacaataatgaaaaaaataagtaactactgtaatttttttaaaaaataacaaaggagacaaattttatgaaaaccaaataacatcacatcactatatgggatccgtgaacattaaatcaataccaacccctagtgtcgcaccaccgacacaccaccatatcctaaagagaagaagccaaaaagggatcctcctagtaacgaacctgaaccaagccaccaccgatctacccaaaccaaccacctccctggcaccagtccagagactccatcattggaccaccccaacagagaagggacccacacccaaagaagacagagaataagagaatagcccagtccacactcgagagcccgtcgacaatgaagacccatgagccagaactagatcccctgtgcaacaccctccctgaaccagatcccatcgatactgattccagtgaacacgaaccaagaacccaaaaatattatattatttataaataatataatgtatagattaaatatgtacatgtatcaaaataatatgtaacatatgacattatatattatgtgtcat

SEQ ID NO: 165067 - DNA, 1123 bp, Cannabis sativa
tacccacaaagctatgcacagcccacagcagcagctgctgctgcaacagttgcttcggtacagcaaccggcttcagcgacccaggcctattacagcggttactattaagacgaaaaaatgttttcgggcagtttttttgccacctgtaatcactttttttcgtcttttctttgttcccagtcttatttaggactttttttttgggctgaaacatgggtatgtagctaaatgcagatcttaggagagttaaaaggaaaagaaaaaaaaggatgagttagtgtgtcagtggcctttgtatttcattcatatcaagcttactatctttttgaaagtattaaatgtcttgtgatgaagtcaaaatcgatcccattaacaacataattttcacttacataaacgatcaagagagcaaaatataattaaggttaaatagccatataagtatttaaaattttaagtttctaagcagtataaattttacttttagtggtattaattatttaatgtttgttaaattgtaatgtttttttttaattgtattttgttttgaattattttaaatttattaaaaaaatatttgaaagtaattgatattacatgtttagagtcaatgatttagaatatggtatgttttgtttaaaacaataacagagttttgattgttaaaattaaaaaaaaaattatagtttacaaacattgaatatttatacaattaaaaataaatattgtattcatcaaaagaacttattctataattaataactaataagttactaatttagtaaaaaaaaaatagtcttgtattactatttttttaaaaaagccttttgagtttatatttgtaaaatatggaaagagtaagtagattctttggtaccatttatggttccaaattaaaattcaatttctattccatatttgggtgtgtgaaggcttttctatacctttattagatttaattttgctttttcttttcttttatactagttttgtcccatttctcaacaaaaattacttgagttagatcagcaaaatataaataaaaaatgagaaaaaaataacatcgaagactttttttatttatacttttataattgatattttatttatttatatttttata

SEQ ID NO: 165068 - DNA, 1555 bp, Cannabis sativa
  modified_base (1505)..(1509): a, c, t, g, unknown or other
tattcaactttcttaaaacatctctaatacatataatataatcgcacataaattaacagttaaataaatgacgagctagtttaaatgaatattttccttcattcctctaatgtatatattataactctaattatttcttcaaaatattttagataatattgctagtttattatgaacttttccaaaacatttctaattcatatttatcgactaatattaatatatataaattaactaaatgattagctagtttagatgaaatattaaactctaattatttcttcaaaaaaaaaaagaaaaaaaacagagtaaattttctaacatatatattttttctataataattaataaatagaaacagaagtaaagatcatatcaaataaaatatatggatcgatcagaactcaaaaacgagtagaccaattctcaataacatatcaaaactatattatatatatatatacatacatcaaaatctaaaataaaatcagagaaaaaaaaacaccccaaaatcctctgatttcattatatatataaatatataatcagggaccgacagagatgggtgtggaagaacaagaaacaggtccacccaaaggagatctggaaatctgttgttgtcgactaataatctctctaacaacaactgatcttctctctgcttttccaggtaaccaatcaacaattttctctgattcttccttgattttcttaacctggttatgaactggacttgagtcgatcaatacgtatctactattcttgttattgttgttgttctccatttttgaaatttaaaacgaagacctgatttgtttgaactcgaattctgagaagatgaagaagaaaaatggaatgtgtgggtatatatatagagagagatatatttatagagagagaaagaagaagttaggtggaaattggggggtgtttggatggagtgataagtttgaatcttttattacacgtcatcaatcatgatttatttattttttacttcttctaaagttccaccatttaaaacggttttaacattttcaactccaataatttattttgactattgttatctcatattatgataatatatgtattgttattagtcactagtggtgtttaacactttttagacatatcttattataattggctagcgatactctttaaaaactattatattaaattatatgggactcgatacttagttggaccaatagcgatattgacacatagcagggtactaggcaccattggtaccctttagcatttctcttgatattattggtagtggcgctttataatttgttagagattcgataattaattacactgatagtgtatgacaccaagtatgatgctagataccagtggtatcttttaacaattctcatttattataaggtgtttctataatagactcactcaaaaaagatgtactgatatatcttttagaaaaaaatttaatttatttttttttcatattaatataggtgtcgtttggtaannnnnttttaattagttttctgtttttaaaattgaaaaagtaaaaatattt

SEQ ID NO: 165069 - DNA, 1436 bp, Cannabis sativa
  modified_base (949)..(954): a, c, t, g, unknown or other
ctctctctctctctctctctctctctctctctctctctctctctctcgtcagccgcatctattttttttcttgttatcctctctcattgagaagctttctaaggtcgaacgaccaatctctgacgaaggatggtcaaaatggacctcagattcgtgatctacgcctcccaaaatgcacaggtggtctcatatatctctctctcccttctccctttttggacaagagactgtcgaggaaagcaccccatgcctccggtgaacatagatccatgatccacaacccccaaaatccctgaatccgagatccccaacacaccggtagtctcaacttttgctcacctttgtttttttttttttgcttttctctctcgatcattactttgtaggtggatggcttggtgttctcgtcatgattctcagtgtttggcattcttaccgtggatctcgactttggaatcccctttcgccggcgagccagtgaaggtctggatggtgaagggttcgtcgctgttcgtggtcgacagaaattgattgtggaaattttttttgttttgtaaaattttaggttcaaatatatcatttgtaggatttttttttgcttgctgtaaaattattttgtgtgtataatattgatttctcttatgagttaagatttttttgatatattatctatgtatggtaatattatgcagtattagattataaaaagaaatatgcttagtattgtagttgtatatttattttgattaatttttctttattatatttttataacatttatatatttatttaataatgaatactgaataatatattattgaatattgtatcctaaaaaattaaatatagctaaaataaatattataaaaaatagtggaaacaattaaatattatttaccatatataaaatttgaataaataaaaatattaataataaaaaaaaagatannnnnncacttcatgtgtgtggctgttacttttttagtctgacaaaacttgactctatatgcctatagtgacgcgcataaagtgaatgtataagggtttagtgacacgtgtgaagtgtcactaaaaatagtctttctagtcaccctcattagtgacgcgcgttgaagtgtcactaaacagttttagagttactcaatgtgtgtcactaaaacccgtttttctagtagtgaacttactgttgcagttcctcatagaaggcaaggtaccttgggtgccaggtgggtgaaccctctgtccaaggttactgagacgcgcctgcgggatctcgaccaagatggctacctcagtgaattggactgttacattcccgcccacaataaccgagccacatacccttaaaggggaatgtgcgcttggtcgagtgctcatgcccagcaaggggcattgttgcctttgcacccgtattttaggaatgtggcagacttctt

SEQ ID NO: 165070 - DNA, 665 bp, Cannabis sativa
atatctgataaatagatttcccattgtgttgtattacaagcccatactcatctttaaattgtgagattgtcgaggaagatcttggtgtgagacatcaaggattgtcatataaaaagatagcaacgagaaagaacttcaagtttaatttctatttttttcttctttttgttcaatgtatatatatatatatttgtagaagtagatctgacttgttggatatattttccgctgcatatttctctgatttgatcactaaaatccaacaatttttagcgcaagcagatgaagaaaatatacctatttttatcataacaactttagaccaggttattattaacttttattttgacgaaaaatcagtttaatgtactattttggaaaatacaaggtctaatttataatttaataaaacagatggtccaattaataacttttgtaaaacacgtgatccaaaatagtatttaccctatgagcattgatgtttggcaccactccatcaccttctagaggtggcaccttatcattggttacgatattctctaaaagttctcacattaaattatatgagactaaatacttaattgtaggggtgagtaacatccaatctaatccaattgaaccgaaccaatccaatcaaatccaattacaaaaaattggatatccaa

SEQ ID NO: 165071 - DNA, 1810 bp, Cannabis sativa
attccttcattcagggtactatctgggactgagactgagactacgtataatatgattttctttttctgctctaagtgatccccgagatcattgtgcttggcgttgagtttttaccttaaatcgatcggaggatccttttggcttttttcttttctctaccccagctcttgatgcacggatacatttttctagtctcctcggtcttgaggactagtctttcccttaggaaatctgtccctctgtggacctttctctttacgaagattggagcaaactttatgtggatcttttaggaagatcagagcaaaatttatgtggatcttgagtctttttatttctttttcaaaatggctgtagggtttgccattgggggactttcggaagggtatcagataaggcttagttctcgattcttgtgcctctgattcttcgatggctgcagagatccttctctcgtcttgtcttgtccaagacgtcccacatttggatgcacgtgaatgcctacgacttccatcgccctttgcatggcgatcaatatctcttgaatccttctaatttgctccttttgctctgccaactcagccctggtggtcatttggtcttaacgccatcagttcagtatagctaccatcatcatacgcctcatactcttcttagttttcttaatacttgggatcttttagtttcatcttgctcttccacatctatccgtgaaggcacttcttctctatctggacccacaagatctttaggcagatgtggttgatgagtgcgatttctggtcaacaccatcataccaagactttatttatgatattccttctatgaaaagcttcctacaacactaaaatgttagcatagatttttgacaactattaattagagttgttttaatgattaaaaaaatatttaatacgaaggatttttagtggagtcgtgaagaattaataagttagaaaatttactcggtaaatttcaagatctgcttattaggagcttggttacattggcctatggtcctcacaatgtctgagataatatcatcttgtaaactcaactaattgatttattaagtcaattagaatttgaaaatagactatgtgtcatcttcctcttcgctttcattcacaaattttgaaaatagccatacactatgaaattttgaattctcaatctcaaagtattgtttaaaggtgaattgagtatcaacccacactatttaaggtgctactcaggccattgtggaagactcatgaacacaattgaagaaaaagaaaaatccaagacaattcagttcttgattatactctgcaacataaatgatcaaaggctagagaactgaacagaatgagaaattatattctactgcaaccaatgtgagattttttttttttttttaactttatgtgtttatttattgttttaagtttattcatatataggttgttggattataaatttataatcaacatacatgttagtaaatataaattttggtgaataagttctaacatatagttctatggatgctcttagagtttttataataattttttttcttttgttctatacatattgacggtatttgttattatatctgattagatgtaaataagatgacatattcaaattgacaagaaagataaatgacgagaaaactttatgtggttgttctcttttatgtatattgtgagaaaaataagactaatggtgcaaaatcaaatcaataaaactttaaacaatcaaacaattagcaatgacaagattaataacaagaacaataatgagagataaaacaagggcaaacaga

SEQ ID NO: 165072 - DNA, 1175 bp, Cannabis sativa
aagagccccttcaagatcatcatcactaatctacaaaagaattggtagtactaataatagcctccattcaagatcttcatctcagcggcccaccttaagggctgcttatgttgatagtagatatcgcggtttctcctcctcttcctcctcctcctcgtcttcttcctcatcctcatcctcatcctcgtacccttccatgtcatcagtaatgtatggaagtagatcatatgcgtattcttatgcattgagtagttctgcatatacaagtggtcccaaacgccaagatatatttggtagtagatcgaaagcatcacgtgttacatacaaagcaaaataagccctacatcaaactcaagtacacgtttggactttatcaccttaataattaattatattaataataatataataaataaatactattttagatattatgttttataaaagttattgattgaagtttctcactttctgttttgttaaataataatttagaccatgtattttgtaaaaaaatataaaaaatttatgagctcagagtcttatttgtactatattataaaatatagggttcattttgttatttaacaaaatagagttcaatcaataatttttgtaaaacattagtctaaaatagcattaagaagtatgttattgttaattatttaagccatataattagttctataatatatagaacgtacagccctttttggttgtattattattatagctttcttgtatgaattcatggaattagtacaaggtaatataatataatgatatgttcataactaagtactctaagattattttccttgttcttgccacttataggcaaaagttgtttggttcatatgtttgtgaatggtatgtacaattattatgtagtttgttttttaatggaaaatcaacttaggctcctttcttttaaaaatcacttccaaattaaacatttgtatttttatatttaccttttgtacatttccttttagaagaacttccaccgctgtagacatctatacataactaacatatttttaaatttaaaataaacaatcatattttaaatttaagccttcacggtcctcttggaggggtgcgtggacccggtcatagctgaagttgtgggggttaaggaggctctgagttggataaagagacaccaatggggt

SEQ ID NO: 165073 - DNA, 951 bp, Cannabis sativa
ctcacgatgcgaaagctaaatttggtaagtgttggcatgctgcacggattgcttatttcccggctaagaggacttcgtccgagaaaaagtatgtggtgtcctgtttgacatagttcttgccagcaggtacatagagttgattccacgtgtcaccatcgcgtgatgccacgttagagtgcaaaaattaggataacatttgccccccaagtctttacgggactttcgaagttgcgtgtagactttatccgagctgtctttgtatttggatgggtgacacgtgtcaggtgcgtctgttcgcgattcaatgtgaggctgactaggcgtctcttccgttttctgctaattaatgccctgacacaattaatgcttcaaaatccgattttctctcacaacatttgacggttacacttgattatgtttgatttccaatatttgctttttgggggaaccgaggcgtctgagatttttgaaatgattaccccttttcgttgttttgcctataaatatgactgagcattgttcacaacttcattttaaccaacttctctgttaagcaagttcagagcaaaaaaaaatttttgtctcaagtctgcaaggacattttcacaagaaccagccaagcaacttcgcttagagtgactccagacatcgatcagtgagtaagttctcaattccttctccttttactttgcacatttaatttctaaacgcaatcttaaccttgttgtagaagataggcagaaaaccctaggcacaggaactttacaatttgtctttacaatggtcagtgtgacttcatgtttcatgatgcttgctttttggttgcacaatgtctatctttcaccttgcttattcaaagctttgtggagttttgccctaactccaaaactttcaaacttctgggttttgacttattgttgaatatttccattctttaatctgttgagtact

SEQ ID NO: 165074 - DNA, 1432 bp, Cannabis sativa
tggctgggtgcacggggcaggctggacgcgcgagctagctgtccacgaggttcattgatgtggatgcatccaagagatgcgtgacgcgatttgactaaaggatacttacaagcaaaggacgcagggaccgccttttgtccttttctgtgagtacagaatatctagtgtcattcacccgcctccttgctatttttacttctcctatttttggtagttaacaaactcatatcttaaaaaataaatatatataaatataataataaattcaataaaaatataaaattactttgaaaagaaaagttaggaagtaaactaagaaaattctatgcttacttaaataaatctagatttttgaagaaaaaaaaataaattcaaaattgttctcgtaaaatttaatttttacaaaaattaaattttaaatatattttttatatcaaaatagattttttaataaatataaataatttttaatttcttaattatttttaaataatttcttttttaattttttttgatcattgagaataattttttttaaaatttactaaaaaaatattgaatttttctcatttttattttaaaggggtaagatttaatagttgtcaaagttcaagggataaaattgctaatttacaaagacacgtaagcttttaaaaaaaataatgagacaacctaacagacggactaaatttttataaatgtaaagtttaagggcgatcttaacaagttgtatattttaggggacaaaataagtattgttgaaaatttaagaggtaaaattattaattattcaatttcaaaataaccttatatttatattattataattaaatatcaagtcctatatattttgatctaatttttttttaaaagaaaaaactcattaacttaaacatcactagtactagtgcctattaatatatcttccaaagtttagcatcaactataatatcatgtttactaataaccaatatgaattaattgtaagagagtcattctcttacatttgtttatttaatttattaaatttaggaaatagagaacttgattaaataagcgagaaaagaaagggagaactttccccacttttctagagaatgacattaaggataatgaattttatttatttttattttattttttaatattaaatttataatgacaattttatcctttaaaatatgtcttataaaataattgtcttatactatagtttaactcaaaatggtaatttagtcaatttaagcattctgattacatttcttgataaagtaaacaagataaatcactatcattccgtttctaagcacttttagtaaacaacatattattgttaggctatttttagcctaagtttcgggtcacattttatagttgtttttcttctttattattattttttggaatagaattacgcttgttttctttgatt

SEQ ID NO: 165075 - DNA, 1273 bp, Cannabis sativa
ctcccttgatgtaggttatggtattctctattctcggtttcacaacattctccaaggcgttgacacggcgatttgttgtcttgattgcttcgtcaagagttaaaaatgatgtttgaagtgaggcaagctcaacaagaacctcgattgctttcacataagcagcacggcagagttggatctgttgtccaccacgagccaatccagtgaggtcattcttggtttcaccctcagtaaaataatcaaacttcggaagcttcacaccagcaatgttctcttgccttgaacgaactttaagagttgcagtttgaacattctccaggacaatgtgcttgatgttctcaccagcaacatatttggcctcagttagcgcaaatgatgaagctttcatcacatctcccattgattccttcgttgacactatctttttcagaatctgacggaactgcacagttaaagcatcactctttttcttgagaagagcatggcctcttgttgcaccaacaagacgtgctttcataactcccagcatagtaacagtgggaactacattcaatcgctgattttgcccagacatcttttaaaaaatctacaccaaaacagaaaaaccaattaatagcagaaaaacaaattctaatactgtaactaaaggaaatttaaagagaaattaaagcttcataagaaataaaacattacaacagtacacaaaaaacattagatattaactcttgaatactaaagaagcaaaacttctaaaataaatgacagttgaaaacgtaggtaagtgttcttaaacaagcaaaactctttcggtacgtagaaatctaccgaaaatagataaaagcagcacaaataatgttcaacaggacttaaacaaggagtatgtgaacatgaaaagccatggaaagaaaaccagcttctaacaggcagaataacaatcctatccacgaaggtttggaattatacagcataatctgcctgaaattgtttaaagtaatacaaaggacaccggtgatgccaaattccacataaagtatcattccgttatcagtgtaattcaatacctgatgctacatattttaatttaataagtaatattggaaatcactgaccactaacaagttaccacctcaagtggtgttggacaccaaaggtatcacaatgttcaactgtttaaattgacattttgaaagtgttaaatagcaaaatttgataaacaaactgaaattgatcatgtgaagaagtatactatccaaaaaagataaaaaaaaaaaaa

SEQ ID NO: 165076 - DNA, 897 bp, Cannabis sativa
tatgtactctaaatatatatgctgcataatctattttgactttttagcaataagactgatcggctgagtaattaatctttcattgtgaattattttattttattttttttttttgaatatattgtgaattattttattaggtataattcttgcaagtaattttaataaaagggtgattaatttgtaaggtttatatgttacacttagtacttatggtcagtccgacccgtttttggctgaagttatggcgttgaaggaggcgctcacttgagtgaagggtaggtgggttgagggaggtgtgcctgttggtgtggttatggaggtggactcgctgctgttggtgcgagccgtgcaacagaagaagcgtttgttgtctccggtgggacatttaatttcggattgtgttgctcttatgcaatcctctattttgtttcgtatttcaattagttttgttaaagggtccgggaaccaggcgcctaactttttagctcgcttttctggttctattccttgctgtgtttcccacggggtgttgtccctgctggtttaaaagctctcttagtagttgatttgttttaataaagtttaattttttggttaaaaaaataagtatattaattaaatttatcagaaaaatattttaataaatggttaagaatatatatttataaaaatattcgtataaattaatcaataccaatatatataatgactccatagtcagtttttgattttttagaagacactttaagttccttaatatatatattggacacaacgtaatagtcatgcatatatccatctatatcttttatctatctatatgtaatgttgagtggtcatacaaacctatttatctattttattattattttttttaaaaaaaaataagataaa

SEQ ID NO: 165077 - DNA, 1171 bp, Cannabis sativa
tgttcatctcaaaaaatgattcaactattagtatttcgccatgtaaataattataaacataattattttttatacgacaatgtagattataaatgttttaagaaatttaaaataaaagaaaaattcaaataatgtacaaatgctaaaagcgtgtttaaactaatttgatgcacatatttatatatctttatatgtaaaatatgattatctaactgattattagtttgataattttttttgtcaattttaacaaaaatatataattacttattaacttgaaataaaatttttctttctattttttttcagtaaataaataacactctagtattttattcatttttattgatcttagagtatctctaatggtaagattttagacgatgtttggtgaggtggacatattatgtgacaaaatattgagatgctatagcattggagagaagaggatgccatctagaaatttgcatgaatgctgtgttgtagcatcaatgctatttattatttttttaataaaaaattgaagctaaaaaaatattgtagttaaaaattaagatatataataaataataatgtgtgagatcataattatagtatttttaaagaatgttatatattggagtgtctttagaagtaagagcaagtgaggaggcactaaactttagatttggtgtgtgtaatccctccaatgtagcagcaaatggtacatcatatatgccgtgtggctacagtgcacggcatatatgctgtggcactgtagctacgacattcttttttttcattttgtaataattattattatttaatttctatttataaatattgatattattatttgtaaatataagattaaaaatgttacttctacaatgtacttttttaaaatagatccatcaatgcactcttatttgttgcatctgagaaatttttttagtttaattgttgtatagtcgtttacgttatagctatttaaaacatttaataaaattttgagaaatttaaaaaaatttaacacgccgaaaataaggtgcaaacagtctgttgcacgcaaaactcttttattttatacatgcgtgaaatagattgtttcaaccctgaacattatagttatttaagaaattcttataaatttcgaaaaaaaaaaattaaaaaaaaaaatgtaacaagccga

SEQ ID NO: 165078 - DNA, 2353 bp, Cannabis sativa
ttagaatttagtgatgataaaattctactcacgtaaaaatatataaatttatcgttaattttattttattattagtaactgttatgataaaatttagcattaattttttatttatttattattttttaaagaacaattatttatttctaataaatataaatacaaatacaatttatttactaaagttatcaaatatttatatatatatatatatatattataggaggaattatatcaataaattattggttggtggtgataaaaataaagatgtaaaataaatgtgaattgatataattcacacttaatagtataaaagatgtcagcaatgttaagattaattatcttttcttttttaacaaaaaagtattaattgtacattttgtctaaattaataaataataatattatataaatatatatatatttatttattcgatttattaacaacctggaaaaaaattaacatgataattttgcctgtgcatatatttgtatattcattaaaagagttaccacacaactaaaacttgtaacataaaatttgttagtgtcttggcacataatctagcttgcaaatttttttgcatagaaatatataccaatcaagttttattgtcttataataaaaaatagaaattgaaataataaagaagatattaccttaataaaagtattttacatgtttgattaatatttttggagcatatcaattataatataattaattaagatgatgtagagatcaatatcataatcaaaataagaaatttaaagttataataactaagcttaagagggatattagaaacaaaaagagaaaaaaaaatagtataaaaagcaagagaagaatatgataatcatgagaatgaagatggtatatactatatatatatacatacaatgaaaaatgtaactgcaaaaaattaaagtaaaaatttttattgtaattaatattaatattcatatataagttttattattaatagctttggtttttcaacttgcataccattttattataatgaagaaattgagtataaaacgtatatactgattaacatgatttataaatatgtaaattggcttatggtctcaggaaatttgactgtttgagagtttaaagtattaggattttattatcaaaagagggtcattaatgttttgatttaaatgttgtattattattgttaaatatagaaataaaataatatagaaaaaatgagaaaacaaagaagatgtagaaaagtcatagaggcgggcacattattatacctaacaacaacattatatatagatatagatagatactcaaaaattacaaaatgtttatgttgttacagaatatatatatatttacatttttacggattttttttcttacacaatgttatttttacgttgcaaaaatataatataacgttgcggcaacatgaaaataatattaatttttttaaaaaaaaaatcacaaatccgtaataatataaagaaaaaaatattcgtaaaaatatataaaaaaataattttaagtactttatgcaaatttccctaattttattgctattattattatttccttaaaaaaaaaaaaagaaatactcgatctcattaaaatccaaggaaaaaaaaatattaaggagagaagagagtgtcatgctgctattattattgttcaaattacaaagaaaatatataactaataaaaatgtttttttatataactaagtggaaatgattaattattttcattattatagctcttatttttataataataaattatattattgtaactgaaatagtaaaatttataattagttgttattaacattatttgttattaatttttttaaataattagtaaattttttattaattacactatatcacttgtatattttgtatacaaaattatgtatttttttaatgaatttaaaagacataagaaaaatggtactaataaaatcaaaaaataaaggactgaattaaataaaaactcatttgaaaaaaaaaagaagagatatatatgtatctgatatacattagattataaaaataatctcattttgtaagtaaataatagaattacaaaaattgtgagatcttgatgagagaggagagaacaaaaacataagaggtgtttgagagcaaaaaatagtgaaggtaaaaaggatgcgtttgtaattatagtatgtgataccaatatatattcagagccaggtttaaaagtgaggggggccaaattcactatcactaattaattatatatgtgctatttttaggggaattactccatatacttttttttaaactttttttttttttttttaaatttacgttttgggtttctaaa

SEQ ID NO: 165079 - DNA, 2550 bp, Cannabis sativa
  modified_base (2514)..(2514): a, c, t, g, unknown or other
catgggttgtattcataatgggggaagccaaaatgttattgggtgatactcacttagcggggaaaagccacttcaaagaccattaaaaaggacagaataagatctaaaagaaaataaaccgagcacatatttgaatatggtaccgtggacaaacttcctcgttgagcctctggaggaatctcaaattctagttcagggatctgcattcaacaaaaccaaaacaagaagctcactattaaatcaaatacactatgatggcactaaaggaaactgtttaaacattgaaatgataaaacatatatttcgaaaagagattaggaattaacccaaaatttgaactttacgacagttataaactataaaaagaattgcagtaccataaacacaaacaagagcaaggtatagaaaaaaaaatgcccacttttcatgggaggcaaaaactcttacgctcttacagaatcaaaatttacttctctacaatatccgtgactaaacaagaaaagtggcttgcccagtgctcattgaagccaaaaagaaaaactatcttatgctttcctctaatgctaatagagtaaaagcttactttctgcaaattccaaaactaaaaaagaacagcaacttgccataacagaatcccaaatttccttggatggtaaccacaaaggatgggaaagatattttctaggactagctaagttcaaatcaagtaactattctgatagcatggacctatactacatcctaccaagaaacatcatgcaagtttgctattctgttcaaatcaatcggcacacatttatcaaatggttcgcacaaactataaatcatttcagacttttctacctctatcagggtaacatgtaataaaacaacagtatgactaatcccatcccatacctcccacttacttcaaatgacaatctaaaactattgtaactgttattcaattacgacaagatagataaaggaatccgcacggagttcatatcatgcgaatggataaaataccttaatagttgcagattcagattttaccacttgtctgtcaagcatctgtttaggagtaaagaaaagaaaaaacaaatctttattagcactatggtgagagaggttctctcaaacaagaaactccagaatttaactaacccttttaattagaaaaataattgaaaattataaagacatgaataacaaaaacagcttagatgagcaactcatgagcttaaaagctttgtcaatcaattacagaattcaaatgctcaacagaatactaaaaatttcatgattattcaaaaggtcaaacatagtagataatattaagttgacacaaccttagggtcacctgcagggacctccaaacggcagttgcatcccttgggttgaatctcaccagcaaactgaacttcattatttctgccaaaacaaaaatagagtcatctttcacattaaaaagcttgtaaagcagagtacccattttccctcattgaaaacaaattctccaaattgagattttacctctccccacaatgtgtacactcaaaggcagataatagaatctgtaaacgaatccaaagaaaaaaaaaacatatttaacaataataataataataataacaataagctaagaagaaaaagaaccaatttttcttgaatacatacctttctgaagtgcggaatcacagtaaacaaaaacttggttgtaccctagtgacaaaacaaaacccaaatatttgaaaaataacaaggaaaatttattgaaatatatatatataaatagttagagagagagagaggttacattttcatggcaacgcatgcagaggctgtcgagttggtaaagaggggcgtctccgacgtcggaggaaagagcttcgacgacggagccaacatccactatttgatttttgggttcggccataggaatgaaaataatgtgtgtgaaatttgagattggttgtgttaattgtgtagtagaagaagtagttgttatagtcttctaggttagagaaaacactagaactttcatttcaaacctttctttttaactcactttcatttagtggttataatatttaaattaagttttaagtaaatatttgtaattagttcatgttattaatttttttaaaaaaaaaaaaagtttgaatacattcatagaaaataatgacttaatatctaatagttatgtacttactaaaatttcaaaaatataatttatgtattatttgcaactgaaaattaaacttaaaaatttatgttagaaattactcttaattatataagaaaacatttggcaaccattaaagtactccctatagagtttttttactctatcttttaaaatacattatcaaaactttattttctttattatagagcacacttttacattacatcatttgaaacatatcaaacactcatttttatcttccaaaactaaagagatatcttaattacaagctccaagaatttaacacatacaatcatttatgtcatatctttatatattaaaantgtctatctaacggcaattcttggtttaacagaata

SEQ ID NO: 165080 - DNA, 1974 bp, Cannabis sativa
atattttattatgttgccttaatccattaataatgtggtcttgggaatgtattgaccattgtataacctacatgcattatgggttcgcaggctaagtcttggattatattatataatcggtttaagttattacgtgttacttgtttgtattcgttatgttatatttttattttagttataaccggtttgagttattttgtattgtttgtctttattcattataacactattatagaatcgattctattttaattataactagtttaaattattttgtgttatttatttttatttattatgtcacagaactggttatggaatcaattctatttttacttatatttgaaacatttacttctggtaatttttccgacgacagtagcttttcagacgatatttctagcaatgatgactttttcggtgacaataacttttccagcaattttttcggcacctgtgacttttctagtaaaacttattattatttataaatgtaaattttttactttttttttcttacagaaatatggcataaaaaaaacctatataaatgtaaaaaaaaaaaaaaaatccaaacctataatattatttatgtcataaaaaaataaactatactatattttatactatattttctcctatgaaaaaacccctcatagattatagaaagaacagaaataaaagaaacaatccaacctcagttcagatacttcccagactctctcccttgattcaatggcctcttcctcctcttctcccaatgttctcacccctctctctgaagaagaaagcctcatccatgatttcgaccacatctctatctcttcctcgtctgacccaaatgccttctgcctcatcttcaagcttctctcccccagaactgctaagcctgcttggatcgaaaaggctatgtctgaggcatggacccttcgtttcccaaccaaaatctctgagtatcactctggcctttttctggccacattccaatgcgatggggatcgccgtcgcgtcctcgaagagcaaccctggcactttgacaaatttctcatagtgttcactcaccctgatgtttccctaacccccacccctgaaagtatcagatacaccccattctggattcaagcccaccgtatccccttcggtcgcagaagtctccagttggcccagttcatagctgatgaactgggggaccttattgaaatctaccctctctctctgcttgagaactctggcccgttccttaggatcagagtcttgcttgacattaccaagcctctgcgccgaggtatgactatccgttttaggtccatccatgaacccagatggataagcttcaaatacgaaagcctcccaaatttctgttacttctgtggtcgtctggatcacacttacaacaaatgttctcgttaccttctccgctgtgacaattttccttcccctccactccttgaatacactgactcgcttcgtgctccggctcaaccccatctcaaaaagaatccttttgacatctccaatggtactccgcttgaagagcttatccctcctcctgcctctccggctcacagtctccagcatgcggttgaccaatttcttcgagtccattccccacctcactccaccaacattgttacgtccacaagcatttccccaaattacgccccccctcagtcaacccaccaagccgctccaaccccaatcatgaccacgtccaccatctctcacactgccaaagggaaaggcattgctttccctgtctctgaaccacctatatccaggcccccgggcattgttatccaagaatcttccacaagatcttctcccacttcctcagtgggaacccgtaagcacttcactaggcaatcccactcaagttggggactctgtcaaggagtatgctcaagcgtgctcgtgcagctcctggtgatgatgttgtggtcccttccgtttctgatgatgaaccaacggcgggtg

SEQ ID NO: 165081 - DNA, 1272 bp, Cannabis sativa
atgtgcatattcctcaagttaaaagttattattataatttttcaaatatttgaaaaacacaactacatttttacatggttgaaaaacaactattacctatcagtgatccgggtttctttttctgccacgtttcagtttacattgagctatactttaactctcgaatcccaaatatttggttaatggtaataaaaacaaaaaataaaacaaataaaaattatattattttaaaagataattaggaacttataatattataagtggtgataaaatgtttactttcaaatagtacttttctgggctgaaggtcagtgataaaatgtgatgtaatgtgacacattccattggaggtggcgcaacccgccttagagagtcttggcgaacattcctggttgggatcgaagcactctcatgattatgcctatagatagaagagtaaaacttggtagtcccctattttccacaataaataaataaataaaacctggccggtcctattgtaacaatataatttacaagggaatattttccatttgaacaatttaatgttgaattccaagctaaaatcggcagattttatttatttagctaagaaaagactttctggcttagtgacgtctatgattcacgttgatgatgtaatttgggccattaattatgtcggctttaacgtgttttctactatactttcccgcggtttctttcttttcttttttgagaattttaattatatgttgacacatttcaacctcttacttaattaatgaataaaaacaatttagaagaaatgtcaccatactgtgtgctgccttcatttcaagtaatagtttgatttcatttgattacagcatatgccagttttgagtcttttggccctccagtaataattatttaattgtattatctttaaatttaatgcaaatgtcgtatattgtaaagtatattttagactgtagactgtagagagattaatgtgaccaagatatttatatataagattgggcactacatgcgaaattccatttgataattgtgccaaatggaatacaacagcattcaattcgtcattagttagttagcggcaagatacgggcggccacaagatatgaccttattattattattatattattattataaatcttctaattttataaataaaataatataaataacctagaatacacttgggactaagtaaattatattctaattaagaacttataactaaatagagttacactagaaaaaaaaaatcaaaatactaaaaaa

SEQ ID NO: 165082 - DNA, 2018 bp, Cannabis sativa
aataatcaaagatctagggagaatgcaaatgtggttatcaaaggaagggaaaaccaatacaacaccatcttatacctcttaagtacatttgatctatctagcaacaaattatcaggagaaattccagaacaacttacatatctcgatgcattgcaatcattgaatttgtcgggaaattatttgagtgggagccttcctaaaaagattgacagtataatcgacttagaatctcttgatctctcaaggaaccatttgtctggccatattcctacaagtttgtcaagtttatcattcttgagtcacttgaacttgttatacaacaacttgtcgggacaaattccaataggcacgcaacttcaaagcatggatgcttctagctttattggcaacaaattgtgtggaccgctgctcctcaaaaagtgtatagaagatcgtgacacaacacattcagatgcaagtaatgaagatggagaaagggaagatgatgaatactggtttcgattgggcataggaatggggtttggagtgagctttgtgggtgtcattgttccgttagtggtatgcggattttggaggcgtgcttactttcggttttttgaagagtatttgtggaacaagtttgtggactattttatcaaaataaagtacatgttttgaaagtatttgtgtcaatcatgttttaaagtctttttttcttttgtaagtgttgtaaaaacctattttttttatatgagtttattatggtttgttgttgagttagtacaaataagggcttcttgattctttgatctttttgcttctttgtgtttttctgtgctaacgtttcttgaaggaattccatggatgtgttgtgaagtttcaaagcaagactgaaagctgaaagctgggggacataactgaagggagtttagtgaagactcgataagctggatcagaagggagttgagatgtagaaagtgttgaaggaatttaaaccattgaagcaagaggatcttgaactagaaattgtaaatctcaacttgatatagtggatgttacttaccttggttctcgggtaacccaagcactattcccttggaatttgtttttggtacaaaggaagcttgtaatttcgtgatgttcatttcttgttttagatttcaagattaatcaaagaaagattataagtaaaattgatctaggtaaagataagtcaaatacatcactttcaagtgtgcttcatatcattttgagagatatgatccccatttatgattttaaaagttttcactaataatatatttgtgtttactttcaaaagaaatgtgtattattgcttttgaaaatgtattgtggttaggaatgtaaagtactaacggaacaataacaccaagaaagctcactccaaaccccattgctatgcccaatcggaaccaatattcatcatcttccctttctccatcttccttacttccatttgaatgcgttgtgtcatgatcttcaatacactttttgagcggtggtccacacaatttgttgcctacaaagctagaagcatccatgctttgaagttgtgtgcctattggaatttgtcctgacaagttgttgtatgacaagttcaagtgactcaagaatgataaacttgacaaacttgtaggaatgtgacccaacaaatgattctttgagagatcaagagattccaaccatgtcatattatcaatttttttggaatgctcccactcaaatagtttcttgacaaattcaacgattgtaatccttgaagacttgtaagttcttctgggatttcacctgataatttgttccttgagaggtctatgtcacacaataaagataagatggtcttgaattgtctttcccttcctttaataacaagatttgaattctcaatagccaattgattataaacaccgaagtaagaaaataagagcatgtttggtattgttttcaaaaaattgtttttaaaaatgagaacaaaaaatagcttttgaagtttttaaaaataagtcatgtttggttag

SEQ ID NO: 165083 - DNA, 599 bp, Cannabis sativa
  modified_base (283)..(284): a, c, t, g, unknown or other
ttacttgatagagaaagatgcattgttctctttgatcatataaatcaaatataggatagaaaaattatgtttttaatatcacatagtgataacttttttaattactctatatgttgtttaaacaatctttctaacaccataatcgacaatagaatatttattcgtttggtacactgtataagagctgtattgtatattaaattataaataatactatgttaaaataaagtaatgcattgtattaattattacaactaaattttttaatacaatgtatgttgtnntatttaatacataacaaatagtccgtatatattagcttgtattataatatttacaaaagatttggggtcaacacaatctcagacccgaacccaggtgctgggacccgaaccaagacccgaaccccgaactcggacccggacccagacccgaatccagatctggacctgggtaccgatcaaccaagacccggacgttgaactcggacctgggacccggacccgaacccagactcaaatccatacctggacccagacccaggacttgggacccatacccaggacccgaccccgtgttgagaatcatgggattctatc

SEQ ID NO: 165084 - DNA, 995 bp, Cannabis sativa
tagtttttgtgttctggtgaagtcgttcatcagttcttggagatgtcgctatttcacgaaattgggagactctaaactacccgattcgcgactatgttaatttgttgaaaagtaaaatatatgaagttgtgaattttacttgtctgcgttcatagctcttgtttaccatgaaaaaagtagatgaacacttgagacagaattagaattggctaagcaaaaccaagtgcaccatgtcaaacgtcaacgcggtcgctgagtgctctttctagagctttcgggatgtcgttttgatctttcaaggttcttgaaatcgaggatgagatctcctaccctattttagactatgctagagagaattctcagagcagaatttgcatttagataatcaaaaccagcgcaccaggttgattgtcaacctgggtgttgggctaaactttcatgccccgagattcttattttctccctgagcttacttctatcttcgttatttttatgatggaaaaaatacatgtagaggccaaaattgggctcatgctcaatatcatatgtgataaacccaaagaatgctcaaataagattgggttaggctatttgactaattatgatggtacggtcacaacatcaagcctaataggcccaaacagtcaagtcagacattaacattacccatgacccatcattgagctcacaatgatccgacccgtcgacgataccaagtattatcactcatctaacaacctttgaagtggtcagttaaactgaccccacaaataacgatctccctaatcaagtggggaagtgcgcttctaaaggagggtgagcggtcatgagtaacgtccttccatggacgcctataagagtcactctcagttacagggagggagacatcaattttcagtcatcttaatacttctttcttatcgtttactctctcattctctctaaaactacatacttatttctgcagtcaagacagtgttggaatttattttacc

SEQ ID NO: 165085 - DNA, 2733 bp, Cannabis sativa
gagagagagagagagagtgagaaacaagttttttattatcttatttttaaatcctaaaattatatctcacattacgtactttcactcttatatatagcattatatatatatttatttcttagttataaattatatatatatatcatatataataataattaaaatcttttaatcctataaaatgagaagatagtatcatttgaatttaaaatttaaaatttaaattcaaaataaatatcatataactaaataacaaaatttacttatatccttttattttatattattttttgatttaaataccttatcctataatatatttaattcaaatgattaaattataattatcatttattttgatttatcttattaaatcaaataatataaataaaataattagacttttatatgtcaccggctaagtcctacacacgtgcgccatattttaaaattcaaaattgatttctcattttttgcataaataagatttattatttcttttacaacaaataataatagactaattctcattaatctcttatttgactaggattaaaataaatattattttacactaaataatatttttctctcttttaatattatttaataataatattatatttaactagttaatatagttttataaaaaaaaaaaaaaaaaactaaatagttaaatatcattttaattattcaattcatagttaatataataattctaaaaaataatttatacaaaattactattttctataagaattatttctcatagaaattaattctttctcaattcattcttcaaattaaacctttccctatacaatgttgtatagaggtgatctagggaccatgaacatatatttcaaagcttcaataaatacttgattattattgaactcttcaatagaaaaatctcatttattaattctattattactccactttatatatagaattgtactcttaattataggtacagaattcttacgtgtagtctattgatataatcaatataagtagtctgtcctcgaattattagttcataattagagttggttaaaagtaatatttttcccttctaattatctcttgaattccttatgtaccattaattcaatgtgaacagttaatctataatccatttatagatttagatccaactgttagcacgcctaaaattaacactataagagaactaatatttcatcctctttgaaagcttggattctaatattgtattacatgtttccagccactcatgttatcaagctctcaaaacaaaagttgtaagaatcatcttctctaaaaaattttgatgagtgaatcaaataactcaataaatacaaataggagttcgtgtatactcaagatttaggcatatctattaatgatcatcattgtgatatgaataattctttcatgataaacaacatgtggatgaaagatgctattacatatcggttcaatcatgtataatcaaattatgcacagtaattttaccacatgtctatccacatgaatcatatgcactagattatagtgcatagtaaaccgtactaggttattccatattaaagattccatattttaatacactactgacttattttattcacattgtatgatcttaattgtcttgtactaccttactacaacataccatctctatatgaaatatagaatttttagatatatattaattatacttctataattaacatatttatttatcttataattgtatttcatatattctttaatatattatccattaattacttgcttttaggacataaaccctaacattataaaggtggttttgaaaaatgttgggttgtagcatatgtttatatgtttcctgatcaaaatttagagccctgggacatgtttttttaaaaaccaccaacaaaaagttagctttgatctctttcttattttctcctagttggcttggttttgaagtaaccgtaaatgtctgcaactgtccatagctcccactcaggggtggattcaatgggaaatgggctaagttgatcagcatcttgctcccctgaccattggtgctcatactgtaaaccatcttccaagggatattgtcaagtggatgaatgggaccctacaacattgttactcagatgtgatgccacagttgatgattctaagtaggggtgcggtctcaagggtctggtttgggacaattctagtcatgtgttaggagctaatgtgatttatcgacatggatgggtttcggttccctttgctgagtatttagccattaaagttgggcttgagttgctctaacaattgtaggtccagaatttctctattgcaacagattgcaaccaaatcattcctcaaatgtgtcagtcttcttctaatagaactgattggagcactgttttggaggagttgacctctaaaggtctactgtccaattgttacaacatttccacacctcaaaacgcttcaatcaagctgctcattacctggcccagttagaaaagaataataattgtaattatctttgggttgaggatgttccctctgttgcttcctctatttttgaagatgattagctgaactttctttggttattttgttggtaataaaaagtttcatttcaaaaaataaatataattcagggctcgtttcgaatgtcgtattagatcgtattgtattgtattgtattgtattgaattgtattttatacaatatttttatgtaaaactatat

SEQ ID NO: 165086 - DNA, 2101 bp, Cannabis sativa
  modified_base (1526)..(1528): a, c, t, g, unknown or other
tttttttttttttttaaaataaccgcttttaaaactcttttttgtaatagtgcaaagcaaattatttaataaaatttgtagtgaccgctgaaacaaaatttgtaatatatagtatttaatccataaaaaaaatatgatatataagtgtgtaattaaaaatatgaaatatatatgcgacaaatacagatcaatatattgtacaatagatccaattagtttgtacaaaaaatagagcaaataatgcacaattattttttttgtctcaaccaatttaatgcccatccatacgtactgagcaaaaatataatttcaccctacagtggtctgtagcagaaataaaccaaccaagcatctaaaagctttgctattgatccccacaagcttataatttataagaacattgctggtgcaccacacaatataagatatttgttctcacttattctcaccaaactacttttccttaatttctctataaataacacgcaccatcggccattatatcacaacaaaataaaaagaaaaaaaaaataacgaattataattataagagtaagaatgaagacttttattgtaataatgttagtagtgggtgtgatgattatggggtgctttggccgactacaaccggatgttgatctgaatctggaacctaatgttgacaggtgtatgaaacctggggaatattgtcatattgcacaacaaaaggtttgctgtggcggactgtattgtgaaggtgagtggttatggggtgagaatagatattgtgcccctatcaaaaattgtatcaaaattggtgctagctgcaatgttatgacaagggcctgttgctacccggcaagatgcacatccctctcggacaaggggacatgtcaagtctttagaaatcctttagatgatgttcaacacagtgcttcatcacaaaatatttcaacttattagtacctacatacctactcttaatcttattataataaaagaattacgtacgtgttttatgtttcttattattgttcttatatattggtgcatggctctatgttaagacatgtactagctagctggtcaggtatggtgtggtttgttaattagtaattataataaaaagtgcctttggggcatttgttgttgttggtttagtactctagctattgagatcaataattattccctttatattgggcatttttccttatgtctttctgttttatttatttatgagttcttttcttgcttttaataaaggttttttattatcttgtgattggacttggtagtagtgaccataattttatggcagaaaaacaaaaacaatgcagcaaaaacaaaaataggaaaatatcgaacagatcgtcaattcaatatagcccgctataatatggataagaaaaattttcacttgcacatatatataaaaacttatatgtatatcagtatatgtaaacctaaatataataatatgctgagactaaatctttcatactcgaacttcattatttttagtttgaaatatatatatatatatnnntatatatttatatatatacatttaatcgtatttatacacatgactctcatggagaaaaagctaactagataattaccagctatatataaataataacttacaataatgtgtttcttaaaacatgagaggatcagtgtcctaagaaataatttaatcttattggttttaataaaatatagattgattggataattttttattgtgttattagtcatattgttagtgatcaatagttaatgcacttagcatttgaatgtgtaaagtctagttaaagttgtgagcttttgtagttgactgaagtatttgctgagtaaacttagtgcaactagggttatgtagttaggttccctccctactctataaatatatatacggtcttatcacaattgtgtacttttgataatcagataaataaaactgattctgtttatttttagtgatataaggaaaagtagttaattaggaaaagtacttaattggtagtattgcactattaaattacaataattattatagatcatatgtaaatatatgtacctaattattttatgaaattttcacaccaaaaataca

SEQ ID NO: 165087 - DNA, 1940 bp, Cannabis sativa
gaacattgtaaagttgcttgaatttaagctgtgatttgaattaaaaaaataagttataaaattctgcactgaaatgccaagcttctgttaaggattttcttttagaaaaagaaataagctaaaaataaaaagtaaacatggaacatcaaagagttgcctcgagttggtattattaagaccaagaaatttcttagccaaattttagttatatccaaaaccatcccttaattgatagggataaaaatctccaaacctcaagttctctctaatggaacaagtacaacaacatatcatctagcaattacaagagaaatatttgtaaaattatttgaatatgagggcatctcgtcctggcccaacaccaatataatgaactggaatgcccacaagttcttctattctctccacatattcacgagcagcctttggcagatcagaatagtttcttacagaagatatatcagtgttccatccaggcattacttcatactccacctataaaaatatatataaagattcatatgcataatcattcacacatgtatgcagttagttcaatcaggaatggtgatgagactttaccttcaattgctcgaggagacgaaggtcggatgggaacgatttgattggtgtgccatcagctagtttgtatgtgacccccaattgaatttcggggagatcggataacacatcaagtttggtgagattcagtgaggaaaaaccgttaatctgacagcaatacttgagagcaactatgtcaagccaaccacaacggcgaggacgcccggtagttgtgccaaactcctgcccggcaaacctaagaaggtcacccccttgacccaagatttcagtagggaatggaccagagccaactctagtagtgtaggcttttacctgcagtataaaagttttagtctttagtgttgactttgttatcactcttaaaattcatctttgaccaatatgtaaaacacaatgttttaaaaatgatccttcagttggttaaagtattagagaataataagatttatttgtatcaatagacacataagaactcaaacaatgataaaagttcaactatagagaatgggatcgatagaaaatgatgaacttaccactccaataagatcacctacaactcttggtgcaattccaagaccggtgcaaattccaccagctgatgggctagaagaagttacaaaagggtatgttccaaagtcgatatccagcatggttgcctgaccaccttcgaccaaaatcttcttcttctctaagattgcttcgttcattacatgcacagaatcaacaataaagggttccaacctctcagcatacctcttgtatttctcaacctcttgtttgagcatttctggactgtatttaaaatctcgaaatcttgatgcagcatctgataacaaaacatcaagcttctgagggaaagtatccatgtgcctcaggtcacctactctaatgccgtttcgtatagctttgctggagtaacaaggtccaatccctctccttgtagttccaataaaagacttggcaagctcagcttctctaagcccatcaacctcttgatggaaatcaaatagcaggtgggcacgatcagaaaccaatatccttccatcgcaggagactccattcgattcaagtccatcaatctctttgaaaaacccaggaagatggatcacaactccatttccaataacacacatagtttcctcattcaaaataccagaaggcacaaggtgaagagcaaatttctttccctctgcattgtagatggtatgtccagcattagctccaccctattcaacaaaacaatttcttgaattgcttcagggaaaaaaatcacagctcaaagctacacttgccaataaaaacaaaataaaggataaaacccagcaattagatctattgagacaattatttccaactgc

SEQ ID NO: 165088 - DNA, 1591 bp, Cannabis sativa
tttcaattatattttacatcatacagaataaactctctctatatatataatggtcataattagtatactaattattattaccttcttgggtagccgcagccttgagtgccttggtctggcatttcttacaattcatttgcaccttcatcacaatcttttgctgcaataaattcaaaattatatttaaaccatacacataattaaagatagcagatatataataattttattaacaaataattaatttaagtataaaccttcatcttgtggctctcttattaattcaaaatgggataatgattatatatataatgggggaaagaaaaagattgttaaggagaaaacacttgggtgaggccgattttatatatatggagatgtgtgaatgaaaacagaaaaagtatagtaaggaaacttcacagtagtactagtgtgtgactaattaattataaggaagacttgctgttgctgttcaaaaaaagaaagtcttccttgtttttttaaataacaataataagtgtcttcctttgtttgaaaaattaacaataatacaacgctagctactagatctttctatgaaattgggaatgtctggtcgtgtataattaattaatgtttgtggggccttacagttgagctgatccatacgtacatcaatggtcgagtaatagcgttagaaaagtgttcacttgtcaaacacacgcgcggtgttcccatgcatgtctggtcaaaaattaagcaagtgtaatttaatatcagatttcatctattttattttcataattactagagtgtagttttctgttccacaccagtacatttacaactacatattgggctttcagcggcggcatgatttgaatttagctctacttagtaaataagattggcggcttttcctttctcctaactctgtagtaggaagaatttataaagcaaggtattttccaaattctactttcttacaagtccagttagggaacaatttagctacatttggaggattatttttgagtcaaggaatgtagtgttaaaggggtatcgatgtagagttggtgattgtgcttccatttctattcttgatgatccttgactacctattcttaattagccttttgtcattaaaaaaaatgagttttagtgacccatgttgagtaactttaaaactggttagtgacacttcattgcacgtcattaatgagggtgattggaaaaacagtttttagtgacccttcacacgtgtcactaaacccttttgcactctctgtaacgccctaaacaattagacatgctacccaaaatacttatgaaaccctaatcccctagacgggattgctaatcaaaatagcgcagaatttaaactcttctatttaacagaatgaaaataaaacttgtaataatttaaacttttaaacagttgggattccaaaaattattacaagtctttgtctttcagccggcctaagcggcaaaatgaaatttcaaaatgcatcactggtagacccttaacccgcttggtctgatatggccccgacatgtacattattcgcccagctaccagactcatggctgatcagctaatgtcttaccc

SEQ ID NO: 165089 - DNA, 836 bp, Cannabis sativa
tactctatcaatccgagtcttgagagcccactttgtttcttcaattattctttccgggttgatccttgttttttgccaaatagattcatttcgggctttccatagattgtaaaccagtccaatggtagcagcagcaagaacaccctttctaaactttgacaatttggctctcccaatccacctgagcagctgttgaagtttactagattgagcatgccaatccaaccaattctttacttccatcaaacaaaggcctgcaactttgcattcaaagaataaatgttgacaagtttcaggctgcatatcacacaggcagcaagcaccactaacctggacaccaaatcgcagcaatctgtcatgagttttcagcctattaagcatggccaaccgagctataacattgtgtttggggatgtttagccttgaccaaacttccttgcaccagttcagtcgagttgaggggggcaaaaacagattgtagcctgcagagatagtgtaattttgcttttgaaacacagcagggtccatcagtattctgatctgatctttgagggctaccatcttcttccagtaccagctagcatgcacggaagaagagtagtcccaccactcttgattcttaatatacacactatgaacccatcgtagccataagctctcttgtttgtttgagatagcccatatatacttacatattgcagctttgttccaaacttcgaaattcttgattcccaagcctcctgttgtcttggattggcaaatgttattccaagcaacagaccctgcaccttgaaacatagcttgacctttccaaagaaatgctctacaaatgctct

SEQ ID NO: 165090 - DNA, 971 bp, Cannabis sativa
gaaatcaatgctttcgatttactgcccaagtttaacatgccaacatggaaaatgtacacgggcaaagaagatcctttgtctaactttaaatactttgaaatgcatgtggctttgcaagcggtaaaaggagttgtatggtgcatgattttcttagctaccttggtagaggccgcccaacagtggtattttaagttagctccaaggaaattcaattcatggaactctttcatggaaaaatttcacgcacacttctcctcttctatgaagctcccatatcgcttaaaggactggtagaagtgaagcaaataccaggggagcccttaagagcttacactagtaaattcatgactaaaactacaaaagtgaaagggttaactgaagaagggaggctagctacaatcctaggaggtattgaacatataagagaattatggaaagaaatcaaaagggtcactgtaagattaatggtgaaattcatggaccacgggtttataaggcttgaagaagcagttcagcgtgtgcacacaattggatagaaaaataacaagccacattccacttcttccaatacatcggtctagcaggaccagaattcaaaaaatcacagtagttcgagtcaaagtggtaaaaggtcaaataatggcaaccgatagggaaatggaaagaaaaaatacttagcaataactctgaacaacatcttcgggagaatgccacaaagttcactgcttttactatcctaacagaggacacataaaaaatttttgcaacaacccagtccatggttccgtaaaaaaaaccacctcccatgaagaaagacatgagcaagagggacaccactaaattctgccactttcatgcaaactatgtgttaaaatttatttttttaagatctacatttactaacatgtatgttgattataacactataatctaacatcctaaatataaatttcctaaaataataaaataaa

SEQ ID NO: 165091 - DNA, 1079 bp, Cannabis sativa
ttgagagtgctattcaattctaagaaaacttagtaaatggaggcatttaatttgtagtctgtttttttgaaggttgtattgatacttagaaatctctacttgttgcagcatgtttgtaatgcagaggccttctcctacgttgtaagcggtcttgcaggtttctacttttaaattttgattgctcggtttttaaccgtgtgcagacctattgaccaaggattacaactttgatcagaagttctctttgtcagtgattggatcatcttcatcaggactgttattatatactttttcttcttgagctatgttcttgggacaactattagttttcagagttatcacaaatgcattgttttccaaactctttcagggcacgtgctaaacttggtttagagtttagaataaaacaaatcgttcaaataatcataccactttaagttacaaaaatttaaaaaaaactccaaatcttaaataaaacttacatttacgtggctcggcacgtaacatccatctaatatatatatatcttaaatatactatcatccttaatcctaaaaaaatggtagtcgctcccattacttacccaaaatttatatgtaaaaaagaatatttaattagtattattgagtatataaaaaaacaaaaattacctaaaatttatattacttttttcttttttttatttttcaaaaaaagaaaaaaaaatcaaatttaaaaaatatttacgaaaataaatatatgtatatactatacatttttaaaaaataatcacgaatcattttttttaattcaatttctaaattctatatatatcttaatctatttttcttaattttataattcaatttactatttaatttttcttaattttatttttctattctctatgttctttttcttaactaaagtttgtagaatatgataaaacactactaactcgaattctaatttaatagtataaaatgatactaatgaggattatatttaatgaattgttataaatattattaattatgtggatgtccaaattttttatttattaccattatttgtaatcaacattctttttttcttagttt

SEQ ID NO: 165092 - DNA, 1522 bp, Cannabis sativa
tatagtcatgacttttaatacctaacccttcggtatccaaatactgttgtctaataagataacccttttatcatttcctaatcataaaatctttaaatcgttgtctaataagacaaccttttgatcattgtctaataagaccaccctttttacattacataacaataatcacctaagttaatctcgatatcaatcaattcacaaacaataataatcacatctcaacataacatgctatgtagtacaaatgtacttttcttacctttaatccagatttatgtatgtcggccaacttaagtggagaaacctgatgatctcagccctatgtcacaacaacggcaaactggtaagtgtctattctaaaacactgcctaatacttgcataaaacaatttagggttttctaccgaatctcgtataaaaaacaccttaagtaaaatacatattttagctctactttatgcttcacactgtagagctcttcacaagttttgaaacggtatatacatcatctaaaacggacacccgagtgaaaaattatggctaaaatacaaaaatcggtatttctcagttactgccaaacagaattccggttggtacaaccctttaccataaaaaaattatggttcacaacaacagggactcaaaaatttcaagttttcacagtcctaaaattttctctaatctaatccaaatgctacaaaaccttccaaaacacctagaaacaacataaagatcatattccacacttcaaacacaacaaaaacaccaagaatcaaaagtttccattgttgagaaaactttgagtttcaaaactcaaacttgctcaaacctccaccaactgctaaaactcttcaaaaaccaataaaacaaatataatttaagctcccaaaaccaattctaatctaaacaaggccatacgaaaccttactcctaaaaaccaaactcaacactaagctttttcttatgaaatcaaatgaaaaagaagaggctaaaagttaccttgggctaggctatcacttctactccaaactagcctccacaactttcaatcacaacaagaaaaaggaaaagaaaattcctgttttttttttagttttggtttgagccaaaagaagaagaaagagagaggtgaagtaaataatgtgtttgaatcttaattgcttctacgaaacattaggttttatttaaaacctatttctagaaaaaggataaagataaatttaaatataattaaaactaaggagttatctatgacctattctagtaattaacattttgccttcataactaacctttagaataattcaaccataagggtattttggtcataccttaatacccctatatatcccagtattttaaaatcaatttaactccctagttccactaatatcgtaagtaaatactgttgtgacatttctggtcccaaatcgggtttccatggtttctagacctgaaaatatttttatttcaaacataactcacattatatccacatattctaaataaatctccgtaat

SEQ ID NO: 165093 - DNA, 1985 bp, Cannabis sativa
ctaataataaatcttacaaattagagatttacatttattatattttttgaatgggttaaaatttacattataattttttcctcatttataggaggatatttcatatatctttaaattaatgttaattaaaagaaatagtggaggagcatcatatacacactataaatatatattaattaaatttaaaatatatttataattaaatatatattcaattattcttcttattttattttattttgagaataattttttttttttggacactttatccctcctccaagactttgaaataaaatactcaaaagtctgaaaattaaattctaatcgttcaatcttgaacaagggataaagtgctccataatagtcattataataacaacaaaggtgagctaattaaaaaattaaaagtaagatattaccaaaaataaataattaaataaaaaaattgtaagaaataataaatcttgaggctataaacaatcattgtaaagacttttggcccaaaagagcttctcctttttttaatttatttttgtttttaattttagatatatatatacaattttaaaaaatgttatcgcaagttctaaaatagttttgtaattatcagattttatataatttaacttaataatttaagaaatgtcgctaactatttataaagcacaatagtaatattaaaaattatgccttatagcaatgctctatattttagggtaattatatataacattcgatacatgtattatttgttttggtataaacatgagtatttataattgtgtatattatagttatttaaaaagattataaatttcaaaatttctaataatttaccgtactgaaaaataatatttaaatattttgtttcacgcacataactatttttattatataaaggggctaagcaatcgtttaaaaatttatttcgagagtgtaacctattcgatttgtttaaaaaaatatacaaattgttaaaaaaaaattacatatgtaataatgaaaaaaattaccaaatataattttagatatatatatttttagaaatttgtgtatactctttaaaggggtattctggtaaacccaagtctgcatttagagaaaaaaaaatagtctaaatttttttataattgcgtacgatgtagttatttaggaccacctatacatttttagaaaatttcaaatagtttgcagtgtcgaaaataagattcaaacaactacacatgtaagaaaatatttgaatcttattaactcagcaagtaatgattgaatccaagtaacctcagaaataatattggctaggcttctgaactttgcttcagtagaagacttgttgatggtgacttgtttttgggatttccaagcaacaatgtttcctccaaaatagatgcagaaccctaaggtatacctcctgtcatcaggatctaaagtccaatcaacatcgcgtaatgcttctaagaaataatttggtgttggttgaatgtgaaggccataatccaatgtaccaactatgtatctcaaaaatctttttactgttgtccagtgagcttacgaaggagattgcatgaactgacatactttgttgactataaaatgctagctcaggtcttgctattgtggcatattgaagagcaccaacaacagatctgtataatgttgcaaataatgattaaaggaaataggataagatataggtaaaggtacttgttgattattttgaacttgagcattgttcaatcttgatgctcctccagttcacgctgttgaacgattaataaagctctgataccatattaagttcagtcttaaagagaaaacaaaggaagtaagaaagaaaatgaagtagttgttgtattgattgaattgcaagagattaaggaagggaaatttgattttctatacttattaaacttaatttttttttgtaaaccaatacattttacactataaaaaatataccaattttttgaaaaccccaaaaa

SEQ ID NO: 165094 - DNA, 1496 bp, Cannabis sativa
aaacttatttatagcaccaacagggagtgggaatgtgatagttttgacagtgtgtaaagtgataggaagttacggcccaaaagttgctgaggtgctagctcttagacaagtagttgctcagtgttgcacgcttggattaatcaagatcgatttttaaatggattgtcagagcattgttcataagattaatgaccaagttctgcttgattcatctttggtctcacttttcaagatataattcatagttgtaatggtttctaagatattttgtttttttgcataattgccctatcctatctatagcatgtggtagttcatttttttaagctaaatatgctctatttgctattattagcacaatttggtggctttactatgatatttgtatcaagtactttatttttgctgagtctattattcaatgatacgtctaattctcggtcttatttgaggttattgctattttggtgatgttttctaagtctattcttctaaaattgttagatatagttagtgtttggtaggactgttagtgctagttttgtgttttggtacttgctaactgttatgagttactacttgtaactaattctttctctgtataaataccattctggagtttgttctttcttataattaatgaagcacgtcatcaagttcttttgtttgaaatttgctttgttgcacctcaattatactttatttcatttttatcacaggaagaaactcttttttttcttcttgaaaaatcgtactttttttttggcattaatggaatcttctaatgactaaagaaagaaaaaaaaaatgtgagatgcataaaatattatctctgagtctcccctgtatatagatttcctatatcctatctatataacactattggttacaagtctaagtaagtaatgagtaaatcatacggttggataaataaatagtcaaattatgtttatcaatataataattgctcatttattctatgctatgactaataatattttctttttcatctctttctcagcatcatccatgacgcgtgggagaattttaattaggttttatatcacactttttctgtttttagaaatgttaaagcgcattagtggtgcttagcgctctcctatgtgtcaatatccaactaagtatcggattccatataatttaatataataatttttagggaatattactagtcaatcgcaacgcgacatgtcgagaaggcgttaagcacaactaatatttaataacaatgctctttttcattttacattacaatcaattattttctacatctaattaaaattaattaatatatagtaccgctacatttattatttatgacagatgttaaacatttcctttgctttgctttgtattactcataaataataataaaaaaatacctaactaataaaaacaaatttaataaatcataacataaatacatattttaaaatatataataggggatatgattttgtcccgtgatgtacttt

SEQ ID NO: 165095 - DNA, 1067 bp, Cannabis sativa
atcaaattacttttctgtacttaatggatgcatgtcataacatttcaaactttaagaagttaagaaaataaatagagaaattttatttatactccataaaattataagtgcgcctcaatattataaaaatattaacttaaattattttttgaaaaatactcttaatattttttgaattttttttcacattatttttatttaataccaatagttagttttatttattttttcacaatttttaaaaactatctataatttttttaaaatttttttctaataaaatttcatataattttttggtttaatatttaaattatattttagggtgattctataatgcacactattgactggatttttagccaatcgacgtggagtcgtaataaatgagatttaaaccaaaatcgtaacaataaatgtaagtaatgacactggaatttacaataaatgtaaagaaagacaccaaaatttaaagaggttcgatcgacccaagatgtcggtaatagcctactccccttgtgttttattaatcagagttgcaaaagtcaagaacagactcttgaatgcaaagaataaagagtgttttttctctaagtactcaaaattgcgaatctatttttcaggccatgggtgaccccttatataggggaaaaggtcggtacttcttgcttcaagagacacgaccaacgcggagctatctcaaccgtctccataatttttggaggtagttgaagtctgatttttatgataatatcccgttattttcgtgtgtttataactatctttgagcttcttatgggatttgaacatttgaactagtcattgacgatgagggtctcttaagagtgtgacacggtcgttgaccacctttggggataaaagctaacacttgggggtgacaccctcgagacccaacctgaggggggcgtcaaattgtcatctcacggtgacccccgagaccccttgtatgttgtgggtagtcatagtattgtgtggatgtcctcatctacctttgagaatgtccttatgtctatggtggggggagtgtcatctaccccttagactaa

SEQ ID NO: 165096 - DNA, 893 bp, Cannabis sativa
caattttaccatgagattgacataaaaaggttatcgatggcagcccgtggacatttgatcgtgctccgctaatcttcgaaaggctgaaacagggagagaacccaaggatggtgcagctgaatagactcgacttctgggttcagctacataacctggagtcgggattcatgactgagtctacagtgagaaatgtggcgaatcatgtaggtacgttcgttaaatccgatcttaattattttgttggtgtttggagggattttttacgggttcaggtgaagttgaatattgataaacctctgaaaaagaaaatgaaacttgagaagaagagtggtaaatcttgttccctgatctttaaatatgaggacctcccaacattttgcttcatttgtggtgttcttggccactccgaacgtttctgcgagaagctttttgatacgcctccggaattgatcgtcaaggaatacgatttgtcattgaaggcagccccacgacgtcgacaacacaccatgggtgcacaatggctacgatcaggggcggctatgaaacaatcgtgtcttggaactccggccagctttcaggcgactttgaatggtgcaattaatggcgttaatgtgtagatgaatcaaatctccactgatttagggagacaggtatcgacccagtgtaatgagccgagaatggagagagagactatggtatcggctgagattggggataagtctaatggaaagtcaaaggcttacgtggatgaggatttgattggagaaaatagtgggattgattccttgctggttttggattctaaaaggagaaggacttttgatgggctgggcaattatgttgatattgggccggaccttaataaattggatgaacctagtttagacaattta

SEQ ID NO: 165097 - DNA, 1251 bp, Cannabis sativa
aatacttcctaaccaaagcatccatcttcttactaacattggtaggaatagagaaggtagacatagtgtaaatgggtatagacatagccactgaactgattgccgtcatcctccccgcatatgagagcgttctcattttccatccttgaagtctcccttttaagttgtccaccagaaattggaattcttgtgatttacttctagcaaagacaaaggggtttccaaggtaattacccatattgcctttttcattaattgacaatgcctgctcaatatccttcctcctccccctagcacatcctttcgagaagtgtatcccagatttatttttattagacgcctgcccagaccaatcttcatattttgacaaacaattacccaaacaaatagtcgcccttacgctggctctcgcaaaaatcacggtatcatccgcgaacataaggtacgatataggagacacacctctcgcaatctgaatgccattaatttcccctttatcctgagctctttgaataaatctagcaagaacatcattacacaggataaagagaaatggggagattggatccccctgacgtaacccacgggagggcctgcaccttttaagcgctatcccattcaacagtatcgcatatgcggagctggatacacaaaccatcacaagttgaataaaattttctgaaaacccatgggcccgaagcaccatctccaaaaacttccactcgaccctatcatatgccttgtgcatataaatcttgaccgccattagcccccctttgctcctattctttttaatcgtattcataatctcttgagctagaatggaggcatcggcaattcctctacctggaatgaaggtagactgcaacggagaaacaattgaatccaccaaacctttcaaccgctgagcaaaaattcaagaaatcaccttatagaaaaaattacacaagcttataggacgaaaggcctcaaccttcgcagcattcggagatttaggaatcaaactaataaaattgaaattcaattcagggtcgaggtatttactcacaaaaaactcttgcaccgcttggataactgtcattcccacagtgtcttaacatcttcgaaagaataccccagacatccaatccggccccggggccttaagcgggtgcatctgaaacacttgctcatatatgatgaatgtatatgttgtccgaatttttttccatgaaaaatatttttttcgattttttaaaatattttatttgg

SEQ ID NO: 165098 - DNA, 2857 bp, Cannabis sativa
agggatcgcatgacgtccagttagacatctcctccagccagtgtagagaaagctatggaggtggttcacaactacatggaaaggtgtctcacccaggtcgggaacaacttcaagactcaaacaacgggtcttttaaggccttggcttcttgtcttctggaggagctttcctcaataagtgatgcttttctgccaggagcatttttatataccgtacttcctgacctaactttcctttcttcattgtttcaggaaaccttaaagtttgggcatacttatgcttgcctcaaagggactgacaccaccgccaagaagaaaatcgaagacttggaggtctagcttgatgaggtgaacaaatagttatttgctaccaaaaatcttgtcaaagaacctaagcagcaaattgaacacatgccatctaccgcaaagttagagaaggacatggaagagtcagagaagcaagcaagggagatgcaggaccaaagagaaagctatttttaatttcctagaatggggagattttaaacttaaggaggaagttgaagatgttaagataaaattggaaaaattagagcaaaccaaggatacggagaaggaaaaatatggcaacttggccattaaaaccttctacaagttctggaagtggaatcccaagggtgactatggatacatggactctaggttgcttgaatccctagtggcttgggccaggaattagaggcatctaaaccccctaggaggatatctccgttcacgatgctgtctcttttggccaggctactgatgatgtcacccagacgattgatctcattgaccctcttactgggctatcctctgaacctactgtcaaggattaggctagtgaaaatttgaacccaccaactccttttgatattcgagagatttggagctcttattttttttttttttctgcacaaccttaaaggccattcagtttaagacatattgtagaccatgcagcttttaaccctggctttattttctatgaagacatatggttggtcgggcagcctttattcccagactgattttcttttatgtgtaacaaagtcactttttaacatacttagcttccaatttttttgcattaaccttgctttaaatatttttcttaagtattcaaacatttttgcatggcataccatgcaaaagcacttaagagtgatgtgttataaacaaattatcaaatttattggcggcataccgtctgtgaaccacttcttaagcgtagtgtttctcaaaaataagcttattgatagtactttctgagatgttatccattccaatatcttcgtaacagtattagttccattttctcattataccggccaagtttgtatgtgcttgaatttgtgatatctgtaacttggtacggtccttcccaatttaggctgagtacccctcctacagggtctttggtgtttagaaatactcttcgaaggaccatatctcccacaaaaaatgttctatccttgacatgcttgttaaagtatcttgccaccttttgttggtaggtgtgtacctctaagttggtctaatcactcttttcttcgatttcatcaagggattctgttaggagggtgtggtttacttcttggttgtaggatattctcttgcgtgatggtggttccaattcaacgggcaacattgctttatagccttaagttaaagcaaatggtgtttgcgtggtggtcgtcctctcaatggtcctgtgtgaccaaagtacttctggaagttgttcgatccagttacagcttctacttgcctgttctcttatgggtgaggaactgtaaaaaatcttttaataatgatgtgttgattgcaaaattcagtgaacatattgttgttgagctatttattattgtctgatacaattttctatgggacactctatcgacaaatgatgtttttaacaataaaatctaagactttctttaaagttatagtggctagcggttttgtaatgccctaacaattggcacgctacgccaaccgattatgaaactctaatcccctaattcaggattactagaaggataagcgcgataaatttaaacttaatttgaaatagaatgaaaataaaacttgtaataattttagactttatagataaccaaaagatacatgtttcgggatcccgtaaatattttcacaaaatattacaagtttatttcagtttatttcacgagccgacctaagcaaaaaaatcagagttacacaatacataactggtagaccccaacccgcttggtctagtatggcccaaaaatgtacacagatcgccatgctctcacactcattgtagatcaccgactagtttatccttttctgtacagtagagcccccgtgagccaagcttagcaagatggtataaatcaccatatacagaatagatatatatagcacataagtaatggtgccaccaaactatttatctatttgatatagacctgggtgttatgctcacacacctatatatgtctatctgcatagacccacgtgttacactcacatgtctatttatgtctatgtagcatagacccacatgttatacttacacgtctatttacagtaaggccttagtagggtttatctcggttatagttaccgagtctaacctgattatgcctagcccgcataaccctattcataaatatgtaattcatacgttatgttctttcagtggtttatcttgatgatatatatcaggtctaacccagtttgtcttatacacataactttggccatatatgcgtacattcaatattactataatatataaaatcttagggtaataaccctaactcgcattccaaataattacgcaaatgacatat

SEQ ID NO: 165099 - DNA, 1340 bp, Cannabis sativa
taactgatttatggttaggaaagactttgttggatttaattccaacagtatggaaagagtactttaacactggatgaagtatagaatactctgatgtctaaagaatttaaaagaaagtaggaaatgaccgaagaagacttgaatggtgatggattgtttgttagaggaaagttcaggaagaaagagaacaaggatcaaacaagtcagaacaagaacaagactggttctaattgaagagaatgtgttttatatgtagcaagttctcacacatcaagaaatatgatccaattaatattcaagaactactttcaaactcatggaaatgcagatctttcttccaaagaaagtgatgggtacaatagtgcaggagtcttggtagtttttgatgaattcttagactataattgggtgttaaactcaggatgttcatttcatatttttccaaataaaaccaagttcatcaagtatcaatcgttcgagaaaggtattgttaaacttagaaaattgaacatgttgtattgaagggattggctcaattttgatcaaaatgaatgatggaactattacagaattaaaacaagttagacatatgttcctgatattaaaaaaaaaaaaaaaaatctaatatcagttgcaatgttggatcaagatggccatttggtgagggtagaaaatggtgcaataaatattgtcaaaggctcaaggattgttatgaagggaatcaaagaaaatggcatgtatcttctacagggtaagacaacatgagatcaagtgaatgttgttacaccaaaaaataatattacaaccttagattggcatagaaggctagctctcattggttacaagggcctgaaaattctagaaaagaatggtgtttttggaaaagataaaattcaagaactagacttttgtaaacaatgtgtgctagggaaggcaacatgttaaaattaagcatacctaaaaagacattcttgattatgttcactcagatctatagggtccctccagaacaccctcaagaggaggagccatgtattttctcttagttgtaaatgatcttttgagatatgtggttatacattttaaagaacaagaatgatgcattctaaaaatttaaggataggagaatattgctagaaactcaaatgggaagaagcttaaaaggcttagacctgataatggcttagaattcttagctgataaatttaagaagttttgtagacatggtgtttaacgcccaaatgtgacttccactagcggtggttgtagtatagatcgggcggtcgattccacaagaaggtgattatggacaaaaccgttggtagaaaaataaaaacaaa

SEQ ID NO: 165100 - DNA, 732 bp, Cannabis sativa
  modified_base (316)..(316): a, c, t, g, unknown or other
  modified_base (573)..(576): a, c, t, g, unknown or other
  modified_base (605)..(607): a, c, t, g, unknown or other
  modified_base (697)..(706): a, c, t, g, unknown or other
ataatgaattgggaataatgcaaagaaaaaccatggttggacttggaaaggtaagatgcatgagggggacccatcaaagatgaatataatgttatgtggtttgttctcaatcttcctaatttggttcttcaccgactcacctttcattaatgtattatattaatattaatttttttgatcgattttattattaatatttagtaatagcttcacaatcaaaagttgttccaatttctctcaatgtctttcctgtctgcttctctcatcacatataataataataaatacactgctactattattattattattattnttattattattattattataatctacatgcattaattttaacaccaaacaaacactatacaatacattttcatctaccaaacatgcttacacctggattatacgccctttttatttacatctttggtaaatttcgagggaatttctaacccctaggagaatgtttttatctttatataaatacatatattcattaggctaattaggatttattatttttcgaactttgatgttgttcctgaattattgagattgttnnnnttaaagacttttatctaattttagtaaannnattctaacatggatgaaagttcattgagcatgatttagggcatattaaaatttgagagacataatttagtagatattaaagtctggggannnnnnnnnngtacataaacaatcactgaaacagta

SEQ ID NO: 165101 - DNA, 1033 bp, Cannabis sativa
aaacttataatatgcatatatattcaacgtatcatgattttgaaacattttaagatcatgatataacaaacactattatatattggttaaagactcatgctgataatgtattataaaatattataatttagagaaacaaaatagaaaagatataagaattttcttagcatcttattctaatgggtaatctcctatttatacatatctgagagtcaaagattagaaaactaagaaaaaaaaattaattacaattaataataataaataaaagatttaaacattcatatatttattaatatttataacaaaacataatttgtattaattaaaggaaaaaacaaatgggaaaaaaatcaaaacacaaagaaaatccacatagtgtttcttctactaaaactcctttattatctataaaagaaaaccaaaaaattaaaacgttatgcattaattaagtacaaactatatttacatggagataaaatcacataaaaatcttgtctaacagttaataatagcatgatttaatacagttaaaaagttcatctatatatagagcattgataaatattcactcacacaataattattgaatcattcaaccaaaaaaaatgttgaatcttgaatgatcaatataaaatcatcaattcatcatattcatacaaaacaataaaaacaaaataattaattgaaatttacctaatgaattatgatgaaactatcaaagattttagcaatttctaatgatcttttcttctttattaagtcctgaatttgaaattataaagaaagaaaaaaaaaagtcttgaatttgagttccttatagtaatgaaatttgatgttgaagatttagggggtcataagttaggaaagaagactctagaattgggaaaaaaaaagtctagatgatatgagaatagtgaaatagtgagatgataattgggcaagtaagttagtataagtgctatttacaaaaatatggaaaaataaagataagttttgatatatatggcataaaaacttaattacactaaat

SEQ ID NO: 165102 - DNA, 1336 bp, Cannabis sativa
aaaaaaaaaaaaaaaacctactttcaaagtgccaaaatgaaaaaacctaaaaaaaaaaaataaatcattttccaaccccttatttgcattatcatttattcttataaagtcttactcaatgattttttttttttacaaaaaaaaaagacttaatcaaatagataatttgaacaataaaatctatatataaaaagaagtatgaggcggtgacgtggcggtctaaaatcacttcaaatagcactatctcttatctccgtaattctcttatttttaatttcttattaaatttataattatttttttaattttataaatattgattcattttttaattaataaattaaaaaatacacttaaaagttctccacgtaagtttataaatattttttattaattttataaatattaattattttttattatgtatattaattaatattaattttttttttgatgaatcagctttagtttcattactccaataatccattttacaatcaaagagcatcccaatcaaaggaacctcacatattaaacacctgctttgtacatttttacatctattgtcaaaattattgttacaaactataagtttctgaaccaagccaagtcctttggccccacttgtctcggccaaatgctatagactctgtgtctcaccatttctttgactgtacaacttactctatctatatcctcatcttttccattctatattttgtcattcctagccttccatatgtggtagactaagcttgccattgcaggcgataaagtgtgttttttgaatttgctgcatttgcttctttcaatccacctcaaaagccttgataaggtttgactagaagctttccaccccaaccactctttaatcttctaaaggcaaagctgagagaaagtacaagaaaagaatagatgatcacaggtttcatcctgagcagtacataatacacatcctggatcattgatgatcccaaatctatgcaatcgttctcttgttcttaatatgccctgtacatcaatccacaaaataaagctgcattttggggtgttaaacttcccccaaacttccttactccaatgcatttttggttgtggatgaactaaaagtttatatccaagagagagatgatacctggattgtgtgaactgttgaacattcaccaatgttttaatctgattcttggcctctaccacttttttccagtaccagctcccttgaatgggggcaatgtagccccaccaatcgtctccccgaatgtatacactatgtatccatcgaacccacatgttatcttctttgttagcaatcgcccacacatatttaaacattgct

SEQ ID NO: 165103 - DNA, 3544 bp, Cannabis sativa
  modified_base (3500)..(3506): a, c, t, g, unknown or other
aaaaaaaaaaaaaaaaaactcgactagaataaaatactaaaaacagagatcataacgacattaaaaacgtattccgaggatccatgttgtaagagttttacaaaaaggataagtacaacgataagtcaaaatataaaatcaaaatacatggtaaatacagctcgaaacaactccaagaaaatcagcacataggctggtagagtcaatatgtacattagtggagaagactgtcacctcatggttgatctaactttttttttgcctttacctcctccacatagcacccgtgagtcacaaggactaaccaagaaaagtaataacaataataatataaattattattcgagtacttagacaatcagaatcaaacaatcgtgcattacacatatgatgaaaccccaatcactataggcatctgtcacaaataaacatcaatataaagatatttagtaataaaaaactattatatcaataatagaaattatactcatctaataatataaattatatatattcatttaatattatatatttttataatttatatattttttattcatataatatactctttaataaatttattttaaaatatttaattcaaatggtgtctttaattttcaaacaaaatattttttgctaaaaaaaaaaaacaatcaaaaatataacacaacatatataattttgtgaataattcaatatttatgtcaaatactaaaaaattaatcatcaatatctatatattaatataaaagaaatcacacaaggagctttctataattttttcttcatattttttttaattttttactaagaaaacgtgattattcaactaaatttattttttgtaataatcccatattgtttagaaagtatagtgggacattacatatacactataaataaattttttctcatagcattttaatttatcccaaaatatgtatttttttttcagaaaactaattgattaaattattcttattcaataattaattataattttttttcttggaactaggaagaggatttttattcaaccatcataaaacaaatacacgctgccaagcagttacagaagatcagaggctattgataatagccattacatttttatctcttaaattaggcttcaaagagtgacaataataaattctagccttacgacagtatttcaaatctttttaatatgtctcaaaatatgtatttttctccttgactaattgattaaattagttttattcatttattaattaaattatctattccatagtcgattacaataatatatattttatattttatataaaaataaaatatatttttcatcttattttttaattttgtgagaattttatattatttttcacatgatttctatatattaatataaagaaaagcacgcaagagtgtaggtgactttctataattttttcttcatatttttctaattttttaagagtaccgtattaatgtactaagaaaacatgttaattcaatttacttcttgtaataatctcacattattagaaagtatagtggaacattacatatacactataaataattttttttcatgctattttcatttgtcccaaaatatgtatctgaacttaagatgcatcttctttttcagtgtgagtgtcgtagtactaacttatgaccaatgttaaatgataatttagaccctatattttataacatgaaatataataatatcacaaagttaatattagtgaaaacaattaaaattaagatagattaaaaatcaggtaacaattgttaatgagggttaggaagaaaaagttttaagattagagtaaaatatttgattacagttagacttagtgtatcgttatattttatttagtaaatattgagaaatatggcttcttattagtaactttattttctttgtaattaaaatttcacatagattaaaaaaaaaatacataattagtatacttctaaattataaataaagttacattcattttaatttgtatatggctaatttatcacttgattgcctaattacttataattttttttttaatattttgagttctcaaatcaactatatatatttatctaatatatttacatactcatttaataaaaaaaaaatactatatatgaatttcttaaataaaaaaaataatcatatattaaatttgattttcaatgattataatgattgtacgatgcactatataattataacgatcacgcgattgcacaaccaacttcatacggtatttatcattttaattattacatgacagtaaaataaatatacatttttatatagaagcagttagtcatatgaatcgtgacctcccttttcatcattataatttaaggcatatatttcacctccacataatttgttaaaattaattctcttataaaacatttcatatagaccaattttatcattaataaatcccttatttttttagattctaaagcttttttagagttgtcatcttatgtaatgaaatgtaaactttcataaatagtagttatattgtttctttctattaaagaaaaaaatgggtctaaatagtttttcaaaaagaactacatcaaaatgacaaatctaatttattaaatttagaaatagttttctttttcatttattcttttataataacacatgcaatttctttgttaattctactatttttaatatttatcacaaagtgttatctttttatattttttaaaaataatatatttctaatttcaatattattacttacaaatatcaaaatactatattttaaattatatctcaacaagtataatatatttatataataaaaaattataaaagttgaacaacaccgcgcgaagcgcgacttagttctctagttgtacataaaataaagaaagagatttgtgatagagtttttcattttaaaagagagaaaataagtagagattttataattgtgtttgaggagtattctaaactaagttgtatattgtaaaggtttcttaggcaataaaaaaatctaaataaaataagaaagttacaaaaggtattttttttttatttttaaaacaaaagaaaacaaaattatatagttttcaaacacaaaatttgtatgttcatttttagggtaaaaaagaatcaaaatgaaaattataattttatatattcttagtttactttaacaatctttgcttactctaaattagcagcatcagtgcaaaattaaacttgacccaacaatacagatggttcacatttattaacagccccttcgtgtgtattacatagatagaataaataagattttgttctccttctatattattattgtgaaattgtgtttctccatccagaaacgctaatacgatgttggtgtgtttgtccaatctaatttgtactattttgctcgcatttgatttacactaaggtgatatttggttgggaggaataaaaatataaaaatataaatgggaatgagaatagaaataggaatggaatnnnnnnnaatttaaaatgcataaaaaaaatgttagactttttatt

SEQ ID NO: 165104 - DNA, 2321 bp, Cannabis sativa
  modified_base (1631)..(1633): a, c, t, g, unknown or other
tttcagacaaggatttttttttttttggtttagagtagagaaaagaaaaaaaaaatgagaagagaaatgaagaagaagaagaagaagggagggggttgggttttaatgaaaattggtaagacttttaggcgacaaaagtggcccctaatactatgggtgggaaaaatctcaccttttccaatggaaaaattttaatatttttagaggcgaaaaatctcgcccctaatacactaaattcgcccctaaagttattcgtcgcccctaaaagtttccaaagttaaaaaaaaaaaaaaactcagtttgtttaggggcgacaactttatgtcgcctctaataccccctctttaggggcgacaatatgtccctcctaaaattgtctcccctaaaaatcaaaattgttttagtgaattgtctctaaacttgaaataagcaaagatttgggtctttatgtaagcaagttgtagaaacgcaaaaagagatagataaaatcttaagtgctaatgcccttgaggttcgaatggatgaagtgatggctctagaacttaaattggatgaccttatgaacagggaagaactttattagaaacagagatcgaggtcagagtggatgatggtaggtgatagaaatacgaaagactttcataacaaagtgttggtgaggaagaagaggaatactattactgagattatgacggaaactgaccaacaactctgtgttgaggatgagattgttgttgatgaagtggagcggtactttacagatatttttaaaattaccaacccgaaaaatgagcaaatccggcgtggtacaaagattgttatttcgcgtatttcggtggccaataatgagcatttaatgacaccattcactcaagaagatattcaccaggttgttaaagctattggcgtaactaaagctatgggaccatacagatatcatgctttatttttctagagattttgggatattatgggagaaatagtcaaccaagtatgtcttgcaatcttagatgatggtgcttcggtgcgacaatttaataagtcaaagtggagttgataccaaaagtacaaaaactaagattggttaaagagtatcgtcctattcttgagtgttgaggctgaattggaagattattgtgtaaactatttagtaagttcttagattggatgtttgataaattaatacgaaaagatagcgagagtctcttgataagatacgagaggtattgtttctcttttcatatagtttagatttaatccatatatattatattgagatgtttgggaatatggttcatattagattaaattatttttaattaaactcattgtcgcttttctaactctgatatggaccgtaaaaattaacacaagtctgggtatgggatcagggtttggggtttggggtggggtccgtgtctaggtttaggttcgggtttggattcgagtccgagtcgggatcggggttccggtcttagtccggctttgggtccaagtctaggttaatgggactgaagtctaaaatattgattaaaataaaaaatttgcgtaaaaaatttttgaaagtgattttttttttttttgtttttacaatttttaaaattttaattcttaattaaaaaattgaaaannnaaaacagttttataaaacatatttttgaaatatatttttacttatccaattaaaaaaaataaaataacaattaaaaaactgttaccaaacacacccataatttatataattttgcaaaagtacattgttatggagtcttttttttttaagagagttaaatatatttttatatttcaatccctttatttaaaaaaaacaaatctatgtttgcttcttttttcttgtcattgtgaccccttttgacataggtggctggctcctcactccttgatttttatactaaatcatataaaacaacattacattgaaaaaaaattattacacttatgcttctaattatttttttatattatttatgtatttttaagttgtaggagtttcgcttttgaattttaacatgtttcaaatagtatttttagatttgtttaagattactaaaatttgtttcccaaactatattgacatttttaaatttaaagactttcgttcaattttattaacattttattaacatacacttgacatagataatagtttaatggacacgatttggtatatgtcaaaattttgaaatataatttggtacatatatatcgaagtttaaaggggtaagttaaaaaataccactttattaatcaattaatcaaatttatgtctaattttatatttaattgaaacatatctcttt

SEQ ID NO: 165105 - DNA, 1915 bp, Cannabis sativa
tgagcatgaagacccactcgacccacccatatcgtctccctcactctcagaccacgaagacgaccacaaaactcgaccctccaccacgcaatgtcagccaaggtaagattttttacctatggtatttttcaatgtttttattattggtttagggttaaagtattgtttattgatagatttagggtgtgtgatttgtgagtcttgggttagatttttaatctgtgagttttggttgagaaactgtaattttagccaggcctgatgcatgctcgatgcatcgtaatgttaaagatggatttaggttgaagatgaaggttagatatagggctcgatgtagggcctgatggtctgtctgattgtctctccaaatttcaagtttttgagttaggctcgataggaccgatgtaaggctcaatataggatctgattgtctttcaaaattttagttttgtgtttggtctgataggaccgatgtagggcccgatagatggtctgatagtttgtcaaaattttaaagtttattgtttggtccaataggatcgatgtagggcctgatatagtgtctgattgtgtgtaaaattttccaagtttagtgttttgtttgataggactgatagggtccgatatagtgtcccattgtctatcaaattttctaagtttagtgttttgttcgataatactgatgtaggtctcgatatagggtccgatggtgtaaccaattaaaagttttattaatgttctctataatttactaaagtattgtgtataactactaatacaatgataattgtagaatgtacgtcatagagcatatcgagcataagatattggaacgcaaaaaccatatctcagttataaactcaatctttaccctcaagctcccaaacaccattataaacccaatctctaccctcaagatcccaaacaccattatacataacaatagcaaaaacagttgaacttgtcatacacagacatttaaacaaaattaacttatagaacaaaaatctaataaaaaagtggtaaaaaaaatcctcatatatctgtcaagcatcgaacacaaataggttttagttagtcattgtagaatactttataactcacccactttgaacaatcaaggagttttttttggcaaatgtcaataatgtgttgtaacatttgcatcctactatttggttaccaaggagacggccgataccagctgctatcgaaaacttgacaaataggtggtagataagtgagatggcttggaggtcgctgggtattgacctttgaaggagacttggtgtcaatcactatgaaggtagtcatagtgatgtttaccatggggcagtttcgactgtgagtggtaatttgattttacaagggagagatgtcagccacaaggagtgatgttaactcacctgaaatagtacatgagctgcttgcatggctccgagttacttagggactgacccactcctttcagggatatatttggtgatgcttgattattaaccatcacttttgccaccatgatgtttgaaatttcgttgacactgtctgagcttgactgctcttaccccagagttgatctcttagtgactagggatgaaaaactttgaagttttatcagttgaagctatttgttgtgagtgagttagacaattattagtgggttattgcttgtgtgcttggtgctcaagcataagttaactttatgattataagtgagatgaatcactgtcgaagagtagtgcagaaaaactcgccatataatctgtattgggtgaaatcacaggttgttgaagaacctggtttgataatttcaactcatagatccttgttaaaagtttaagaaaaaactctaagggaggaaaaataaaaaagacaaattggactaaacctgtgctaagtacaacgtcccatactt

SEQ ID NO: 165106 - DNA, 3018 bp, Cannabis sativa
  modified_base (2958)..(2981): a, c, t, g, unknown or other
gaaagtaaaaggcgtggaactttgaaagactgtaaaaaaacacgaaaaaaatggatgtgagaaaatttgtgcataagcattagactacaatcggtccatatatcggacctatggggccctaacaaaaaaatatattcaatatggcaatcaggcccactatcgggccctatgtcgtgtctatcgaaccctcaccaaaaattatgaaagaaaataaacatcgggtcaaacattgtaccctacatcgggccaatatcaggcaacaataaaatattaaaatccaaaattaccatcggacccacaatcgggccctatgtcgggcctatcgaatctaaacctaaaaattatgaaagagaaaacacaccgggcctaaatttcgtaccctatcgggcccacatcgagccataacaaaaaaacttaaattctaaataaacatcgggctactattgtaccccatattaggcccatcggaccctgatctatcgaagagaacactaattgaacaccatcgttgtaacgcccgtacttgaaaactaattaattttggatttatacacattaaactaattataaccatttaaatatatatttataatattgccagcatcccgtgttaaaaaccacgctcttaaaaatatatataccatatatatatatttacataatatttttttttttacaagccacaagacaatatcaaaaagggcgactcaaaatacagtaagaccaaaactctccaggttgcactgctgcgatatgtacaatccttgtctagccccaactcactgctcctccacttttgccttacccttacctacacaaggtagcaaactgatgattcaatagacttagtaagatatgcataaaatatatatataccatgcaatatcgacttgcacttaggctctcctgagcataagtgcaaggctcaccaaatagttaagaacgtccttaacggaagtacgaccgctataccacatacattgaagtaccgtcccgtactagtgttggtagggccaaattatacttccgggtgctattgggtgttgtaccacatgcactccgtacccacttgtactcgtgttggtaacactgtaactttggcaagacattgatgagcaacactcatttgtggatagcaaatcaagcaacagaccgggccctagaaacccataaaaatattgggaaaatatctatttttaagggtcaatttagtcatttgtatttattaaatatgtaaataacagtttctattttacctatttctaaggatattaggcatgtaagctctactatataaagagcatcaacctatctctaaaacccaaagtctgaagtctcaaaccctaagtcattaagcctctaaactccctaagctctcctctttaagtttgaaaccctaatcttctcttcccatctcttctacatgcccatagcgctctccctctctctcacatgcctccaaggctctatctctctctcttattagagatttgcctattgattcatacattataatcttaagagagctactttagatcccatcactataataatgagtagtgttatctctgggtatcaatacaactagaaggggagtaggtcattacccgctaattaaggggtcgaacctctataaaatcaagtatcttatttactttattattattgtgtaacacgtggcaagtatcaacattaaatacgactccgctatcggttggccagatctcaggtcaacatctataattaacacttccactcaattacactataaaattcgcaacatgtatgtatgggctagtcctaggggtaagctggtaacaaaaaagtctaagaactcgtatagtaaaattaagctaaagcttaaccatcttagcattgagatcaattgatctatgatcaactaagtgacattaacttagaaaaaatataacagtacgtttataatatctttttcactgttaatatcggttcagtccgatgtatagccaatacatctgacacaagtttactttgctaattctctggaaaagatatttcatttatccaattgtaagtaaaccatattattgattgtcacatcaatgtaaatctagtgcattgataaattatgggactaagtagtttaaagcatataatcacaattatttttcagtctgatgacatcactataattgtgactaactatatgttcgggatttaataaaacttttaaattaaacatataatcatgaaataaacatgtgaaaaaagcatatgacaagatcaagatatgatttatgatctttattgattgtaaataagattacattgaagttgtgttttatttaggacataaaatcccaacagggtgccacccagtttggctttattccctacaaatcttctttcttcgtccttttcagaatcttgcctagaggagttatccctttgggtttcatttctcctagcccgattctctagcccatgttctaccccttcatttggaacatacagttcctggcagtgagggtcgtctctattgctagctggaacccaagcttgggtaccagtccttcattgagtatattgtatcaactttttaatgaattttgcatcttccctcgtgcggcaatttgcctctacttttcaagccctcatctcccgagtgctttattttatccaggcattaaactctctttgatgctcatcgaagcattcattcaccacgactcaggtagcctcctgctcatggtacatgccattagtatggccttgcatctgaccaatgatctctcacagatgctcgatctcgagattttggtatcttccttgttcaaggtgaggctcccattttctaagtacactaatactggtattgctctagctaaactcgaaaattttgagtgttattctagtagtcacccaaatagaggtagtacctcttatgccatggacagttttgttggaaattattttacnnnnnnnnnnnnnnnnnnnnnnnntatgttgattaacaccctaaacatgaactttctaaaa

SEQ ID NO: 165107 - DNA, 681 bp, Cannabis sativa
atagtgatatatagtctggccctaactctaagctaagctaagctaatcactttcactgtcttctgtgttctgtgttgtgtgttgtgtgttctgccctatgtgcctatgcactcatcagagaatgtctcacttttctccattttgggtaacgtattttaccctcaaataactctataaacacttttcatttttattatttaccattctttttttaaaaaaatattattattctaaatgccatatagttttgattgatatatatatactatgttttgtaattccacaattattattttataagattattattgttgttattgtaccttttggtatttccaagaacatgagtcaatggttttggtatttttgtcataaaaaaatgagtaatggaatggtcatttattattattattactattattttggtatattccttctctcttgtatgataatgatgaatatgatagtgtaattgtattgattgttttacactctattcaaattctcttagggtttttttttaaaaaataaataaataaaatttaagttattattttgtattcatttagatacaatatctatccacaaaatttgtcaaaaaaaaaaatatattatgaattgtattattaacacaattatcactttttttaggattttttactcagttaacaacttaggaaa

SEQ ID NO: 165108 - DNA, 1284 bp, Cannabis sativa
agaaatacctaaatggtttcctccccggttgagtcttaggatgcaatactagcaaaccaggtgaatgatcaaaggttccttcattggagaaaagaacctctactgtaggatatgtgtccaaccatgcctgattagccatcatcctatcgattttagagaaaattctatcctcactgaattgcttgttactccaagtgaaaaaattcccagtgtattttatatcttctaaagcacactgttcaatacactctataaagtctctatcagcatgatatatttgactctatgttctactctttcttctttagccaaaatctaattaaaatcccccattatcacccatttctccttttgttatacccctggaagaaattccataaagccttcctaccatatctatcattaaaagcatagatcatagtaataaagcaagagaagtgatcccccatagattgtacaaacaaatgcattgtttgactagtacaatttaggatattcacctgaaaaacattgggattccatgccaatacaattttgccccctccatgccatggtacatttgaagagaagcaccatccagcaaaaatatttgagtacaaagcccccaatttgcgagttttgactcgtgtcttgaggagccctactagccctacactattagacaagataaagtgctttatttgtccttgcttgtgtatgctattagctcctcggacattccaacagaggatcttatccatttgcaaaggagggtcatcccccctcctttgtgttaccaatatgctgtagtgaatcaaatccatcgagtttcacccccatttcctcatgttcatttccatccaaagctttgaatgaattttcaatttgtgttaccaggttcctctctatttgtatggccttctttcctttaaccacttgttgaaaccctgcttgatcaacttttggaacctatttgcatttatcctccttaactacccactgtttcttcgtttcccttttcttcctgcaatcatctgcaacatgccccaatccaaaacagtgtccacattttgttggtttccattcaaaatggatcccaatatgagtgttgaagccattttcatctttaaactcaaccatatcgggtaattcattgtccatggctacttcaatcagcaccctagggtagcttagcctttccctattctttgtcacttcatccaccatgattggctttccaacctggccaataattttgaaaagagatctctgccgccaatatactgattagttttatattagtgc

SEQ ID NO: 165109 - DNA, 2948 bp, Cannabis sativa
  modified_base (164)..(172): a, c, t, g, unknown or other
taggacctttgcattccctagagcctgcatgcagtgcaggatctgtcgccagtggatccacctgatcaaccacacctcttcgagtttgtaccaccatagtgtttctgatcaaatttgaagtaaagagcaagcttggattattgctctcaatgaaagcaccaaannnnnnnnntcgcttttagccaacgacgatgagtcaaataataagcgataagaaatattattaaagtgaagtatgaacgaataaataataaagaacgcaaggttttaaagaggttcgaccccgctcagttcggtaatagtctgatccccttggtttgtattaactcaagaacaaagaatacaatatttcctctcttgaagcgctcacaatgaaatctctgagtatgcctcttaggtttctctaaagtaattctttcttcccttttaccagtgagaagggatcactatttataaggctaaatgcttaagggaagatttcccttttgcttacaatgtctatagttggtaagaacatatattacatatttagaatatacagattatgggatttggacatcttaccatatatctgtgatacgatcccaaattataggaattgcttttatactgcacgatgcaagttctgaaattgctaagtgttgatgcgctgctcgaattgtccactgctcagctgggaagatattatctgtgcaggtgtaagctgagctctgtttggaacatctcttcagccagatatgggaaatcaggtccacgtgtcaccagcatgtgctgcctcatcatagtatgaaaaatgtggtgttgagaatgacagttggtattggttttgggaaatgcatggatcttagacagttaaatttgcttattgtaagatttaagaagccaaggaaggtaggaggtctagtggatatgagtttttgaaagatgatttgattggctaagattcctccgaaaataaaggactagattttgaggacagtcacaaagtcttcctactagtgttcaattaatggataagcgagttcaggtgccttgtgtgtgtcttatgtgtgagctctataatgacactattggccactatttggtgtgtcttgttttttcgccaatctgagttggtcttttgcttgttttgaggcggtggatcatatggagattgcttgatggagtttttttcttcttcttcttcgaacctgtagaatgagatggtgtgaaataaaaaggaatgtattgttgaggaatttgttttttcagcattctcttgtcttaatcaatgggtgagagataggaagctaattggtatccgtctttgggtcgtggtgcattggtaatggagctaagtcttggaccaaaccatcgaaaattatgactaagattaatattgatgtatcgatattttcccgggagggccattttgggtttggggcggtggctcatgatttgtgtagtgcgcttacagaggctcggggatggtgccgtgaaggtgttgtttgcccggatgtagctgaagcatggggtgcaaagaggtacttagttgggtcaaggattgttcatagaaaaaggttgtttttttgaggatgatagtttagtgtggttcaagctattcgtagtacaaataaaatgcaatttgtgttttgattaattatcgaagattgtaaaagtttaattaatttttgtgttgcttatatttttttgtatttcgtaaaatgatctgtgaaattatgttgttaattcgagcttcataggctaaggtaattgtgtttcggtggggaactctgtacctactctgctgcgatggtttccttttgttgaatgataaatatataaatattatattgttctaattgatggcattgctatagacgtcgtctcccttgaagtttaagaaattgccttgtattttactttatttagaaattacgtacactaatatgtaatataaattatatattttctttgttattatctgtaggaaataattccctgaatagaccctacacacagcaataaactaatcaaaaacaaggtcactttcgaccttactcacccagtcaaagtctctttttgacttcagtcaaagaaaaccaaaacgacagccccttgaactactgctacaagtcgtttgatttaatcaatgaaaccttaataatcatatcagacatatatatagcctttatctcctcaaacattcaaacaaccaccatatgaaaaaccctagcagatctatttcatcattcttctttgaagaacaacaacccagaaatttatatccctgcccagaaaaataaacccagaaaattccctacagcccagttcgaaatatcccccaaaccgagccttcttcttcactgttcttctctgaagaacatgaagaatatgaagaacataacccagaaattacagccccaacctgatgcacaatatatcagaaaaactaaaccaaaaaatagcataaacacaatagtaaatgcagaaaagtaaaagaagagataacaccggattttatagaggttccccgaaattgtgcgggtacgtcctcttgagctcgcctcgattcactatcaatgttcagagtttacaatggctgggatttcaaacacacaggtatgaaatgataatcccaaatatttacaatgtttttctcctctcttttctctcagattttctctctaaaaccagtgctgatgttgttttctttgttcccttgtgcatgaacaacttccttctgagcttggatctccgaaccctacctagggttccaaggcatacccactgtgtaagcctctaccacatgaactcaatccgtccctttttgttgattctgtactggtctggagttatgttcaagatctgaatttttctcttgtattttctggtctgaatctgtgttgatctctctgaatttaaaatgttgatattctggtttatatatatgttgtagtagtggaaaa

SEQ ID NO: 165110 - DNA, 2224 bp, Cannabis sativa
aagctaccctttttacattgaaggtgcaggaaaagactattgtggacgccaaggcttccgaatcgcttgtcaaaacaacaaaccgattttccaaaccgatagaggtccttacatcgtaaaccacatcttctacaaaaacaattccctaaagatagtcgatttggatgtagttgacactgattgtgttgctcccaaccactatttccaatttaatagaggtctaaatttcacatttagctcgaaccacgggaacgttcaattcttctaccaatgcacaacgaactcgttcttaccaagtttggagaaatctttggttccttgtgcctcgaattcaactcattcaactctagttgctttggtgccaaacgacgacactttgaggactactaataatggttcggagcaatattgtgagaaacaagttgctgtgccggttgatctgagtggaaataattataataatcaaagtattaaaacggttaattatattcgacttttgaaagatggatttactttgttgtggtacgaggcaaattctaatttatgcgaagagtgtgagaatagtggtgggcgatgtgggactcagaatagtggtcttgtttgtttctgtcctaatggaactcaatcctcaacatgtgttgttcaacctaaaggaatagaagctcaagatgctaacaaaactactagtaagttccacaatctcatttcaaattttgtgttttttttaatcaatatagtaatataggacctatttttttttattaattattagttataaaggaaattacactcgtatggttttttgaagactttgttacgatgtgtagatagattattttttttaaaaaaaaaaatatatcttaaaactatttcttctcctccattcaagtactcttcttgcctcaccccaaccgtccacctactgaactctgttcaccagcgacacatttggcgaccaacgacccacacatctagcgatcaatggctcaaacgtaccctagataagagatctccaccaccaaaaccccaaaagaacgaacgaatttcgctgcagttggagatctagaaaccaatttcttaaattggaaaatcggtttcataataaacacatcttatatgagttttggtattcgtaactaatttcttctttaagaaactaattttgcttttttaattcattgccttaataaaattctttttaattgattttttcatcaataaactagtatcttcattatgaaaatagttttcattatatagaagttaaatttatatacaaatttttaagttttttatggtattctttcttatttatagtgatttattccatatttttaaattttttgtaaaaaaaaaaatcatatttggtgtaattaaatttacatattatatatgtatatatattcattttttttttttaaataacccttcgttatatgatatgattattcaatattttattaagtgtagagtaaaattttaaaaataggtattttattttaaatataaaataaaatttaattaagttttaaatagtttttttagcatgttccaaccaatcaatttttatttttatttttgaaaaatatatatatttatattaatagaaaagtctcttggactgagggaccatagacaacaatctcaatcgtccaccttaatgacgatccactaataattatttttaagatttattagagtcagttagtcttagtactattacaaaatatcattccactaatattataattatgtattattatgtatcatatattttaatctaataattattataaaaaaaaaaatcattaattatttctcatgggttacttggtagtgttgtgccaaaataatttccacaagtgtatctttctcagtcatatttctacttctttttctcataagacttttcaagagtaattaagctactgaaaatgaaaagtcaaagaaagaccacgtgacttttctgtacatattcaccacacgactcaatcaaccaactgttcaagaaaataaatgaataaaaataaatataaaatatgatgaagaaaatttacaaccacaatcaataaataaatagtttgaaggttttatgtatagattttttaaaaaattagcacccgttaaaatagatacattgatacacttttatttgttttagcactcgaaataatttttaagtctaattttttcttatggtcgtgtacgttatagctatttaaga

SEQ ID NO: 165111 - DNA, 934 bp, Cannabis sativa
tactccacaatagaattgaatagctaagaggaagaatcaccacctttcagagaaatgttgaagcatgctacatgcaaagaacgttccagagagtttttgggcataaggaatgaaattagaagctcatgtaatcaatagacttcctcaagcaaagttggggttcatttcaccctttgcgaaactgtggggctgtaaacctgcagtaagtcacttttgagtatttagatgtgtgtactatgtattcgtgccaagccacctacgtagaagatttgacaagaaggtgatatgatgtatctttgtgggatccgacagccaaaggaaagggtggaagtgctacgaccctacaactacagagtgttatatctcaaggaatatggtattcaatgaaacttggtggtcactacaaaaggaagcattactatattctaaagaaatggaagacagtttccagaagaaattggaggagcaaattgttgagttacctccaatacgagatataaatgaagaagaaaacaccaaggatgaggcacctcagaatccatggaaaataggtatgcatcaaagagtagaagatgtttaaccaaatgcagtaagtccataactttggagatcaacaagaacgcgaaagtcgaatcccaaatatgctaatgttgttgtaactgaagaagaaaagtttagagagccagagtcatacgaggaggcataccagaactcaaagtggcttgaatctatgaaataagaaataatttctctagagaagaattaaacttgtgagctagtgccaaagccaaacgaagtgaaacccatttcgtacaaatgtgtctacaaggtacaaactcgtcccaacagtaaaattgagagatacaaggctcaattagtagcttgaggattctctcaacattatgggctagattatgacgagacatttagccca

SEQ ID NO: 165112 - DNA, 1077 bp, Cannabis sativa
gccagctgtgaagagtaacaaactgtgacctaaacgcacagctgggataactaccataactaactatatatatctaaccgttttctccaataacccccctcaagctgtaattggtatgttcaagatacaacttgttacatagaaactgaaacctaggagaagacaacggtttggtgaagagattgtcaatttgatcttccgttggaatgtaacagacttgaagctttttctctgcaatttaacttcgaatgtaatggatatctagctcaatgtgttttgttcttgtgtggaagacagtattaagagcaagagcttcggcactttggttatcacaccataatgtgggaggttgtttatccaaagtgattccaagttctgtgagtacagaggtggtccacacaagttcagttgatgctgatgctaaggctcgatattcggattccgtacttgatcgagcgactgcttgctgctttatagagctccaattgactagatttcctcctaagaataggaaaaaacaagaattagaatttctgtcatccaagcttaaggcccaatctgcatcagagtaaggctcaaggtgccgcaaggttaagggcctgaagtgtaatccgagatggggtgtgcctttgatgcatctaagcacccttttacaggcattccaatgattgactgtaggtgcttttaaaaattgacttaacttgttgacacttaggcaagatcaggtctagtcaatgttaggtattggagagccccaacgatgcttctgtacatggctggatttttaaaggagctgttgtcattaagagacagtttattagcctggatcatgggagtggagaaggcttttgcattttcaaattgagttttatcaaggagatcacatgcatatttggattgagtaagagacaatcctgaggagtttctgtagactttaaattctaggaagtaacttacggaaccaagggaatttagagcaaactgtgtgtgaaaatcagaaattaacttggctacagcaactgcatttcctccagtaattaagagatcatcaacataaaccaagactagaagtagtgt

SEQ ID NO: 165113 - DNA, 600 bp, Cannabis sativa
gaggttaagtctcgtgagttagcttagctttgttttagctcatgctatacattttctaagtttaattttataaattcttatgcgttaagctcttgttcgttttgtttatacttaaatctcagattctgcatttgacatctgtactctttgtttgtttcatctagattgcaaccttggcttgaattgcctaacattgtagactttatttataaatctaatgaaaggtcatttataatcttttagactttgtacatggtgtctttaatttgtctcttctttgagtaatagggtgtaaagaattgaagctagcacattataactaggatattgctttcataaatgcattgtttaattagttcttatttagatctgaacaattttttggtggggttttgaatgatggcttattgtgaatctgatatgatttttcctttctttcttaatttttcttacagaggtttggagtgaatttagatacaggaattttgctttacggacctccaggatgtggcaagaccttgatagcccaagctgtagctaaggaagcaggagctaattttattcacatcaaggttagtccagcttttccttttccatatt

SEQ ID NO: 165114 - DNA, 1087 bp, Cannabis sativa
atctttattctttaaatttgtgttgtatttgtttccttagcaactgagaaagggttgttcttgctgcgctagagtcaggctattttatagagcttatgtagatgggtttgactaaattgcttgacactaatgttgagcatgaagcttaactataatactcctttattttttttattagctttcctaatttttggttgatattttattgtaattattttaaatttaaggaaatttgtatcattataattgaaatttgagaagttgtgataaatttattgtaatgttactgtatctgatcaatgattttttttaacaagtatctaatcaatgattggctccatatagagtgagatttggattggtctctagttgcacatatctttttctttttcttctgcattcttttttcttaatatcctgaccttttgaatctttattctttggtctctttactttttatttatttagtatacattgcctatataataaattctctctcacactctcttgtttttcataccattaatatcgaaggccctgcatctctccctctacttgctccctatttgatagattggcttgaatactttatttgtataatacttttctattccttattttattgtatagatgtttactaacagatttatctatatatatttaacttttttaaaattttagttgttgactttgacaatagaaatacaacatggttgtggacttttttcttagacattgaagccaagaaaccagtagattatcctgctgttcccagtcttcaaaggcaggatggatgacatttcgagcttcataagtgagaaatttaggaggaattcgagtagcatccaagaatatttgaaaatgacttcctttaattgatgcaagaacttgttatttccaaggtacataattatgctcatcaagcttaatggacagggaatgtgtaaacgaaaccgggtatgatctatggagaagagcatggttcgatcttgatgcgcctccattaccacttgcagcgaagatccattgaaaatcaaagctctgataccatgttatgtttgagagaaaagagaagaagaagaagaag

SEQ ID NO: 165115 - DNA, 1026 bp, Cannabis sativa
tgatcctttttataataaaattattaagcacaaacataaataattctattaaaccaatgctacttctactttaattaagtatatgatttttttaaaaaaaaattattaataacttataattaatactactaaattttaacataaataatacaacaaactaataaaatgaagtaataaatttgtctctcgaatatataaaacaaaaaagaaatgttaaagggtacgtagcactggggtgcctagcatatttttatgtgttaatattaatattgttctaagttaatatcaggcctcatatagtttaatataataacttttaaggagtatcgttagccaatcgtaaggcaacatgtctaaagatactatacaccattgatactcaataacaatgctaaaaacaaaatcttatacatccaatcttgaacaagtatgtatatattgttgggattggacaactcaattcctacaccaactcaacacatttattagatcatcaaggtctaaattgactttagtattcaatcaaacaattcacaatcatgagatattcagttgcacacatacacgttcaaattccaatctttaaacataaactaaattgaaggttaaagattcaatttgcatacaaaccaattaggattagcaattcaaaaacaaacatgacaatcacaaaaaaataaacagatgcaaatttggtagttgataaagtcggttaaattagttataacagttttattataaacagatgcaactaacacactaagacagatagatgaatctagcttcaaaagtacatgtgtgtattaagcttaatataaattaaattgtacatatagggatagtgagattagtatatagttgactaaacactctcagggctagttctgagaatatataaacttaaagtaaattagattttgaagacttctggcacgtttactatacagtattcaaaatcagaataaattaatagagaaatgtaacggaataaatgaaaaataatcggaatcaatatttgtaatatgt

SEQ ID NO: 165116 - DNA, 1242 bp, Cannabis sativa
tataatggtgatcccatgatataccaaaataggaatgggaatgggaaactagtagtactagaactaaatcctgctatttatagtcttagcaatggggtacattagtataatatactattactattattacatacaacaagggttatagtttttggttaggttgttgtgtatagttatttggatattaatgtggtgtagtagaagaactggggctgatccaggtgttttttgaacgggttcagcttataaaaaagttcaattttacaaccacatacatcacttgttactattttactattactattttactcttgtgggaaaattgggaaagtgtatgaattatgttttgtgtgaggattaaggatgcctttgctttctttctataagccgctttaaccaattttttgtgttatttaaagaagagaatattgattattctagatattattgttttgatttgagaagtggggttttaggtgaacgaagaaaaattaaaatcttaaataaaactaacaatacgtggctcgccacgtaagatccacctagtatatcaatataagagtagaattctacataaggaaagtaattagtaggcaattaatttataatttacattttttatttaaaaaaaaaaagaattaaattttctgcaatgtttttaaattaggtcatataattttgtctgaaaatgtatggccataatcttcttgccgagaataaggttacctggaatgtctccctacctttgacttttgccatgaaaatcggtgtcgccgatgtgaaatcccacatggtgtctatcggcgtcatcggtaatagaaaagcttcagcaacatttttttcaaacaacctttttttttataaaagggagtgtcaccaaaagacaccatttattaaagccaaactggcgagaaaccgaacaatacatcatcatcatcatggacaacaacaccaatacctagtttattcataaacacttgctttacctttgccagtattaaatacatgacgatgagttcagctacttctcttgaactcaactgcgagagtgatgtgtaaggttttctcttgttgacaatagtaagaacaataagttgcagcatcagcagcccaaattataatcaatcaactaaaattagggtaaataccattttggaccatgtgttttacaaaagttactaattggatcttctattttgttaaatgacaaaacagaccttataatttccaaaatggtaaaaa

SEQ ID NO: 165117 - DNA, 1568 bp, Cannabis sativa
gggtgttgtattagattttttttcaattatctattttaatattgaagccatatatatattatacatgtgacagtttttatttaatttattattaataattttttttggcgtgctagtttttttttttttttaataatttcttatttatatgtttattacatctattaatgtttttttttgtatggatccaaagtattttgaatgtagatttaatcaataaaaaaatgatatatggattattaaaaaatatatccaatttgtttaatatttattgtatctactcatctatttgttagtcacttcttcttcttctttattttttacactaaatggaagaaagattttctaaaagtataaaactgcacaatttcattattttaactgagaaaaagaaatttaaaacatatagtagaagatgtagttgcttagtaaaagcttaaaaatatctaggcttaatattatatatttatgaatgataaataagaataataataatagggatttcaaaaattgagaagtaagcgtttgattgggaaaaatgaaaacataggaatatgaatgataatggagatagaaataggaatggaatggaatgaaatttaaaatgtataaaaaatcgataaaaaaattattaatttttttttctcatcatgcattggaatggtctttccgtcaatttcaaaatagaatagtcattctaccaaaatggtggaaatattattctattggaatgacattccaattctttaatatgcaattaaacgaaagaatagaatgaagattatttcatttctattccattctatttctttcacctccaaccaaacgccactcaagtctcatacttttcatagttaagcaaaagaaaaaaaaaagtctcatacttttcacgagtataaaaaaataatatatttttaaaataataaagaaacaattgagtttgaagtgatgaaggtaaaatcacaatattatttttcttaaaaaaaatatatactaaacgctatcttattcaacaacacacaagggcagagccagaattaaatagtaaggagggcagccgacacatacaacaattgtgaattttggtaatttttttagtggcgtgtgttgattaaaaaaatatcataattttttattttcataaacattttatacattactgaaaaatataaatcaagaatgacactcaaaagttgataaaaaaaattacactaaaaagaatatgagtggggccttaagcttaatttttttttttgacattagagatgagaaattcgaacttgggacttctttttttttttcagaagaagtgtggaaccactagactatacctataactaccttaacctcaatttaatactactaaaatttacttttaatttatgtagtcatagacatagtctagtagttccacacttctcctcaagaggtcccaagttagaatctctctcccaaagtcaaaaaaatttacatttaatttctttaaaaatatgagtgtctactaatattaatttaaatatttctatttttttttttaactttacacatttaaatttagattaagatat

SEQ ID NO: 165118 - DNA, 1715 bp, Cannabis sativa
aaaagtgatactaaacgccactttagtttattttaattatttgattaattacttaattttcaataattaattgaaattaaatgtagctaaaatttatcattttattaacgcaaaattaatcttaaaaaattattaattttaggctaattatatataatattatatctttatagtaaattttatagtatttatataatttaaatttgatagtgtaacaagatgataggtgtgtattaaatatttttagttagctcaagttttcaattctagaaaatgtattaagaaaatgaatgaaggtcggatagagtctagacttaaattaggagacagagtttaaattaatgttagagttagctctctatttaaaaagaaagatcgacatactcatatttgataatatatgattagagaaactattaattaagtgatcaagactaattagtaaacacatcaagtcataagttagaatttttattttaataatatgtatgatatgttaaagaaaatatttgaaagtagaatttaagattaagatttagatttgggaatgacaatagtaacgactaaaagtgaggtacaatgatgctaaattttaaaaacaaaaataagttatatacagtaagataataggagagattcaacaattacaaagactttaaattatcgatataaaaataattacattatggaaacactctaaaatataataataattttttttataaagcaatttaaatctatacatacacattaatagtataaattttaaacatcataaataaataactctaagggtgactactcaataattatatttttattgtaaccatgatgattatatttttgttgacttgtaatagtgggttaccaacatgtaaaagttcattttttagaattaaattaactataattaactaattacttaaaataattaatctttaattcgaatatttaataagactctttttagaaattaatattaataattttatttttatattgaagtctctattataatttttttaacagttaagccatttaattataatatttacaataaaactctattattttataaaaaattaaacttccaccccttcttgctaagtttatcaagaacacatgttcaagatccataaccaataacaattaataactttcaaatttttaataatacatattcaagatcaataactaataacaattattaactttcaaactttttgaataatacgtattcaagatcaataattaataacattaatagctttcaaacctttcaataatctatatccaagatcaataaccaatatcgattaatacttttcaaacttttgcaattttttctaattttatatgatttaactctaattacgtaatacatatttagtatatttaaaactgtaaagcaggaagaataaggcaacattatctctctgagaaaatataattacatgacagagggtgaaatgaagtacaaatgtgtcgagtgcggcaaaaaaattatctttaattttataattgttattatatttaaaatttttattttattttattttttttataaaaaagactaaatcacttaaacatggactgacacacttatttcacacttaaagtattgataataagattgagtgtagaattacatttaattagaggtcattcttactatttttttattaattaaggttacgagtgtaataattttaaat

SEQ ID NO: 165119 - DNA, 2212 bp, Cannabis sativa
ttttcttattaatttattagagatgtctccaattttttttatgcccccaaaaaaaagttgtatcattagaaattctctatccaacttttcatgtgtacgttaaaccacttgtgtgaagaatcaaaatttcttgttaaaaattattgtgtgtcatgctgtgttaaactaatccaagtttgacacgttaattaatttttcatttattaaaaaattaaccatctatacaattttttttcccttaaaattaatgctcaaattaattgacgtgtcacaatgattggtttaatacactataaaacacaatcttttaacagaaaatcttgattgttgtgtgaaatggtgtcattgaaagcatatgtaactaactgttttagtggaagacacatagtttaataggctacaacaaattgtgcaacacaccaacataacatatgcgatgatatatatacatatagttcaaaagaatctataacgtttttaataagttaataatgcattataacatacataactaaataataaacattgaaattaaactgatacatatttataaattaaaaaagtaattgtgattaggaaaacatatatacgattttcataaaatctttattaatgtaaactttcatgagaatcatttgataagattggtgaagaactctttcttttactatatacacgttcataaattctataatgatctacacgttcatgcaaatgtaaaacactatgaacttcatcatgttagatactatataatatatatatatatataatatatagaaaattatattcatatattaagcctataacgcgtgcagaatcattcaacaatacatactaattcttcacattaattaaacatgcaaagaaatagcatatccttaatttaaaattaatattttcttttgaaagtaaaattaatattattaaagtgtcgatgtgaaaatatatttatataagcattgaaagtgtgtttggtaacataaaaattagttttttgtttttgaaaaaaaaaaaacctaaataacatatgtctagcttaatcttatcgcatgtttcaaaattatacagggataataattacataaaatattaattttgatatatttttatattcattttttttttacatttttacaatattttgtaaaaacataaaaaaatcacatataagtaacacgaaaacaatattaaaataacataaaaaaaataatatacaaataataaataatcaacaaaaaataacaagagtacagcataaaattacacaaaaaaactgtattttatgtaaataaaatctaaaaaacggtaaaaatattgaaaactccatacagactgtaattttgtaatttttttattatttgtgtctgtgtgtgtgtttttttttaaaaaaaattatgtgttgataaagtagtctctaaatgatttttttgctattaattcatttttggaaaattggtactctaacttatttttacaaattggcccccataagtttaattttttaggaatattctccactattaaaggtactttaattgactttttttttaaaaatttatttttgtgttaatattaaatattttttattttatttttcgtaattttctaagaatatataacctatttatctaaaaaaaaaaagaatatataacctataatttttagaaaaataacctcatatactatttttgtaaccaattttttcatataatttacgcggtttgggtttctaaaatattttctctggtagtttctatatatgtgggttgatataagatttttagttgcgatttaggttgatcccctagttacaataggagttttaattctgtaaaaatgcaaaaagaaaaaattgttttgaaatataaaaatgtaaaagtcactaatattttatttattttttcacttttaacaaatattttttatatatatattactaaatatttaaaacatatttatttatgtatattttttaggatatccaaacaagaaagagaaaagagctagcctaagtaaatttataaaatatatatttttttttttgttagaaaaaagaaaggttacctagtcaaattaatgatatttcttttaacaaattacataattttttttttttgaggaaaacaaactatacataaatcttagtcctactattaggggtgtgcataaatcgatcaaattcaatgagaaccgaccgatccaattacaa

SEQ ID NO: 165120 - DNA, 646 bp, Cannabis sativa
tgataatgattaagaagtatttagaatgatttatctcggtggtcaatgctcatcgagattgaaaaggcacctatccaaggagtttaagagcatctccaatggagatgaaaatacaacacaatgcaaaatttacatcacaataaatattatgcttttatattgacaattatgttatttttaatattttattattaaatcttagttaacatgctcttttgaattaaataacttgcataattatatttatctttacactaatattattattttatatttttaataatttattaaatgaacattaaatgatatattaaattttgcatcaagatttataattatacattagagcacactagtaaacgttgatgtaaaaatgtcataaaactactttttgtatcaaatataactcaacttttacatctcttattggagatgacctaagcccattaaaatttctcaacccatctcaacactccttttgagatcagttgaaacaggtcaaatcctcaacatgttttaaccacttattgtatgtccaatctcgacggtcctatcgagatcggtattgttcaaagtgacaattcactacaagaaatatcacttttgccagcacatttttgtgctggcaaaagttaatattgcgctg

SEQ ID NO: 165121 - DNA, 1011 bp, Cannabis sativa
taagtgtgtataccctacctaagaaatgtatcgaaccacgtattcatattttcggtaaccaaatagttatagtttatattgtatttttatatatgtgatagtataaattaaggataattaataatattgaaaataaaaatcaaatttatctattataagcgtgtgtattttattttacacaaaaatgatatgactgattatttatacaaagaaagatgatggaatgtattgatgaattcttaaaaggtctgtcatttagtcaagttagaactctctcctctcacctgatcttatccagctatatgatgttttggattatagtttcaagacttgagaaagatgaggaaatgagaaaatgaccttgtctgaatgacagaggctcaagacaatcatatatatatatatcgagtacaaagaagagtaacagaattctattacattgtacaactatgaggagtaacaactccacctaaacgctcagctactaacagaaaataactaacattccaactgtattaactaactacactaatactcccctcaagcaatatttagtgtaaaccaaatgaagcatattacatataaaaaattgaaatcgtggagaagataaaggtttagtaagtaagtcagcagtttgatcttgagtaggaatgtagcaaacttcaatcctcttttctacaatttgttctcgaatgtaatgcacatccaattcgatgtgctttgttcttgtgtggaaaactggattcaaggttgaagtttgggcactttgattgtcacaccataaaacaggtggtgtcttatgtagagttatgctaagttcgctaagaagagaacttatccagaccaattcagtggttatagaggcaagagcacgatattttgattttgtgctggaccgtgcaactgccctttgttttcttgatctccaattgattagtgtaacgccctaatgctaaggcacgttacagtgctttttcaattattgtgcaatctttgctaatcaaagaaatt

SEQ ID NO: 165122 - DNA, 1904 bp, Cannabis sativa
  modified_base (1872)..(1875): a, c, t, g, unknown or other
atgcatgtgcacttatttaaggtctttaattttatttaataatcaaaagccataattaaaactatcttaaagtgtcaagcactataagagatgacatatcgatattgatgtaatttattatcgatacattttgattaaataaatgatatgaaaaattactaaccacttataacgtgctacattggtatgatgctaggcacctttaagtgcttaatagcagtgttcttatcgttattacttgacgttctttttttcactttattttttttatggatgtgaattttagggaggatgaaatgcaacaacttaatagaaagactaactcacaaatggctacctttagtcttctttctctgttggtttgcttatcggttgctggtttgcagttctggcatttgaagacttactttgaaaaaaggaagcttgtctagatcaatacttcttccaccattttcatattcataatcttttttggtcacttgttgcatattggcaactttgtatttatcaattttgtatttaaggtgatttgttaagaactactactatctaccatctactctatctacaaggaagagttttaagtttatttatttaattaactttgttacacacttaattgcaatatgttttttttttttttttaaatttgctcatcatttttccatgttttaaaagaatttgtcattgttacactctttactaagtgttttgaccaaaaatggatgatgaattttttatcaaatttatataattactctcgggtttttctcaaagatgataatgcactaattcttgctctttcttgtgttactcttttttattcctttctttctttacgttaaaccaacctttagtctttatagtttatactactttttttgtatgcatagtggagttgtcactctttcatgctatggaaggtacgtgtacctatgtgctattaatcttcaatgattagtttttctgagagattatctttcgtttttcaaactaatttttgtggtggtaggtgttcatacatttattctacctttgttatttccaatctgtatcttctttctaaatttgatttttgatttgagttatctcagattctcgatgtattttgccttttcatgatccaaggtacatgctccatcttgatttaatttggggtatcgttatctcgacttcatatgagatcccacttgattctagttaagttcaaaatgttggtgttagtcaaaattttggttttatcttggccatagctgcataacatcttattattttggtttaatttgagtttaatttaatattattgaattcaagttaaaacttattttgacattttctgaatcataacttttattggtcttgtttaagttaaatctcatctcgatttagattgagtcatggtcttccttgatctgaactgagctaaatcctacctcgatttagactaaatcatggccttcttttgctcggcccaagttcagtcttatttcaaccatgttcaagctaagatttatgtatgatatgaattgttcatacttgtctttattgtcttttgggttgagtggtgttagatacatattaaatctgcacccaaactttaaatacaattatattcattttcattttaatcacttgaattaaagtgatgcgttcttaaaactattgattaatatgttaactaatgatgtaaagagtaaaatgaacaaattttgggggtggttaaattgatgagatattttgctcaaatagctttcactagggttgttcatccaattcaatccgcacttttttggtcaaacaacatcgaattcgcattaagcgcggatttcattttttggatccaattcaatccgcacaatagctcaaatccannnnaatccaatccgcaaaagtgcagattggat

SEQ ID NO: 165123 - DNA, 1933 bp, Cannabis sativa
  modified_base (1845)..(1847): a, c, t, g, unknown or other
aggatgaagctagagaatgctatagcatgtcgctccggattgccacgaggcctccagaacgaacgattgtggtcacccatggggggccttgccaaagcgacaaaatctcgtcaaaactagaccctcgaatttgtgaggaagtgagaatggagtttgtagaggagttagatgaaacagtaatctcggaaagcctacctaaggtccttaaaattggaaaaggctcctcgaaacccttaagaaggagttgaaggagttttaggagagtaatctagacgtgttcgtatgggggcatgaagatatggaaggagtagatccaactgtaatgtaccacaatctcaacatagattcgaaggtgaaaccagtaaggcagaaacggagggccttgaaccctgaaaagtacgaaattctgaaagttgaagtcgactaaattgacatgataaaattcatccgagaagcatattacccccaatgggtatcaaacctcgtgttggttcccaaacctaacagaaagtggagagtgtgtattgacttcacccatttgaccaaggcttgcccaaaagacagcttcccgctacaacagacagaccaactagtggatgcgacggtggggcatgaattgctatgaaccctgtcgatgaagaacacaactcattcattaccagatcgaggcatgtattgttactgggtcatgcctttcggactcaagaatgctggggcgacgtactagcgacttgtaaataagatgtttgctaacctaatcagccacaatatatggaggtatatgtcgacgacatgttaataaagaccaagaaggccaaggatctaatccacgatctgggcgaaatgtttgttaccctttgcaagtatcgaatgaagttgaatctgctgaagtgcgtatttggtgtgttctccaaaaaattcctgggattcatggtcaacgagagaggcatagaatcaaacccagaaaaaataaaggcattggtagacatggagtaacccaagaacaggaaagaggtgcagtgtctaactgggagggttgcagccctaagtaggtttatatcgaggtccactaataagtgtctcccattcctcgatacctttaaggggaataaacaattttcttggggcaaagattgtgaaaaggatttcgcaagtgtgaaagaacatttgggaaatccacctttgttggctaaactggaaaagggcaagaagctgtacatatatctagcaatttctgaacacgctctaactgccgccctcgtaagaggggaagggaagcaacaatagcctatgtactacatcagtaagctcttcgtggatgccaaaactcgctacccagaaattgagaagttggcttacgctcttatttagcatcgcaaaaattgaagccatactttcacgcaaatttgattgtggtgttgaccaaccaccctttgagacaagtggtacacaagcccgaaaccttgagattcctgcttaaatggtctatagagttaagtcaatttgacatatcctacaccctgagagtgtctatcaacaagcaagttattgcagattttgtagtagaattcacctatcccgtagacggggaggaccaatggcaagaagtcggcgaagagtcaaagagtgaagctaaagacaagtccattcgggaattgcatgtcgacggagcctagaacgacagtggggcaggtgctggggttataatgataacacctaggggaatccgaatgcattgtccaataaggtttggttttaaggcctccaacaacaaggccaagtatgaagcgatgctagatggattatgacacgccaaggaactgaagtgttggaaatattttaccnnnatctaaatttactaacaagtatggttcattatcatcctaatatgaatttctaaaataatgaaataaacacatagggtttaagaaaa

SEQ ID NO: 165124 - DNA, 1774 bp, Cannabis sativa
aaatcaaattaattatatacacacatagcagaacataccaaaaggtattaccactctatgcgctcaggtccctcttgtatcacttttatttatttatcttgtctctctcttagaagtttatgtttttttttaaaaaataaataaataaatctttcctagaaagacacatatacatttctctctctatttattttctatatttgtttttttctcaaaaaaagtatttattttatttaacttaaaaataaatttcggcctcaataatcatttttaagttgtgaaaaacatatatttcatttatcaacatcgaaaaaataatcatatttaagagcaacattttaattttttttatagtttattaataaacaagtaatgaaattctaaatttaaacaaaattaaatatactattaactttatgagttattataaatatcttattattttttaaaagtaaccacataatgtgtaaataagtttattttaacaagaacaaaacaaaaagagtttaacaattaaataataaaacaaaatacgttgtaataaaaatagtatgtatgaattaacttgtgatttgctgaacttgtatgcttcaactctcttgtgagatttaactccagtattggatgtgtatggaagcctgtgatcctgaatcctagcttatcatcaacgttgtgcattcgagtttagtgagagaacggtgtacgattatggcagatgcaaaccttagtgctctgtttgaaaactcattccaagttaccatgagtgatattacctgcaatcttcaccctggggaagttgaccacagtaaggctcctagtaaaatcctacttgggaagctctactgcttttcgaggttgggatgtaaagccatccatggctctttgaagaatgcttggagtttcctgacagcttggagctggaacgaacgtgatgatggccttctgcaattcacgttccaaacagcttttgatgcagagaatgttttacttagacatccctggtttgtgtgtggtaacctgtttgtgttgatgtcgtggccttcttggcttacaccttcggaggtagtgtttgacgaaactcctacatgggtacgactaaaaagcataccacctttctactggaataagacaaacttgcacactagctgggaaggtttcagcagcttatgaacttccccgccttattgagaaaaactttgagagaaggtcgttcgggatgggcacattgagatttcgaaccagtgggagaagaagatccattcaagtctcctacaatgtaggcttggtttttatttatctctttttctttttttctttttttgtaaggaaatggccttagagccgagacaatggtttgccccttgtggcactttttgtaaaggcgaatttgcgaagttggatggccaactttgctttttattttctttaaatgcctcgtacttttatgtttgaacttcgacatgtacctgtttgcttgcgttttattcacaatttaaacagtcttgttttgatcatacacaaattattttaggaattcccattgctcgtgtattcctttgacattaagtaggcaatagcctactacatgcgtgagcagtttatcatttgtgatgtttttgatttgcgagcagttattgattctacctcgcaatgacagtcataatctgtttcaagcaattttgaatatacttttaatgatcttgtcactttgtatatattttttattgcttacatgaatagttagatcttctatccatgtgttaggtttaagtac

SEQ ID NO: 165125 - DNA, 2328 bp, Cannabis sativa
tttagggcataaaattccaacaagcttctttagccatgaatgttataactgacttatcttctttaaactcaccactcacttcatcttcttcactatcactctaagttgcaacaaaacccttcttcttcttcaaggtgttttcacattcagcctcaatgtgaccataaccttcaccttctcgacatttaatagctccgcctttcatctcgttttgttgaggatgcttgttcgaattagagaagtttttgctggaagatttttcttttctcccaggattgtttttttaaaattctttttgagaaagcaagcataatttttagccaagagagcaaaattacaatctatcaaacattcaaataagtccaactctttgtgattttcttcttagtgaataaaagctactcctgtcttagctttgtcctttttagaatctttgatcttcttatccttgtctcatctatgtagagtcaactcataattttggaggaaaccaattaattaatctaatttaagagccttaatatcttgactttcctcaattgaagtcacttttgacatgaatcttttaggtaagactccaagaacttttctgacaagttttttattggaatagacatttccaagagcataagattcatttgatatatcacagagtttggcatgaaactcagagactaacttgttttcatccatagacaattttcaatagacttggctaaccctcttaacctagcctttttaactgcctcagttccttcattccttatctccaacttctcccaagcatccttagcaatctcacaattagaaattactttaaactgatttatggagacagtattaaagagagcatgtaaagcttaagaattaaaatttgctcgttccatctcctcagttgaccattcactggatcttttattctttttcccccctcatcattaacaacaataggtggtgtccaaccatcggcaatagtcatccatatccattcatccaaagctttcaagaaggatctcatcttggtcttccaataaggataattagatcttttggtggaggagaagtggatcctccttctctgaacatctccatttcctgtcaacctacacaaatcacaactagaaactatgctgcattgttagatttccaaaaataacaaattaagaaagaagggaaaaaaaattacaccagattctattcatataacaaggaaaacctaaccaaaaattacttagctacaggatcaagtttctttacattaaaaacatggctctgataccaaatgaatgttcaagatattctaaaagttactaaatcacaattaggttttctatcataaatataaaaataataaattaaatgaacaccataattacaagcttgtcttacattggaaactcattcctactgggtagtgcttggtctcaaagaaccatgtaaaataaccttcacaaagaaatcattcaaacatacattctccaattttgatttacaaattaaataatgtaaactttaatgattccatatagaagttaccaataaacttgattataatcaagaaatatctaagtccccttacatccaagaagaaaatatcccctttcttccaacaagctgaactccgttcagcagatcaatctaaaatcccttcagacatcgcagattgacattccttcttcacccttgaaaatctaataaattacaaactgcaaaaaaagtactgaatacacaaagatagatttttccctagcagagcaagaatctctaaatggttctaaaaaagatgaagagttagttagaaaaaaactatcttagatttttatacctaacaaccctgaataacgaccaaaccaaccgtcaaaaccagctccgccacgttggcaagaagctgaataacaaactaaaaactaacctggcaaaaacaagatgagaacaaatttaaaagatacaactaacacaatcttaaatgcaaaactaataaagtcagaacatatgcaactaaatagccaacagataaactaacaacaagcacaattcaccagagaaaacacgacacttacagaatataatccctttgaaagaatatgcctattaatgtgacaacataatataaaattggtttagtctgtcacttttttatattgttcgtttggtatcctctattacaccatattgtattacataatattatattaaattatattttaagcaatattttatgtaaaattatatgtggcattaatttttataaaaacttaaatatataatattttagtataaaaattaaaatttaaaatattgttatataaaatataatatatatatata

SEQ ID NO: 165126 - DNA, 1273 bp, Cannabis sativa
  modified_base (1214)..(1246): a, c, t, g, unknown or other
gaaaacctcggtcaacaattatatgtagatagatttttaaattgtagcttgtgatattttttttatataagttagttactaaattatagattttttaattcattactaatttaaagatgaaataatttaaaaattatagaaatccacgtagcaacttaaattacaaccaaaattcacataaaaattaccagaacaaccaccggagcaactcaaatcataaatttgaaaaaaaaaaaaaaaaaaaaaaaaatagtagatagagtaattctttattattttctaaaaccaatttataatttattttttcatttttctcatagttattttatttgtccacttattttaaattttttatttatttttaataatcaatattaatcattttagttttatcaattcatgtttaaccctaaacatttcgctttaaacgtttattgaaattgataatatattttagtattatatattattccacactataaatgaaattgatttatgcaactaccaaaataaaaatatcggattcttacaatttattatataatttaaaaatgcacaagcaacttcatacttaattatcattttaattatctattttacttaatcaacaaacaaataaaaaatttattatggaacaagttagattgatcatacatcattataacattgtaaagtaaaaaattaacattcctataattaaattgttaaaattaatgtcataacctaaatcttttatataataaaatttcatcaccaaactcggaacataaaaaagggagtgatgaatgcacttctagctatagtaatttacaacatatgagtttacaaaaatatttgtattatttagaagaaatatttgtccattgagatagttgacaggtgcattaaaaaaatgtcaaaaactagattgtctcttgtaattagagggaagggtatcaaagaagaataaaaactagaaaaatgcacttttatcaattgtaattattgggtagccgtgagtggagctggtattagtttgtaatttttcctgtaaattgtttagtgattaatgataattcttctttgattaaaaaataaaaaattatcactaatacttttataatttttaatttatttttttgggctcatgtgcacaaattgttgtaacctatcacgcgaagttggttacacaaaattattactataaaacaatacattaagggctcgtttggaannnnnnnnnnnnnnnnnnnnnnnnnnnnnnnnntatattgaattggattatatatcatat

SEQ ID NO: 165127 - DNA, 603 bp, Cannabis sativa
tgatatcaattttcatggcacacctatgggagacattcttcctattataatgctttatcacatcctgaaacatcattatattgtaagcaatgactctacttttaatgaatgcctcttgattataatttacaatagtatccaaaattgaagctactttgaaacaaaaaagtttgaaattgtatttataaggtgtaaagcaacatgctattggtctatagtccacaacctaatttggggtttttttttcttaggaatcaaagagatagaagttgcatgaagatcatgcaacttctaattattattttttcaaaaattgagtaattttttttcttattatttttaaaaggattatactaaatatttaatgtagacataacataccctaaaaatttaactagtaaaattcataaagtaaaatatactaataaaccctttttttcttaaaaaaaaaacaccaaaaagaaatattaaaattgaggggataaaaatgattttgaaaaacaaaataaaaatgagaaatgttagtaaataacactatttttaattttagtgatagttaatgtctttttttttttttaaataattaaacaaatgtcatttttt

SEQ ID NO: 165128 - DNA, 553 bp, Cannabis sativa
agtaaagttgaattctggtagtttggtcagggtggtgtagatataatcagagacagcctggtcgtacgccttcttcgcgttctcctttttagtctgaagattacgagtgagctcagcgttgtcttcctccagtttcttaactcgcgtttctagagtcctgacttgttcttccacttgacccttggctttaccgaggtcctcgacttccttgtctttagcagccgcatctaatttttctttcttcagaccctcttgaagattcaaattctgtttcttcaaaagattgagttctttgaatcttgcaacaaaagcccgcaaaacattttcataaattgtgaggtgagttcaaatgaacgaggtaggagatcctcggtaggaatcccctcgactttggagacgaacccgtcactcacaaacatgtcttgtaagaccatgatgtcgcaagccttgacggcagggttgatcacaactttctttccctcgtcttgagcaacattctgttgcttcttcgacaagtcagccaccggggtaggagctgttgggttttatgccc

SEQ ID NO: 165129 - DNA, 1050 bp, Cannabis sativa
tgctgttttggtcaattatacatcatcacaaatatcatttttcttttctatgcgcagtggaggagaaggagccctttcaagccagcgctcgccaagataaaaaacgctaccaggaggaaattagtggatacaagaacgctcaaccaatgaaggtagactcgggcaatatattagacacagagtagaatccaccaccctcccctaccttttgatcattcggttttttgttgtgaatgcgagcattttaccaaccaacctcaagatcattcattgctgatatcttttcccaaagggaaaacaaaaaacagagattacaatgacactttgtgcataaaaagagattgaaagatcaataatgttttcaaacctcgtatgcttgtctattattgcctatgctattctttcaatttaattaaaaaggaaatacttgtaacacattttaatgaaaggtgtagttttcctcaaggttgtgttgctaaattttggccttattttttgtcttttgtctcctcctaaagaagcaaaagctgtggctcttttttaccttgtagtgctctttgcactttggtttattcgtttctttctttgagagtgatgcagtgattgttctcaactctgttctatcccctcataggatgtttctcataccattgagtatagacttctatagaatgatagaaacatataacactaattcatatactcaaaattaatttaatatttttctcaacgttggctttttttacttagctttgtaagttgtgctatagagattgatttttaccataaaatttttgcttgatatatcttctaattggtaattttgagctaatggtaatatttttattatctatcctaataggaaaagagctgaggaaaaaatttaaaaagacattaagaattataaaattttattatctaaatagggttgtattcttgagtgtattttcttagaacttttagatttttttgaatgtatgtaatgtaaaatgataagggctatttacaaaagtattggaaaatgaagataagttttgatatatatggcat

SEQ ID NO: 165130 - DNA, 518 bp, Cannabis sativa
gcgaccatgtagatcgcacatggtcgctcaatctaattagaaaactatactaagagaccatatgcgaccatgcaggtcgtacatggttgctcagtgtaactgtaaaaccatactaagcgaccatgtgcgaccatgtaccatgtgcgacctacatgatcgcacatggtgttaatcgcttacattaatttttggattctcagatatatttctaaatgtatctgaatggctttaaaataggtgttaatcgaaattcgtgtgaaattgaaataactcataaggtggcaggtaaacattcaacaagatggcaccaagtaagatttgtggtgattatgatgtagagaatctattgaaggagttgtacaaagctaaaaaagtgattcttttgtatgtgtgcgtaaaaagaataatgataaaggaaagacaaagtttatctgttgagaatattttacgaggatctagatttactaacaggtatgttgattaacatcctaaatatgaatatctctaaaactatgaaa

SEQ ID NO: 165131 - DNA, 2899 bp, Cannabis sativa
tcccataatgccattattccctactcctccatacattgctccctttctaacctacaaaccccaatacataccgacatggcttatgcttctcttcctttatttcctatatattctcttaattaatttttataaaattaaattatcattaatcttaaaataacactattagttaattcttctaacataaaattaattatataatatatatctataaaaactatatccttttggtttgcacgcattttcataataacgataactttatataatgcattcctttttgttttagctaaattacgtacataatacattttagtttctttttaatatataaataaagattcattattagtttaattataaatatatctattattaatttacatattttttgtattccactttaaattaaattttaattgtaaaggccgtcatgatatcgtgtgtatgcatgtttaattatataattggaagaaaattaacatcaaagtatattagttattaaatatgatattattgtatattgttgtctaagtatattaataataataagaataatttggttagactaattattaaaaattataataatatgcatgcttatttaaagaattctttacgtatccttattactaaaaaaaaaaaaatatattctttacgtatgtgacaactattaagaaaagaatattaattttatttattatcatgagttccatttcatatatatccattcttacattgtatatataaatatatatggtgagagaaatttattttgcttcctatgtgtggaaaatcaactaaataaaatatttttgctaccaatattcattaaagaaatatgttttgaaaaggtaaattttagttatattactcaactaaaaagtagtataataattattttattaatattttttttttggggaaaaagatgtatagatcagccaaaaaaaaaaccttaatttaatagttaatatttaatattttattttattctgagcgtttaattaattaattaacattatttatatgtttttatttttatgaaattaaatcaattttaatttaaaaattaatattaattttgttaatgtactagactatttatattatatgtttaattaaaatagggatgtttggtaatattaaaaataaattgaatcaaatggtaagatgaagataataaaataaaaataaatatcattttgaattttgtattttgcaaaagttattgattggatctttagtaatgacaaaattaattatgtttatgtatttattcgtattatgaattgtcttcaagtttattatattaaaaaaattgtcgaaaattgagttcagagtcctatttataccattttaaaaaatacaagatttatcttatcatttaacaaaacaaaacagaggatacattcaataacttttataaaacataaaatctaatattaaccctaaaataaaacaatgaaaaaactctgtctaacaatacatgcatttcaatatattacttaccttcccaagagattacttattaactttcttagcaaaaaaaaaaaaaaattagaggagtgctaattataatcttttattacaatttgtgttagtgaatttctacgtttgaaatcatataccggaataattttttcttaatttttttatagtggtgttataattacagtattatccatgtaaatttctaaaaaatttcgaatagtttacattatggaaaatagagtttttaatattctagtttatcatgtgggttcaaaattgttttaaatatattttcaaaaactattcaaaatattttaaaaaattacagaaataatattataatatttataacgaacaccgctagctatgaataacaaatttttaaaaaaaaattatcaagtatttttttttgggtcaaatttatcaagtatttttaagtataaaggttaactaaaaaattataataaaagattcatgatactgactacataaatatttattaggttattaacaaaaagtagcataaaagtaagagatcgatctaaatcatttattgcatatggacgcaatttattaaagccttatcttatcatattctatattttattaatagagcaaacatatcaaattctaatataacaatattgtgtatataacataaaagactactccaatattgttggcaacttgcaatttgatttaacaacttagaatatataatattgtaatattttttttgtctgtattttttttgatatatgtagatagaaaaatattattttatatatatattgtgtattttaagagagttattcatccataaaaattttattttgttaaatgataaattagatcttgtatttttttataatagtataaaatagtatacactgaactaattttttgtaaaaataaaatctaataataatttaatctaaaattattatgataaaattgagtatatatatgttcgtactttatttgagttagttgtattattaacataattattaaaaattaaaattaaagtactattttatattattttgaaaaatataaaatttagtttattatttaataaaataaaatgttaaaatgatattaatggcatgtatattatatattttagtacggtgtgataagtttttaatgtgtcattattcaagagatagagattagaatctcatctcttgcatttgacattacaaaaaaaaaaaaaaattatttttagtgaatatttttaagtcataatacaaaaaatttgtaactaaatgtgacttttaatcacaataaaaaaaattaaggtaaatgctattttggaccttgtgttttgcaaaagttaccgattgaaccctctgttttgttaaatgacaaaatggactatgtattttctaaaatagtaaaa

SEQ ID NO: 165132 - DNA, 1389 bp, Cannabis sativa
tctactaattaagctgattaaataactacattcattattatatataaaattatggtttatgggaccccatccccatttcatggtaccaccacccataatatgtaacttgacaacagcaaatattacatcaaataaatctcgttcaatttaacttttattacaaatgtaccgtttagagggacaattttatatattttgaaataaagtttaagagtttgagctatgctcaacaataggtgactgttataatttatatgtatgtgtgagtataattgtatttttactcaaattaactcaagcctacagccctacactagaaaaatctgaaaaaacaaagaaagaaagaaagaaaaaaagaaaaaagaaattgtgtattatatatatatatatatattgtaaaacaagcctacttaatctccacttcacattaattatatatacacatacagtgaacactattgattgtttttgttattgtgcttattagacaatattgttccacatataaaaaaaaaaattgtacaatatgagttactctattcattactaatttatagaaaattctagtgtgctgcaatctttctctgcagccataattaatttaggttaaacccaatgttgaaaaagctttgtactctatataatgtcacctctctaaattatttatatattttcctgtaattccttaaaaaattatatttgaccaaaatgacattatctcttcctcttcgatccatctaaacaactcatgattaatttttgggagctaatgatttgatatggtgtcattttgcatcaaattatgtattaaacatacatattccaaaataaaaaataacaaagatattgatcataataaatttttctagttgtgatatatttttatgcaatagttagatttttttttacatcaaaatatgattaaattggataactatatatactgacttaatatctaaaaatagtaaaatatatagtttctttaaggattcatatttttaaaagaaaaaaaaatacaagacaataaattacaaatagatttagagtattggcataaatttcttaaccttagagatgttttcacacgagaatcaatcttgatgctaaaaattgggtaatattacttgttgataggagaaaattcagaccaacaaatttttaattttatttgtaatatgtaagtgagtgagtttaatgttatatatcttgtgaatgttggattgcgtaacatttattttgttttgattaaataaataaattacaaatagaaggataaatgtctggatgattttgtaacaatttccacatattttattaaatttgacttggtacaaaattagccttttataaaaaaaaaaaaaataaataaaaaaaaaattaagaaaataa

SEQ ID NO: 165133 - DNA, 4414 bp, Cannabis sativa
  modified_base (2630)..(2635): a, c, t, g, unknown or other
  modified_base (3013)..(3017): a, c, t, g, unknown or other
gtcccaagaactcatccatgccaagtatgcaaaaatccctttcttcaaagttgcaaccctctatttctaggcagcaacagttagaggttgttgctaaggctaaattgttgtcaagacctcagatcaacaagccacaaaaacaaagttcatcccaccttacatcatataatgacaactgccccaagaaaaagccaatgaagcaatactctgacgatgagggtgatgagggtgaggattaccaagccattagtatgatgatcagacaaatgtttaggtataatcctaacaaattcgttggtcgtgatgatgatgatagcaacatggtggccaactttgacgatattcaaagagaagagaaaagaagtgagagaatggggagaagaaaagacaaaaaagagcaacttttgatagaggaagaagaaagaagagagagagaagctaagatgagaagattaaagaagctaaagtttgagcattagaagtattaatatttgatattgagtcttgagaatggtggaattatacaatctgattttccttctatttttaaaaaatatttctactatcacttattttaaactttaattttagttaatgaacaagcccataatgctttttttttaagaaaaacttcattgtaatacttattgtatattttaagtacattaatcttttaataattgatttcttatatttttaatttatttttttatgctcacattgttttactattgttttttttaagaaaaaaattacatttgtaattaacttaagataatgttacactaaattgattttcaattaaaataattaaacattaatcatacaatttttttttatatataatatgtatatgaaaaaatataataaaaatgaatattacatatatcttttaaaaaattaattattattatttttatataatatttgtttattaagattttcgaaaactaaatatttaagagctcaaaaaataataatttacaaaaattagaaggaagatttgtcacatggttcaggtgttaataaatcttagtccacgagtcagtctattagcctctaagggcggtattgatgaatttacagtattttacaagaaattctaactttttacccttagtttcttttcgaagaagatcaagggtaatcttagcaggcgtgagtggacttccacatgccccgtcatcgtggatgattcttaatttggggagacctttcaacgatagagcagttttagaggatttcaattatgggaggattaatgtggttttctctatttcatgccacatgtcatatcttgtaaaaacgcagataacaatatcatttatatataaattgtatttatataccgcttagtatcatttatatatatactcgattgatattacgtgcaatgcacatataattagttttccttttgattaggtaatgttaagtataatacatgtatgtttaatttttaaattattacatggaaaatacaaattcacactttatttacaaaaatacctccataaggcgtggacaacatttataccttttatgtaattttaattaccaaaatatctcttacactatcacttacacaattaaacgatggttgcagagtggttgctgggtggttgcgcgatggttgcatcaaacgaaggtttcaatcagacgaaggttactgggtggtcggctgaaggttgtatcagatgaaagtttcaatcagatgaaataactgttagcaaaatatttatgtaactattatgaaacattaaaaatcaaaacagtgtttccacgtacgtaattctatttacatgtctcttcatgatttaatatgaacaaattcatcattagaaattaggaaaataatgaaaatacacagggataaatattttactatagcatttatgtaattttttttttttggattatacttgagttggattgtttgaaaactttagttcaactttttgagatttacatttcatgaatctgaaaattaaagtcaggacattagtttaatttatgcaaattaaactggatttccgattgaattttagtttcgtagtagttttttaatactttttttttcatgaattcgaaataactcctattttgattgattttggtcgtcttctcaggtgaagtcgtcaaaattaatggtggttctctttctagttgatttttttgttacggttgcgttggaaccatgaatcctgggttgaaagtgtgtgtaagtggtatttgtgtaaatttttttatttgggttgtatatttgtttatttgaccagctgaaagtaattttgtaatattgttacttttttcggttaaaactgaaaaaatcccttaatctcttaattttaattgggtaatgtattttttttttttaatttttgaaatggagtttgggattttaatacttaaaaaaaaatttagttattgcggctgtgtgcctttggatgtaattatatatatatatacgtattttatatgtacaataaaatccaggtgagatttcacggtgaatcgttgtgtgtctgattgtgcagaattatctcttattttaattcatggttaaaccaacaaagtaaaaaatatctacaatataaaatatttctataatttttatttttaaatatatnnnnnnatattataaaattaataaagaattaatattatgttaagtaatagtatattatgttaaagttaacatagaaaaccaaaaaatactgttaaattaaaaattatgttacataaccacattttatataaaagtagatatatttaatatattgttggagctttataaaattttataaaaataaaaagtgaagtgagttaatggagtctctaaggattacctaattttgtgcgcatgggtgaggactcacatagaggaccaccacacgcgtgtgcgccgttgtcgtcgtccatctgaccgatcgtgccgaaccaagctgagctggcggcgggcgagtgtggtgtcactttattttttggagaaaatttatttattaaattattnnnnntttatttaattaattaaaacagtttttaaatgtgtttaattaattggtaaacacaaacttcttgatttttagcattgtttccacgattccacactatcccacgttctaacgttcccttcaataacgtcttttttctcgttactaccttttgtgcattgtctatataatgcatcaaaactaacaggagaaacacatttctttttctcactaaaaaacatataagatatatacatatgattatattacatatatattctgagcagtagtacagtttttaagagtggtattttgacggttctctatcatgcaatagagctctgatacagtgtgttcgactaggctattttagcttggggacgacaaggctgatagtttgcttgtacagttctgggcaataccacaaatgtcttaaagagagcgacctagtccacgactcagcccagattttaattcgaatttattttttttttattttctgcagcaactattttcaatcattttaaaacgttgtgtttttaccatggctaccgatgagaattttggtgttgttgatataaacaagccttttcgtttctagggaaactattttaaaagatggaaacaaaaaatgttatttttcctcactataaaaaatgttacttatattctgacgactgataaatttgttgtttgtgatacttctaaggatgatgaaaagcagaagcaagctgggtcgagaatgattaatagtgcaaaaattatattctcaatagtttatctgatgatttgtatgactattataattttgacaaaaatgctaaggaaatcagggacgatcttcaaaagaaatacgacactgagtagggtggaactaagaagtacgctgtcacccgttacttcaaattctagatgactgacgataagtcagtggaggctcagtctcatgaacttcaaaaaattactcacaaaataatttctgaaagtatgtctttagatgaacaatttcaaattgctgttattattgacaaattacttcttagttcgaaaaaatttaaaaatattctcaagcacaaaacaaaagaattatctttgaaaagtttaatcactcgccttcgtattgagaagaaggctcgtaaataagaccaaaaagaaaaaatgtttgttgtgtcaaacaacaatactaagaaattcaatgcaattctaaaacccattagaaaaaaatttaagaattagaatcgcaatcatgctctaaaccataacaataattctcgaaataacaatcaggtctcatataattattattagtgcaattaaatatcaagttcatataatttaatgtaataattttattataaaatatcaccctaaatgcggctgtcactccgggccgaggctttgcggggttcgggggggtggtc

SEQ ID NO: 165134 - DNA, 1030 bp, Cannabis sativa
atgttgatggagagacttataataaaaaggcaatgcatagaactttatatgagtataatgtatagtagttaggtcatatcatgtgttgtgtaagtaattaggtcacgaatcacatatgtatgatattatatatgtatatgtgtattatatattataagtagttaggtcaggaatcacatatgtgctgtgtatgatatcataagtagttaggtcatatttattatatatgtgctgtataagtgtatatagtagttaggcaatacatatatattgttcacgaatcacatatgtatgatattataagtagctaggtcatataaatttcattaattataagtttgtattattattaatttttttttttttgtatgattcagcaaatttttcattactccaaaaataattttataaataaatagcatataaaaataaccactatactaagtatatttttctcttttttttttacaacttggagaatcagttcgtgtctataacattaattttcttaagccagaaataagtaattctacttttaacattattatttttgatcttgtttatgatcaaagattccttagctttacccgaattcctatttcatttctataacacgccaaatttgatacactaaagctatcattgcagccacatatacttgtttacaaaagtacttgctatatttggctccaatccattgaataagcttgttcaaatgactcgattctgccctccaagagagcaattattattattatatttattattgtgtgaattcaaaaattaactaactaaacaacttgtgtttaaaaattatgttttagtcgtaagtagttttttattgtgagcaaaagtcacatttaatcacaaaaaatttaagttgtgactaaaaaattgtaagtaactgttttattagtgaattataacaacaatagttaggattaataaaaataagggataattacataaggtactattttttgtaaaaaaattatatttttacatttaatgatttttttttttacatttt

SEQ ID NO: 165135 - DNA, 776 bp, Cannabis sativa
  modified_base (722)..(723): a, c, t, g, unknown or other
ataagaagctcgcgatctcgctctctgtctctgttggccattacaatcgacgatgtcttatcatcgcccatcgccgccggtaaccccagagaaaacgacgccgtttcagctccgcaccctgtgtggcttcggtcccgaaatttccccaaagagaagcaaacaaaacaatcactcttattagaattttcctttgccttccttcctaatctcgctttttttttttcccaaatttgaaaatattattattattttttatatatataataataacctataggaaggaaggaaggactgggatggatacggattaagaaatactaattaaatattaaaatttaattaattaataggtttaggtaaataattatttagtttttggccggaggaggtggggggttttcatgtgagcagtttaagaaaatgtggattattttaattaatattgttaatttatttgcattgtagactaaaactaaggttaagctgtatttaaaatgagggggcggatgaatcaatggtggtgttggagttttaaaggcttaaactgtaaatatgctgtcaacaattagtgcttgaggagctgtccccaatgattggctgccagaatttttgtgtgaggggcatatttgtcctctcaatcatcttttattatttacctgagaaattttatttacaccccaacattttttaaagacatcctcattttaataatttttattttnnataaaatttatatttttaattatactaaaattttttaatttttttttccaatt

SEQ ID NO: 165136 - DNA, 560 bp, Cannabis sativa
aaaaaaaaaaaaaaaagtgatgatcgtgtaaattgtacccggatcttggcaaggacgcccttcttctcgagagtgcgagtaactagggttttgaggtccatcatctccctcgtgtaatcatccatctttagcttctaaagcttatgagaattttgaaatcctctgctttctctctctctctcgctctttgggttttgaattggagagagatgctttgcttgagttgtgtaggagagagagagagagtagtttagtcgagtaccgaatagagcagaggggtgggcagtgcccggtgggtgccattatggtgaatgtgggtgggcccagttcccccatctctcattttgtttttgggctttggtccattggatatctgtgccccatcttctaatagtcatttgttccacacaaataatagcccattagcccattcaaaaagatgcatcaccctaaatttaaaaagggtaaatacattttgaattttgtgttttgtaaaagttactgattggactatgtattttattgaatgacaaaataaatcctgtattttccaaaatagt

SEQ ID NO: 165137 - DNA, 3782 bp, Cannabis sativa
gggggtcttctttctcgctcaagactaacctcagagtaggtacctctacaacttcatcaacttttaactcgatatcatcatcctcgttcaaatgtactataggatcattattgtaacagggagcatcaaactcaacaaaccaatcaaatgcattatcagctctatgctcatctatattagtagagacctactcattcaaaccaactgcatgatctgtttctgggataaaagtctcaaccatacttcatgggagacagttgggggagtaggccccaaattcacatccctcttcaccttagtcacaaataatggtagtaagttctccacactcatttttttcttcatgcttaagaacactcttaactatctttcaataaaacctcaagtgatatcatattgcctttcatatacatgtaacacacctctaattttaatttatacaccaaagggtctactttcaactcttcatacaaaatttcatgaatcttctataaagtaatttcaatttcaaatatcaacgtcttactttttgggctattgaatatacagttgaaactctcaacagcgcaaacatcatcatatacttcatccacaaacacatttgaatctacaaacaaaaatagagaaaaaaatcaaattccaaacatgttgacaagtatcgtaaatcatcattaattttcactggactaatatctattctggtatatcgcaaactatcgttaaatatcattaatattaacaacacaaatatccaatgctctacattgataatgatatcgctacacatcgctacatgtcgtcacacttcatcattcatagtcatgttgctaaatatcgctaaaaattgttaaaacacgaaaaaaaaccaaaaaatataaaatcactcaagttccatttaagacacaaaataacccaaaaaaatagaagaatatgtgtaaatatattcgtatcaaactaaatgcaactaactccaacaataattagtaaataaattacatacccaccttgcaattgcctaaaaggactcttaagaatctttttttagggtctgtttgaggcgcacagaaggcagagggtggtggctcaccttcgtagtacatgttcattgatctgccaatggttccgacatgataaaaatagagttgaaatagatttttgaggcgaatgatggtagctcgctcttgggtttttggattttgatttgttgatgggttcaatttctggttttctagaaagaatagaaagaagaaagatacagtttagcagcggagccatcgggagagaaaaaaattcgttctctacaataaacgaaacatctcaacgtttggcaagcatttcgttacgccattgtcaaactattccgtgtcttggatgaaatcggtcaatgttgagttgttgagaatagcgatcctcattattctcacccaatttcttcaattttggtttttgaaagagattctgaaaaattagggtttttttttattatttatggcataagtttcttttaagaatgtgtttaattttatcactccctaaaccttgtagttttcactttttattcattaaataatatagttttttgttttgtttgagagggatttgggatgtttggggtcagcttaggatggtggcgatcagagatggagacctcggctggccatgggggatggaaattgaggtcactctttcttcagccgattctcagaagcaattgagatgtttttgaacaagtttaggtgactatctatgtgggagaaggttaggcttctcttaatgtcgttttcttttcttattttattttggaaatattttgatgtataactttaattgagttaggtttcttttgaatttgtgatttaatttgcatgtatatgtttcactattgcttaatctgatatcccggtttttattttttttggatcatgaatctttttttctctgttgcaattgatggatgctattttatttgtgaatggttgattcttatttggaatcctagaatttgctttcatttcagttttgaagtatgcattgttgtttcaaattatagatattgaatcccagaattttgttgctggaaatcttgagttatttttattgcatctcataataacattattcctgtcatttgtttttaccaaagtatattagtgtttgatcttatggtgatattttttcccctgatgagctttttaaaggatatgtggctttttctctttggttcacggtgtttatgcaaaattattgtgttatgtttgttttattttgtggcttacacctttgggtatttcattagttacgaccagtacggtttgcaattatatgtaagccagtttggtttgttttgtttttggtaaaccagtatggtagtgaaatgtttggtaagaccagtgaggtcttttcgttggtatgataatttcagtttgtgaaaaaaattgtcttaatacaaaattattttttctgtattgtgaatagcaagattgaaaggtttaatgttaattagagactcttgtcttgattgacataatatgacagtataaaaaacatggcaaggtagcatatgggacttctatcaatgttttgaaaatatatacacaaatgggagtagagttcaattttggaacctgttttgtttttagtttaattttatttgtttctgttttatattcttttgctagtaaaaactaaaagttggatttctcttcaaataccaattatgttagaaataaaagtttattaggaaaaataaaaattggaaaatcagttttgctatgttctaatatgatggagttcttcatacatgagtaagaggttaactttgactgagtgtcttaagatttacttggatatttattgattgaatataacttttagagttataaattttgattttttagcagttactattttgatggctgacatatttataaaattgttttattttgctactaatattttcgaatgagctctgcctaaaagggctcattaataatcgtatatatcttattaagtaatattctgtataatcagcattaattataaatattcattacaaattacgtttatattatattaggaaagtatgtagtatctatattaattataattcacatagcaaattaagagtaattactttaattgtaatttactttgcaaattcatttgattgctactaatatttcaaatgagctgtctcaaatggctcattaatagcagtgtataccatattaggtaatagtctatataatcaacattaattataaatattcattactaattatgcttatattattttaggaaaagcctatagtatctactttaactcaaaattcacattggcaaattaatcgtaatttactttaattgtaatttactttgcaaattcatgtttgaattgctactaatatttcaaatgagctgtgtctcaaagggctcattaatagcagtgtatatcatatcagataatagtcaatataataaacattaattataaatattcattactaattatatctatattatattaggaaagtctctagtatctacattaattgtaattcacatagcaaattaatgctaattccaccaatgactcaaatgagatgtgtttcaaaagcctcatggttggtgtgttagtatataatagaaagtatttgcttgatattttaaaatatagaactcttcctttatttctcaattattctttacgtttctaaatcaaaatggagcctcattatgatgacctttctgaaaccatcaagctccatcctcaagagttggtt

SEQ ID NO: 165138 - DNA, 1348 bp, Cannabis sativa
  modified_base (1297)..(1300): a, c, t, g, unknown or other
cattttgtttattatattaccataattttgacaaaaaataataattttaataaattctcaataaaatattaaatatttataaataataattctttttttttacttaatttacctcttgaacattagaacacaataataaacacaccaaatatagcataaattattttttttaatatatttacatgtgaaaatgataatgttaaatagattcaaaattatattagtagaatggtgttgtacttgtataattgggaaataatagtattaatgtcagagaaaattaattgtggttccaattctaaaccaatacgggaaataaggtcatccacacacacccaaacacacattaaattcaaccatatatatacaaacacattaaattcaaccatttatatatataataaacttcctaatataatcttttaattaatttctttatccaaaattaaaaacagatacctaaatatttttttgtcaacaaaaaaaaaaaaatcataacactattcgataaagttacaatatcattcctataaatttttaaaaattttcaaatagtttaaaataagtttaaagtattttaaacacatgtagtaaactgaaatattagaaactttatttttggtactgtaaattatttagaatttttcaaaaatttacaaagatgaaatatattctaactataacgaataccgctataaaaaatgaaaaaaaaaaaatattctgatcacatgtgattttaaacgtagagattgactaagagattgtaataaaaaattataattagcatttttctatatatggattgtaataaactaaaataaaattttggttttctattttgtgagtgtatggtcataatcctaaatttgtattgtttttttttttgggtttggccatagaactttattttgttataggccaaaaaaatgaaaaagggacagtaaagaagacaacttttgttatcctaaaaatgaaaaaaagacaaattgcattagttggaagagtggaaaatcataagagagaaggtcaaatattacttataagctggctttgcatgtgaatttttcttttgttctatcttctctttaagaaaatcaccaaaactatcaaaaacatgaaagtggtggcaatacctagctagtataaattataatagggtacatatgttacctacttttctacaattataaggttatgataagattgaatgactcttctaaaaggctataattgaaattaaaagagatacaatggataaatctaagggctcgtttggaacgccgtattaagtcgtatnnnnttgtattgtattatattaaattgtattttatgcaatatttttatgtaa

SEQ ID NO: 165139 - DNA, 918 bp, Cannabis sativa
tgtaggtaaaggcaaggctattgttgaatggtagtgagtctagatctggaagaagattgtacataacaagacagtttgacgtggagagttagatctttgggacagttacggctcacaattttgtagtcggtgtgctacatcttttgattatgtacagttgaaaaatatagatacaagatcccaatttttgtaaatgtaatacagtttatatttatttattaaagtttaaattttaacaccttttgataaaccctttgattagcaaaggttgcacagtaatcatgaaaagcactgtagcacgtctaaactagtagggtgttacaatttcagtattagagctgccaggttgtctaccaaggaccataaagatttgtacaatcataatcatagataagctcgactcatggttcaataagcctttacatgttttagtagcttattatgattagaatagcttgatagaaacatgttagtgatatattgattgttaatgtgtgtgtctaagatcccatgtatgcggtcataagtttcttatgttgaccattgtctgattgaactgacttatgggtttgtaggctagtatcatatggatacatgacgtaatgtacaaattcaaggtagtgtggtcggaactgggtcaaggccatcaagatcggcctcatctttgtggtcaaaggtagaggcattcgacgggcttgtggtgtgggtaatgttaatccaccataagctccacaagattaggagcaaaggcttgctgagttgcaagccaaaaaacaacaacaagatgaggtgattgttaggctaacgcagcaaggcccttaggttggtcctcttcctcatattggtattgctccaggactagtgttgctagcaggatatcttgtagctagtaacaagttaatgttggaaattatttta

SEQ ID NO: 165140 - DNA, 1076 bp, Cannabis sativa
acttttgcttaacctacgattggacagatccaactacagtttttggagatctttggtcttggtagctgtaagagcttacaaccttgatggatacatcttagaaatgatccctccaccacctcaacatcttgaaggtaatctccctaattctgtttatcttcaatggctgaggcttgatcagttcctaatgcactggctaatgaactctgtttctgaacttatgcttggacacatcatcaattgtcaaacttcatatgagatctggagcattttttctcaaatctttgcttcaagatcaagagcctgaattatgcaagttcgtggtctcctttaggccaccaagaaaggttcatccatcgaggattatttcttgaaaatgaagagctatgttgatgctcttgctattgctggtaacaaatctctgatgatgaccttatatcatatattcttgaaggtctgggagaagaatatgaatttgttattgttaatgtaacctctcgtgaaaatcctctgagcctacaagaagtgcaatttaattatgctacataatcatgaacttcgcattaatcaacacaccacggatgcctttgctaatgttcaagccaatatagccaatctttctttgaacaataaccacataggaggatacaatggacgtggtcaaagaggcaataatagaggaggaagaggctactccagcaatcgtggaggaagaggcaatcgacctgtgtgtcagctatgtggaaaagctggacacacagctcaaaagtgttaccataggttcgatattttatttactggcagaagcccccaccattagtgacatattaggggcctagtttcttgacacgggggccacacaccacatgactattaactctcaaaatctgcaaaacactgtggattacaaaggcaaatctaaagtggtagttggtaatggttcttctatgtctatacttcaaattggatctaattctatgtctactaaaattcttaatcaatttctgtaacgcccttacttacgtaaaataagatgccataaataaactggcgttaagatactaatgttgccttta

SEQ ID NO: 165141 - DNA, 1820 bp, Cannabis sativa
tcttcacttggtatcagagcaaggacggcccacgccatgtccactgacaattctcagactcccttcacacctcagcccaatcagcctcgccctgcccctactgcagcagctactcaaaattccaatggaacaggaactggtgctactcacagctctgccacttttaccacaaatttcacacagcctttcaatactttaaatcagccattttccctaaagttagaccgaaataactataccttatggaaaaccatggtatctactatcatacgaggccatcgtttagatggtttcatcaatggctcacgaatctgcccccaagaatatattcctgctaccacagctgctgatggtcagcctggctttggagttatcatgaaccctgactatgagcactggatagtcaatgaccaacttctaatgggttggatctacagctccatgactgaaaccgtggccactgaagttatgggctgtgctacatcagctgctctttggcgtgccttggagaatctgtttggtgcacactcaagggccaagatggatgatacaaggacattaatccagactactcgaaaaggtaacacccccatgactgaatacttaagacaaaagaagatgtggtctgatagtcttgctttggctggagatccttatccagaagcacacttaatttccaatgttacatctggtttggatgctgaatatcttgctattgtggttcaaatagaagctagatctaatattacttggcaggaggttcaagatatgttacttagttttgacagcaagctctcaagacttcatgctgctggatctaccagcaaaggcatgacttcggctgctggaaacccaaatgttggaccatctgcaaacttagctgctgctaacatgggaggaaagccatctggtgcaaatcgtggcaggggcaatcataactcgtacaacaacaatcgtgggggctcatctcaaaatggcagtcatcgtggtggaggcactcaaggcagaggcaggggcagatccaacaacactagaccaacttgtcaagtttgtggcaagtatggtcatagtgctgctcattgttacaacaggtacaatgaagcttacatgggacacgaaccaggttctcaacaaaaccagcaaactggtggtcatgctgcttatttggctacacctgagattgtggacagtgacatgtggtatgctgatagtggtgccagcaatcatgtcacctctactgcatcaaatctgaaccaaaaatcagattatggtggtaaggaaaaactcacagtgggtgatggaaatcagattaatatttctcatgttggctctagctatttgcaaactaatactgatgatattcttgagctcaaagatttattacttgttccaaaaattgctaaaaaccttattagtgtgtctaaactaacagctgataataatgtggttgttgaatttcactcaaatgtgtgttttgtgaaggacaaagcaacaaggaaagtgctgctccaagggatgcttaaagatggtttgtatcagctcaacctacctcagtccaactctcctttccaacttcctaaagactcaagtaactctcatcattctcacaagttcactggtgttttgactctagaaaaacaatctgtagctcataatgagcagttagtttctcaaactgatatttggcatagacgattagggcatccttcaattaaagttttgaatcatgttttgctgtcaaacaatgtaaaaatttcaagtaatgaaaatatggttcatttctgtgatgcttgtcaatatgggaaatctcatgctcttcc

SEQ ID NO: 165142 - DNA, 757 bp, Cannabis sativa
  modified_base (683)..(708): a, c, t, g, unknown or other
ttatagtgcttgaaaagatagatggatccccttaaatttaggattctatttatagtgcttgaaaagatagatgaatccccttagaattaggatttttttaaaaaaaataataataaatcgccgctatagcgcaggaattgggcactatagcgcccatgagatattttccaaatagcccatgtgctgaaattatctcttttttgtgttttttttttccaaaccggcgctatagcgtaggtattgggcgctatagcgcccaacaaaatttctattttgcacctgattagtattttagcaataatttcttcaataaaattcggaattggacgattcaagatgtttcggaaagttaagaacgagatctaaaactttcatgttgagctccaagttgagttctgcttctaaggttgccaaaattttcaattaagttctgtcttgtaaaaccgagctcgctgacttctactattttccaccaaaatatgctagcatccctccaaatgactccaaatgcatgattagtcttcaaaatagccttataaattataattacacttatcagtaacttaaagagtcaatttaaaaatattaattcataaattagctatatttataaggcaaaatatcgacttatcacaatttcatatctatagtgacgcaaggtggaattaataagttaggaaatnnnnnnnnnnnnnnnnnnnnnnnnnnattggaagctcagttatataggcctatggccccctcactagttgagata

SEQ ID NO: 165143 - DNA, 1198 bp, Cannabis sativa
  modified_base (1158)..(1168): a, c, t, g, unknown or other
tagaaactcggtcttctatttgaaatatcaagactcaaatggggcaattggccactctcatggctaatcgtgcccaaggaaattttccaagcacaatagtggttaatcaaaaagaaaattgcaaggcaattaccttgagaagtgggaagaattatgatgggttaagtgagaagaagtcagttgaagatgtggatcaggatcaacaggcacatgcattggcatgagaagagaagaaacaagaggaaaacaagactactaaaggtctacaaaacaaggaagcttctccacccgttagtattgagcatcatgttaagatcccctatcttcaaaggctttgtaaaaacaacatggataagcagttcactaagttttgtaaagtatttaaaaagttgcatatcaacattccatttgcagaggccttggaacagatgccaatttatgtcaagttcatgaaggacatcttgtattagaagagaaatatggaagacttcaaaactatggcattcacggaagagtgtagtgcaattttacaaaaaaaaaaactccctcctaaattgagagatcctaaaagttttaccatcccttgcactattgggaggatataaggaatcaatgctctatgtgatttgggggcgagtatcaacctaatgcccttgtcagtgttcaagagattacaattggagcaagccaaagccaacaaccgtgactttgcaattagctgaccgttccttggctcatccaagggaggtaattgaagatgtccttgtcaaggtggacaagtttatttttccagaaaattttattgttcttgacatggaggaagtattaatgctcccattatccttgggagaccctttttggcaaccgactaagctttgatagatgttcagaatggtgagttgaagttgagagtgcaaggggaagaagtggttttcaatgttctcaaagggatgacttatcccaaggctagtgacaactatttttcagtagatgttgtgggaaatttagtagaaggaagacaattaattgaagatcctttagagttgagtttgattgaaggtgatgtgaacgaccaagatggaaaggaagcaatggagtatgagaaatggcttgattcatattggccattgaagaagaaatgtaacaccctaactagcnnnnnnnnnnnacgtgatttttaaacgtattgtgcagctcg

SEQ ID NO: 165144 - DNA, 1008 bp, Cannabis sativa
  modified_base (117)..(119): a, c, t, g, unknown or other
  modified_base (978)..(982): a, c, t, g, unknown or other
ttttgtagaatattgagccatgcagagaagaattaaaattataagtttttgattatttatctatttgtctactatctaactacccatggagccaccatataaatatatatatatatnnntatatatatatatatcattagaaaaatattaaaaagtattagtattgtttagtattgttcaaagtgtcatatcttatatatatatcataagagaaatgttgaaaggcactagagtattgctattgaacactaacaccttctagatgtgttgcattacgattggtaagcaatactctctaaaagttactatattaaattatatgggacttaatacttaattgcactaataacaatattgacatgtagtaaggtgctaggcaccagtgatgtattttaacatttctcattataaaagagtattgatattgggcactaataatgcctaacaccttctagatgtgttactttttgtgatggattagcaatactctttaaagtggcatttggttagaggtaatgaaatggaaaggtttttccatatttttgtttgattttattttaaagtattggttattcctattctagttattttttcattcattccaactaaatgtcacttaatggagtattttttatgtgagtttgagtttgagaaagtaaaattaaagggaatagacttggagaaaatacgaaacttaagtgttagagattaatattactaccattttaattaaaaagtgagatctacttagaaacacaaaccccttattcattaaaatttaatttaagttttacattattcccattctcattaagtctaaatctcataccgaatgtcttataaaatacgtaattgtactaacggcgatattaacatgtaggaaggtgttatgctactaatgtcttttaacatttatttgctaaacatagtggtatttgatgccttatagcatgctcagggccggccctaggcataggnnnnntaggcccgtgcctagggcccacactt

SEQ ID NO: 165145 - DNA, 658 bp, Cannabis sativa
tgttttcaagatttgtggatcgtctaattatactccacaagacctttctagaaaagcactccaagtgcgtgtgagtggaaaacttgggaaaaaggaagacttcaaacaattaaaagaagaagggctttaacacatggcccaaaaaatatgctttgagctctgagacttcgaagcaagattgatgagtccatatttgttttctaagtataactaatttatatattaatatttttaaattaattctttaaattattcattagtgtgattataattttttaggctattttaaagactaattatgcatttagagtcatttggagggatgtcagcacattttagtagaaaatagtggaagtcagcgaactcggttttacaagacaaaacttaattacaaattttgaaaaccttggaagtagaattggatttggagctaaacatgaaatttgtagatctcgttctcatctttttggaacatcttgaatcgtccattttcaagttgtattaaagaagttatggacaaaatactaatcacgtaacataaatttttcgatagcgagtcatgggcgcagcgagcaacctcgtggtcgcgccgaggaggtgatttttgggcaaaattcaaattttatctttttttaagtgagatatttttaaggattat

SEQ ID NO: 165146 - DNA, 867 bp, Cannabis sativa
gactccaaatctatagtggaggaggatgcccctgtcaggagaaggtcctacagaacttgttctatccttcccacctgtcccctgagtggatatgatgctaagggggagttgttgaacaagcttggtcatccttcagtaatgggtctagatcacgtcttgatctagtattcttaaccttagattcatgatgctatatctcagggcgaccgctgggtcttccctgcatctatcctctctgtcgagacttttgaggagacaatggttagtggtctagtgagggtgttcattatgagttacccattggagactagagagcgcaccaactttccctcggttagatggcatggtggagtgccatatacaacatggggctgtgttgccgctccgaccttacttaagagaaattgctacttattttgggatgtgtccagaataaatcaccgcaaaaagtatcaagtacctttcgatgatgtttgttttttatacggagtaaggctggccttaacccactccttataagattaaatattattttgatatgaagtctgccctgaagcaaaattagactgggtacttctcctttagccaggttggccactagtggttgggtgacaccaacaacacacccatgtcaaaagtaggttggtacgcccaaaactacttcgttacttggggcattcacaagatcagaccctacaaattctagtaggtcttgttttacaagcactccatccctacattacagatgagggataggataaatcacgtcatgtctcttcctgcagtgaagagaaacataatcaaattggccagtgtggccaacttttataggtacggcctgtgccctcgtgcctctggtgttgtagg

SEQ ID NO: 165147 - DNA, 1086 bp, Cannabis sativa
gaatgagcaggctctgcaggtctcagcttacttcaattttgcaatctaaacagtttcagaaccaaatttattcttggtttctcattcttcatgggcttgtcaatccctcaatacttcaacgagtacaccgtcgtaaacggttatggtccagtccacaccggagcaagatgggtatcaaccaaaacctcttatctaacattctttaaaaaaaaaaaaccaactccatgtttcatatctctttacacttgtccattttttgttttccagttcaacgacatgatcaacgtgcccttctcatccgaaccctttgtcgcgggcgttttggcaatgttcctcgacgtcaccttgcataaaaaagacaatgcaacaagaaaagaccgaggaatgcattggtgggacagattccgatcattcaaaaccgacacaagaagtgaagagttttactcattgcctttcaatctcaacaagttcttcccctcggtgtgataaatcatttaagtacgacgacaaatgtaagtttttcgatgtcgtttaggacatgttccttcgaatatatcactcattttgagtctctttgacactgaaattgaaaatggttcacaaatcattttgtcaactcccagagaaaaatgtcattagtacttagtagtataaaggagaatggtttttgtttttttttaacacatagttttttaatattattattgctttattttattttttggtttaaatattataaagtaaaatactttgagattgttgtatcatctttgagtcttgaccaattgatattttattgcattgtaacagcttttgcttttggtttgactattctaatggttgtcccaatgttttgatgcttttctttttattatatgttaatacttttatgtattcgtattaaagacttaattaacaaaaagtaagattccatctcgaatagaggagaagagaggagcatattattactttattcgtcctatattttaatctatataataatgttctgaattgaacattgctattaggcacatagtatctaatactatttagaggtaacgctttgcgattagttagcaatactct

SEQ ID NO: 165148 - DNA, 1528 bp, Cannabis sativa
  modified_base (1460)..(1497): a, c, t, g, unknown or other
tctctctctctctctctaatttccctctctctcaccgaattctcactctctctcttgctaaatctcacagacgacccacgaccatcgactccactacccccaccccaaatgtcgttaacccagttgaaacctaccccacaccgacgagacccatgacgtctgacgagacccacgatcagagatcaccacgtcgcagaactaaatcgcaaaacccaacaaaatcgagaaacaacaaaacgaccaagaagaaggtatatttcgaaacttctaattgattttaaatgggttttggatcttaaatgattgattgttaggattagattcttttttttttgtttcggtttgagtttcatgtttacgaacaaatttctacaatttcacctattattgacatctcgcgactatgttcgcgatattttgtcgatttctttgtcaggcacaccaaaattttgacagtttttttttgcaatgtttcacgacatcttgcgatgtcatggtgcgacatgtttgtgttgtgtttgtcgacatcgtgaaaattgtcgtgagatatcgtgaaatattttgtgttgtgtgtggtattttttgttaggtattttgattggatgtttggcatagttcacggcatgtgacaatatatttgtcgatattttgcgataacatggggaatgttgttgtagattgtatgattatttttttcgatgactgtcgatatatgtcgactcattttgcgatttgttgcaatttattttacgacatttgtcgacatttttatcatgtgttataatagttggttttttttttgtcataaattttgcagatggctcctgaattgaagctgctaatttccgagcatttcacaggtctcttacctattagggcacaaataggtttgtccatattaaagctaagtttgatgaaatgaatttgactaaaagggttttagccagccctttcggaccattctgggaagcaagaaaatttgactttcttgggcgcattggtccacagtctactcttgcggaagatgaaagttgattcggagaaagaagatgagatatggtttaatgttcgtaaaacggacatgagatttggtcggttagagtttggattgataaccgacttacttatgggtagtggccctacagaggaagagatagaagccaagtccagtgaccgtttagtgaggacgtattttgaagggaagagtggtgtgcagttggatacattattgcttcaattagggagatgcgatgtagcagatgatgtgtacaagcttggacttattgcatttattgagggagtattggttgcaaaagaacgtaatgtccaagtttggccaaagatgttgaaatttgttgcggacctcagattcttcttcaaatatctgtggggcaagcttgcttttcaaaagttaatgtggtctatgagtaaggacatgactgttgggttttgtgccctannnnnnnnnnnnnnnnnnnnnnnnnnnnnnnnnnnnnnataaagattagaaataacatttaatgttgca

SEQ ID NO: 165149 - DNA, 894 bp, Cannabis sativa
  modified_base (606)..(610): a, c, t, g, unknown or other
agagagagagagagagaagagaagtgtttttctctaattttgatttctttcttctttaactcattaattccaaaagtgcttaacattaagcattattcagccaccaaaatggcagctgtcaagctttgaataagccacctaaccctccatttaaaaaatgactaaaatgcccctttaggttaaaacttaggtatttctcaagactagaggtaaaattgtcaaatttcaaaaccccgctcaacctcagtattttattttctccaatatatatcccactaagaaataaggttctaaacttaccaatgtgatcaaactagtcatccatcacattttctgctgtcgatgagcaaaaattataaaaataacatatttcacatataattcaaataatacgcctagagttttataaaatctttggaattgagaaattataactctaatgtccatttctaataatggggcccataattaattaaattcataaataattataaaaatttcagaaattagtgctaattgcctttacaaatccaaattactaaagacgtcattacaattatccccccgttaataggatttcaccctcgaaatctaacctgaatagcnnnnnatgttgagtcctcatgtcagactccaactcccaagtggcttactcaaccttactatttctccagagcactttgacaaaggcaatgatcttgctccgaagaaccttctcctttctatcaaggatctgaacaggctactcttcataggataagtctgactacagttcaagggcttcataacttaagatatgggtcggctctgaaacatattttctcaacgttgaaatatggaatacatcatgaacagccgacagtgctggtgataaggctagccgatacgctacct

SEQ ID NO: 165150 - DNA, 2374 bp, Cannabis sativa
aaactccttggacgaagaaaaccaatagaatgttgatttagaggagaagatcccactgggatccgaaatccacaaacggctatcatcaaggatgttgagtactctaacatgttccaacttctataatagttgtgtcaggttcgagatttccctatccataaagtttcttctgaatttaaagtcccagcttgccacatagtttcccacctcgccctcatcggcaatcatctcctgtatacttacattcttagccttagagatcactgcaacgtctgggaattgctcctttagagaggatcccccaatacatacgtcctcgcagaaccgtatacttgctccgtatcatactttgaacttcaccaattggccatattcgtcgtaatgatctaaaatatccttccacggccctcttggagataatcgagcccccccttttgtatcccagaaattatctgctatgccatagcgacttttgattactttgtgccacagggagtttggctctaaaggaaatcttcataaccatttcatcagcaaccctttgttcctcaactctatccttccaattgctaaaccatcctcacttcttggtttgcatacctcatcccaagccactaaatggtcaccccctgctaagtctccaccttcccaaaagaaatctctcatcattttttctattgccttgatgactatttttggagctttgaagagagagaggtagtagatagggagggaagataggaccgactggataagagtaagcctccctcccctagacaagaaggagcatttccatccatctaatcttttcgcacatttatccaagacaggctcccagaaaatctctttcctcggggagccaccaagtggcattcccaagtatgtcataggccatggtcctaccttacaaccaattacttctgcgttttgggccaccacttcctcttctaggcatattcccaacagttgactcttgttcaagtttactttcaaactataaacgccacaaaaagtttcaacaatctcaaccagttttcgtagtgaggcctcatccttaacaaagaaaagggtgtcgtccgcaaattgtaaatgactgatctggacgttgtttttgcctacttagaaccccgagaatgagcctaattctactgccctatccaccatccttccaagcacatcaactaccaatgtaaatagaaacggcgatagaggatctccctgtcgaagacctctaaaacctctgaacttgcctctcgctctgccattaatgagcaaggagaataatgtagatgaaacacatcctctaatccacttcctccatagctccccgaaacctttctccttcagcaccaaatccagaaaatcccaatcaacacaatcatatgctttctccaagtcgatcttaaacacgaatcccttcttgccacaactcctatactcatctactgtctcgtttgctatgaggaccgagtctaggatttgtcgtccttcgacaaaagccgattgagtttcagaggtagtctctcctaaaacacctcgtagtctagtcgcaagtgtcttggccacaattttgtacacacttgtgatgaggctgattggtctgaaatctttgaccttgcagctgttaagtcttttggggatcagacagataaaggtttcattgatgctaccttcaattcttccctctttctcaaaggcccgaaacacttccatcagatcatccttgatcgtgtcccagttgttttggaaaaccgccatcctaaaaccgtctggcctcgacactttacttccttcacagctgaagactgttcttttgacctcttcttcttcaaaagaacattcaagttggcaagctaaggaggacgctatacgttgccattcaatgccctcagtcctttacccccttcttgcctcagaggtataaagtttcgaaaaaaaaccaattagctcctccacaagtttgtcctccttatcaataatagacccatcatctctttcaattcttgaaatggcgttcctggccttcctcgcatttagtagattgtggaagaatcttaaattagcatccccttccttagcccatttacacttcgatttaagccaattacttctttcttcttcaaaattcagccgctgccattcctcttttaattttcttctctcctcggacatgctttgagcccaggaattggttccttctagcctatctaatgcgtccagcctgccttccaaagctctcttttttgccttgttttgtccgaaagtggatgagctccactccttcacctttccttgggtcattttcaacttgctcataaactttgtgccgggccaaccagtagaaatggctgttacgaattttatgtttattacg

SEQ ID NO: 165151 - DNA, 763 bp, Cannabis sativa
ggcgaagtaaacttgtatcgaatggattagctatacattggactggaccaatattgatagtggaaaatgtattataaacttgttgttgtatcttttctaagtcggtgctacttagttgatcttaggttaattgatcttaatcctgagatgttaagttctagcttacttgcactatatgaattttttgacttattcattaccagcttacccgcaaaactagcccatacttacatcttgagaattcagtagtacacttgagtgcgagcgctaatcatagatttgtagcatatagcttaaactatttagaagtaaaacgatagttttcttatagcttgtataaatgatataaatggaagaactcttatttcgataattatattagtttactaaaatattatttataagtagctaagaattttaaagataaaatgcatcgaaggtaaaataattaatttgtccctacttgatataaactcgctaatagaagatcagtggttgtttaaattgaaacaatagataattcataacgtatttatatatagtatatagagtgttctatgtaatcaagcgattccaaatctctagtgaagtctacgacatgagccaaggacggagatattagaggttgcagagagacctctgaaatctctacgcttcgagtgttatccacactacaagaaaaccagcttttgtcggcgcattgttgcgccggcaaaagtacactgaatgcgccggcaaagattatctgggaagcttggtcggt

SEQ ID NO: 165152 - DNA, 578 bp, Cannabis sativa
tatgtctaaatttagcaaaaacaattctaaccagaactagaacaacctctttttccgtataatacaaaatggtatatactattttagctttttactattaaattataaagcatactgttttaaacacattaattttgatcaaaattattgttaagaaagtaatatataatatcactctttattcaataaaatgatttagttaaataaatattttatgaataaaaaattattttgcattgtaatatgtttatgaggaaatgtattttacgtaaattatttaattaagaagtaatcattaaaaaaaacatattgagaaatctattttatttaattttatttattaaatttttaaaactatttaaaaaaaatgtgaaatatatagtattatttttttattagtataaattcaatccctgctaaaaaaaattaatttgatcacacaaaatatataattaatttcacacataaggtatttaagaaatatatgtgaaaaagttgaatagtaaatataggtggcgtttagtaatatttaatcagttttttatttttaaaattagaaaagtgaaaatatttttcaa

SEQ ID NO: 165153 - DNA, 792 bp, Cannabis sativa
ataagaagcccaaaactgaaaatgtagggaaatttataatgtttagattaaataattaagcgtgataaaataatagttgtgacacagtaacatataataggaagttgcatagtttgagcataaatcatgaaaaggagttgcaaattcttgaaagatgataatgataaattttgtaactcttctccatattatcactattaataaattagtgaaaaatagtactaattgtatttggatatgaatgaatgataactattgaaaatatagttattgagcacttaatttattgacttataaagtatataaatggttcgaaatcaagtggaagtgttttgaacactttgacgaagaattgaccaaagttgaaaaaaatagtaactagtaactagatatttttttttttcagcatgtcattgtgtgcgtttcttgaatatttggatcttttctaacaactcaaaatatctctaaattacccaattaataccataaacgtccactttatgataagtaacatccaagggctttatggtgatcattcatgtacatataggagtgaaaactctataaatagtcaccattgtataaaaattgtatacacactataatatatataataattagatattaattttgcgtacctcattgattcatggcaattaccacaatttgatagtgcaagactattaactaagtcttcttccataggtctctaaatcagaagcagttttagtttatctgattatcaaaagtatacaattgtgatgagacaatatttatttatagagttaggga

SEQ ID NO: 165154 - DNA, 823 bp, Cannabis sativa
ggcagaggaggtagagaaagagattgaatcaaagcaagaacaagatgcatttcaagaatcagcaaagaatcattggaagtcttctgcaaaggacaatatgacctatcgagatccaatgcttgcttaaacagaaccattaatcaagcatggagttaagatttctcaagttgacgtagaggaggtcaaaatgcaggttgcgaattggagcttggctgtgatctgtatggttcttggtgaaaatccacctatgccagtgtttgaggggttcattaagagaattcggggacatcttagaatagctcggattatcaaaatggcaatgggtttaacaattgtcaagtttaatgatgaggctactagggatcaagtttcggaggtgttctgcaatttgacaggaagcctgttattgtaaggttatgatctacaaatctaaatgcggtgaaacttatcaaatcaattcctttatgaatccgtcttcatgatctgggccttcaatactggggaaaaaaaagcttgagtgcgttggttagtgctactagaaaacttataatgttggaccaatatactaaagatcgtaccaatatactaattttaccttgattctaaattcaagtgtaccggtcaatctgagtggatactgctcttcgataatttacaggcccctaagtcacaatattcgtaaaactgataagtgatacgctaaatcacttctcggagacttaaatttaaaattaaaagtttctttattggtagatagcgtgtcaataccctaaatatcgataaaatacgaaaaactagagttctaaaactgctaaaactggta

SEQ ID NO: 165155 - DNA, 1380 bp, Cannabis sativa
agagagagagagagagagagcgggtaggctcacgagatcagacaggagggaaaactgggtttcgggacctgggaattatgaaattttggtctggtacaagctggtgttgcaggtttgtttttggtaaaaagaaaccccaaaataggtgggtgacagctaaaaagttatgagtttctttggtatgagattcaatagattcaggccatggtggttgtggaggtgcgtagaaggaagaagacgaaggggaaagagaagagaaagggtcagggtgatttatggggattgaaaagaagaaaggaagaagatgattaagaaaaaataaataaataaataaataaaataaaataaatttataattttaaaattattttttagtttttattttattttaattatttttaattaaaattattatttggaccaataaggcttcaacacgtagcacttttgaataaattaacggagcagttaaatttaggactaacgaacttacaaagggtgcgaccttgaagactattgccgctatttctcgagcttaaggactaatctgtaataaagtgaacattttaaagacttttgccgctaatttcctttatatttttattaattaaaaatataaaagacaaatatgcccttcaaaaatatataaataaaaaattattacatgttctaacaatgacaatttagtcaaattaattcattccgattatcttttctgattatataaacaaaataaaatgattatgatttcctttccggtcagtttagtaaaacaaaaaaataaaatattatttctgattattttatattttaacccaattcatttctttcattgattattctgattctaattacagtttattagccagcgtagactaccaagaataaactttctttcgtgggttttaccgttcacatagatcattttttcttgcagttgaaaataataataaatttgtttaaacatatttcttattctcattcaatatatttaaataaataaagtaaagccccttttagccgaggtgccatgggagagtggtgctggtgcatgcgtttgacttgatttataatgtataaaagagtggatgcaggtaagatatttagaatcaataatttggacttttaccaacttttgaaccgaatggtcacaaatagtacactaaaaaaatatcctagtgtttgatcatataagagtgcagctcacaaaattgtaggcacaagagtccgccactacctgttgaagggaaatgactaaccatatatatatatatatgaatatatatatatgggtacggtcttaatgggtattacccatgtatgggtattttattcttgatcattggatcaaatatctaatggttgatatttataatcatt

SEQ ID NO: 165156 - DNA, 1744 bp, Cannabis sativa
agaatccacattagatacaacaagaacatctgcagactcatatcccgtgtatacatctcctctaaccttgccattgttgccttcggtcctaagtttagccttcgaagccaaacattcatctctgaaaggtccctctttcttgcaataataacatttcttccttgtggttccccttgaattggagtttgatcttggcttgccactgttcttgtgctttttagttttgttatccctgctttgtggtcttcctctggtaaacaagccttcaccattgtcataatctctgtcatcagttctcttctgaatttctttagaacttagttcaaattttacctcagacatggtgagtctctttaccatagagtattgtgtctacaaaatccttataagtctttggcaatgaattgagcaagattattgccaaatcctcttcttcaagcttgaacccgatgttacattctaaactggttttccaatttctattttccttctctaattcttggtttcctgtttttctttcttccaacgaccaagggaatgccgcgacattgtctgctaaggagcaatattgatgaccagtttcacattttcttcatttttcaatttatttttataaagtaatcactcttgactatagaccactacttttggaactgaaaatgtaaattttgaccaaatttttttttttttatgaagaattttgaccaattttaaataataaaaatcccaactaagcattatttaaatcttgaagtttacttttttctcatagttacctatttttgtcttaaaaagacttgaagaacaacaaaataaccaaaaacaaacatttcctaatatttctcctaaaaaagcaagcataaatttgaataataaaatgataaaaatactaaaactcacactaaaattgactccaaaaataaaagtaaacccaacaaacttgttggacaatgttcacaaagtgtcactatttttagaaaagacaccaagaacatatatcacatccacacatctccatcttagccagctttttatgaccaaagttgaaaaaaaaaagtgttgaaaataaagcaatataaaaagaaacattatttcttccaagtttgaaatacttcttaattattttgttttcaagttttaatgttcgattgcacaataacctactaacatatttttggtacaactttataaaaaataaaaaagtgttgaacttctttacaatgtataaggacatgaatactagtacagatttgctaagacaagaataagagaaagtgttatcattattatcaaagaaaagaaaaagagaaagtgaatgatttgtcaaattttgagtggtgaatctagaatataatcgaacaccaatattcgtttattttcatactaaatttcacattgatatatatatatttttctataagcatattatataatatgtagaaatggtggatgcatcataattataattttgtgaagcataacaatataataatagattacaaatcacaattgtgttgacttaaccaatattttcttttaaaaaagttatccatgatacgctatttaaatatatatttttaagttatttggggtgaaattttttatgtttaaattttttatacttaatcttatttctttttatttttagtggtaaaaattttttatgtttattttttatttggaataattttacaaatatacaaaaataacaaaaaattacaaaaaaatacgattttacggaatt

SEQ ID NO: 165157 - DNA, 958 bp, Cannabis sativa
gtagttgatatcccatataattaaatcaatatcttttttattttttaatagaattaattaattacatcttacacattatttagctaattaattatcaagattttatttattcaaaaaaaaattatcaagattttattataaagttaagacttgatagaatatattatacagtagttataatatgtgctatttcattttcctatcttaattataatttgatagacatgcatgttgatttaatataaacacaaatatgcgtattattagtatgtaagtattcatgaacttgtattatttaatcaattaatataaatacattctataagatgcatgtctgaaaatttgactatatatatttatatatatctttagaaatttataattttctactctaaaaatgtctgacatcaaaggattacgttacccgtgaagagatttgaagtagaaagttcaaattttaatttacatttaattaatcaatcagctcctggaatgcatataattaagttatatataggtacttaattattattattattatattttaattgatttaattagaagtgaggattttccataagtgggtataagctgttcaaactaaaccagttgatgctctagtatccctgttttgtttctcctgttttggaaattaattatttaattaattattagttgaggaaaagcaatgacaatatatatattttttattaatagaatttatacacaaaatatgatcttgtctgcttgaaactgaaaggtgtcgtaatcacttttaaataatataaatgattcttggattttcgaccctaccaagctacaaatttatgactaaaaacttaccaaaatctaagaagacacaccagctgtaaaggaacaaaattaattaatcaaccaacccaatgcaacatacgtaatctttacttatacttccaatgaaaaaaaaaattatatatat

SEQ ID NO: 165158 - DNA, 1572 bp, Cannabis sativa
taactactgtcttacctgatgtcacacaattgtggagattccaaatccccaggtacttctgaccaagtgccagtaatcctagtcataatttctgggattcacaaaataaagttaatccctaaatccttttccacataattataaaattggcattcaaattctagataatcacatagagctcggaacgagctttccaatgatatgtggaactcccgaagtggagttcggattacaaagatacaagcattcgaaactgcccataaacaagggggcgggccgcgacactccccacacaggaccgcggcacctgggttggaaacccaggccaccaacaggggcgggccgcaatgcccatagagtggagccgcgaccactgggtttcaaacccaagaaaccccaaattacaggtttaaaaacatgctcaaacacacctaactcaccccaattatgcataaacctcaaaatcatactccaaagattaataggtaataaaatagagcatcaaaacacatatttcatgcttaatccacatccaacatacatcaaaaattcagattaacaacatacaagctaggctccaaacattgagctaaagatcaacataattccatcttcaaagacttgcacagccaagccataaactcatgcttcaagcaaataattttagagctacaaaccacataactaacactaaataccatccaaatattcactccaaaacctacccaaagcaataatcaatagctatagacacaatcatgatcacaacaacaaaaacaacttaattatcacaagcatgcaactcaagagcacatttcatgacttcacacatattttcatctcagaaatacaggaataaaaattcaataacaaaagatggaaacttcctcaagatctttcccactcaagcaccaaaatcctaagcgccaagcacacaccaaaaatccaattgaaagcacatattcaagtgaaaaagagttttcagaaagagagaggggaaaggagggacggttagggctgatcaaaacaagagatgcacttcaatttcactaaaattcattttgttgcaaaagtgagtcaaatggtcaaaatgaccaaattgcccctaaggccttttaacacacatacatacattatgggaaaataagtcatttccatcacaaactacatttaaataaatttcaggttattcactcaatcataaaatgccaatataaaatcccaaaaatacatttcggtcccgaacccggttcagcctaaaatactcgattatgactataccatgccgacttgtcaaaaaacacctgcaaaaaggacacaaaaagtatactatataataatatagtccataagcacgtcacaacattaaaatcatagttctacccttctcaagtcaaaattataaaaatgcccttgactcaccaacggggtcttaacatgtcatttcttaatttaattcacatataataatataattcaatatattattacatttatcccctccttatataaaatttcatcccgaagtttacctgaacaactccggatatttctgctgcatatccgtctcga

SEQ ID NO: 165159 - DNA, 1367 bp, Cannabis sativa
taaatggatattttgtcaaaaaaaattaggactgagatgaaagaataagatggttcttttgaaaaatggtgggtatacagtttatttctagataaagaatttaacttttatatttaaacaatacctaagtttgtaataaaatatggtgtgttatgttagaaaaagaaaaattttatttacaccctataaaatgataagtacattcaatatttaaaaaaattaagcttaaaataatttttaaaaatcactcttaatattcttttaatttttttctcatattattttgtgttaaattcaatacttattttaatttattttcatatatatattttttaaatcatgtataattttttattctttttttctaataaaatttcacacaatatattttttttttttgcagaaaataaaagggatcccatgatgcaaattccgtctctaccccttcaaacgtaaggcaatctcgaggactacgttataggggtcttatatctcatcctaccttacttgggtcatcaatacatacacctcatgagaattcctatcccaaagatacaccacacagcaagtcagccttcaaggggcaaacataaatccctcacaattgaggggataagtgaaagtcgaacccttgacccaaataagggaggagacctgtaaagactttcctaccactacaccacgcaacacgtggtttcacataattttttattttaattttttgttataaaatttgaagtatgatttatttttacttaataggaatattttttaagaatatgaattgaaaaaaaaaatctaaaaaaaaaatctaacataattaaagatatataaaaattattaaaatagagtatttataaatttttaaagtgcaaataaaactccccataaaaaaacttaaaataaaatggggtgaacatgtaaatccccaataaagtaggggccttcaatttagggtgaggagaaatgctaaaaggcaccaatggtgcctagtaccctcctatgtgtcaatattgttattggtcaaactaagtatcgagtctcatatgatttaatgttataacttttagtgagtatcactagccaatcgaaaggcgacatgtccaaaggtgttaggcaccactggtatccaataacaatactcggactttttgcgcatatggtagtgcaggtagagcgagcctgcacgtcaccactcatagattaacaaaagggataattacatatgacaccatttcttgtaaaaaaaaattacatttttacgtttgcaaattttttttttttttttacatttgtttttcatagaaataacacgatcacaacaagaaaactacataaaagtgacataaaaataacatctaaataat

SEQ ID NO: 165160 - DNA, 1217 bp, Cannabis sativa
ttcacatccgtataccattaaaaacggagagtgtcatttggtggtccatgcagtagttctatatgccagagtactcatggcaattccttgggccaattatttttgcaaaccatgagtttcttcttgagtgtgaccttcaaatatcttattcatagcttctacttgaccattttcttgtagtcttgaaaccgtggagaagctttttatgaatctatgttttttgtagagctcagtgaatatgtcactatcaaattaatttaccattgtccaaaactatcttgtgcacgtagacactcaattgggaccatgggaggaccagttaattgggcttatacttacaagactcaacctcacctaataaaggacacgtttgctttaatcacttgagcgcactcaacaggatagagatccctatcactagttgattttatcgtggctctttgtcctcatcggtgtttgcccttataacttacttttataaccctccttaagatgcaccagttaattgggcttatacttacaagagtcaacctcacctaatacaggacacatttgctttaatcacttgagcgcactcaacaggatagagatccctatcactagttgattttatcgtggctctttgtcctcatcggtacttttataaccctccttaaaggaagttgttgaagttaagatgcaccaatacatctttggtgggtctttgagatcctttcaattacctatgctgtgttgaagggatattgatatgatttgatcgattgcgtaaagcccgtggtagcaacagaaccacataaagtatacagagaattataccggctgtacaggctgggcctcggacttgtgtaactctagggtcattctagtttgactttccctttctcctagccgttggattatttagcttagtacacgagaacatgcatgccttgcatgatagcgtgtcgtgggggacaacctctgacaatgtacatgaaacaacctagtctctaggtctgtagcctgacacgcgtgggctgaacctgcgcgggtcaaaggcgtaccccggacaggtgcatcatcgaggtgctttggcctggtttgagaagagtcatattcctcgtgtgaggctagttttagcctatgtttcagatcacaattatgttcgcttttcgatgttttaggacagaattacgcttgttttctatgttttcaggtttctcgaagctaaggaagct

SEQ ID NO: 165161 - DNA, 780 bp, Cannabis sativa
ctctctctctctctctctattacacattttccaatcttatttaaatggattagtgttatgctttcaatttattttgttgctccaaaaaaaaaaagaagaaaaaaagctgtcactgaaaatgaattctcagcaattacttgtactggacacctacatgtaggggtacccttggctggggcagtaaatcatcttgtccgtggggttcttcatcactttctcctaatactgatggtggtggatctccaagttttctaagtggccgcccttcttctggaagtggcactcgcccttcaactgcaagcagtgatagagctcatgaacctacaattaatgtttctggtccaaattctaggccatcgtcagcttctggggcattgacctcaagccagacatcactgatagcattgcgccctcgaagtgcggaaacaagacctggtagctcacagctttcacgatttgctgaacactctgagcatcaagtggcatggaatgctgctgggactgcagaaaaattggtatggtaaagctctatgaaaatcatttatattacaaactattggttcatcaaatgcatatttagctgcttatatttttaattaatttaaaaatatacaattagtttttctttattcctgtacttctaatttgtctagtaaacatgcatgctgcatattagttttttttttgggtgtctacacatttgatatcttatgttttatctaaatataaatttggtaccttgtgttttcaataatacttatttggtatcctgtattttaa

SEQ ID NO: 165162 - DNA, 1106 bp, Cannabis sativa
cttgagatgcctcagtattgggaacagtaggttgaagtttctggctcaacaatgagattaaggcctgtagtcagatttgccaagagagatatggaatttgttgaggcagaggcttggttggcagaaggctggttctcagttttctttttgtctccatagcctggtggaaaaccaattaagaaaaaaaaaaatttctttgaggtgtccaggcttgtggaaaaccaattatggtggctcatactacaaaaaatagatacctttagtgacaaccttttagttataatataaattttttgtgattaaatatgacttttagttacaacaaaactatttgtgactaaaacatagtattatttagatataagttgtaactaatttactttaagccacaacaagtatattgtgactaaaatcacaattagtcacaacaaattgtgatttttatgactaatacttttagccacgaactttttagtcataacatataagaatgttgatttatatataattatagtcacaatttttttatttttagtcacaagttttgttaagtaactaaaagtaaacaattttatagtgtcgacataagttgaaacgtcattggggtggtctgtttaagagagagagagagggagatgagtatgtgtgggtgtatgtgggttttaaatgctaggggataatttgggaacaattaggaatagtagcataattttgagatagaagggtttataattatatggtgtttattttgggtccatacattaagcatgtaaaccagaatttctcaatgaaaattcaattaataggaccacccgaacaaacaaacgaaattgaacgtactaaacaaattaacacacatgtgacctccattcaaaaaaaaaaaacatacatgtgacttatatatgaaccacatatattttattgaaatctatacagttattcacaaatttcattctgactaaaaagtggtcaagtggtctacaaatttatacatgtgtggtcattgggacgacttggttatcatttcagactcctctgtagtcgtggatgctttcaagaaggagagacatcccaactggcattgtatttcttggttctcttctgct

SEQ ID NO: 165163 - DNA, 1441 bp, Cannabis sativa
ttatattttttattttattacaaactatctagcaccattattaaaattaaaagtgatactttatgaataattagaaaataaattgccatgtgtaattatattttgttaaaaaataattaaattatatattaataactatatattatatattttgagattctttatatatttattttaataatattaataactattttacttttttctaaaaaaaaaaattgctcttaacaacacaaataaataaattaatattgtagattcatattttttctaattattttgaactgtttaattaatttactattataggtatatattattatattgttagtttttaaatatatattatttgaataaaataaatttctagtaaaaaaaattattgaagaagaatatgcaaatttattaaaaatttatgatttcaagatttttattataatatcttacttatagtcgcaacaacattaaagttttaatttgatataatttatagaaaactttttatataattcaaaattattgtcactgttgttagattatttttaaatattttaataagtgagtttacaaattaagacaatttatttaagctaattttttaaattaagctaaataagtaatctaattaaataagttcaataaatatgtacccacagttaaattaagctaaataagtgatctaattaggattatgagactcttattagtttgctacataaataacataagggtttggtcccaaagctaatcttaactacttttttcttccattttcataattgaatgagaactcacatagagaagattagtcttgaaagatcatatatttgtacctatcatatttattaaaaaaatttttgatctattattttaatcaaagaaaaaaaaaagtgcatgaagaaaaataaaagaattttttagttcactaagccactttcacatattattgattctaatggaataataatacctattaaaataattaaaatagatgagtaaattaatttaagaactaccacatatttataatgtgtgataaaaattaataataatatttaataaatggatgaatatgaatatttttaataagtaaaagaaacatgggcatatggagaagagagagtgagagggcgtaaagagtgtgatgagatatgatataaaaaaaaaatgctaattatgatttttgccctttgaactttgatatgtatcaaattatgccatctgaacttttaaggtcgttaaaaatgtccctgaactattgaaattgttgaatttaaggactttttccaattttagtaaaaaagtttaaaatagttgaaagttcagatggcataatttagtacatgtcaaagtttgagggacatgatacagtaaatatcaaagtctggggatcatagtttagtacgtaaacaatcacaaaaatagtaaaattgaatgaaat

SEQ ID NO: 165164 - DNA, 1675 bp, Cannabis sativa
aacatttatcaaaagggttaacatgtattaattctgggaattgataaataaaacacactaatcctaaaatagtaagtgggagaaagagtacatgtcaatataatatatggtctccattattggtcaacatcgaaggagtataaactagccttgtgatggctttgtttcgtctccgtaaggaatgtatttgtctatactgttgcttaaggttgatctcttgactaagataggatgaagtaatatattttagtatgaccaaccctaaggtaggattactaagttaagtcatggaatctaaaataatgggttacattcacaaaatgcaactatgcttccatgcagttcgttgttaacttgaccaaacaatggtactttatattttgaaaaggaaaatatgatataattaggtttcaaaataataaagatgagattcgtctcataggcccaatgaaataaatttgggcgaccctaaggcatcattactaaatgaagtcatgaaatctgaaataatgggttacactcacaaaatgcaactatgcctctatgcagttagttgttcacttcaccaacaacgatactttatattttgaaaaggataatatgagatacttaggtttcaaaataataaagatggaattcgtctcataggcacattgaaattaatttgaccgaccctaaggcggtgcttaattgtcaaaatgtcttatcgtggaatagcttaaacattcttttatgtattttaattgtatgcgctcatgcatcacatctacattaatttcaagatgatatttatttattcaagtatattgatttgctatttttatttattttcagtcatggcctactatgtcaaattccctcactgctttactagcacttgaaaaattggatggtggaaattttctttagaaatctaatatgaatttgatactagtttgtgagaactacaaatttgtcctaactgaggagtgccctgaaaagcttgctgccaacgccctgaacaatgtttgggacacataagatacatgaattcaatccaaaaatgtcaagaccaagtgcttcatgcttgtgagcatggatgatgttatgcgcaaaatgtatctaaaataatgaattctctgcaggacatgtttgggcagcaatataatcaaactagacatgatgttactcgtacacttttacaaactgcacttttggtgtcagttttaaactaacacttatacatatagtatcagttcatagaaccgacacctattccacagtgacaaaaagtcagagtttaggtatcggttataaaccgagactaatgagttttagtgtcattttaaaactgacacttaaagtgtgcatatatatttttccatttcgtctcactttataaccgagactaattagtataagcatcgattccaaattgacactaaatgttttttaaaatttttaataatgcaactgaatattcatattttttgctttattttagagccgacacaaaatattttttacttcggttaaaaagaaaaagcttttgcttcggttcataactgaagtaaatagtagtgcaccaccaccaccaccaccactgttgtataccgacatggtacggtttacatttatcaactcgcaagcgcacgaatctttattgtaatatggagattgtgaagaacgaggtcga

SEQ ID NO: 165165 - DNA, 1465 bp, Cannabis sativa
gtgcatgtgtatattttggttgttgcctttagtggttatgtctcattgacccgctattgtgctttggtgtttcatttcagttacttattgggtgtaatttaatgcaatacactgacgtattctcattaaccataatgagaagtccatctagtttttgctagatgttgcaatgatttttttccttcttaatccttgtgtttgtctagcaaggctctcttcaagtatggaagcgacacaattatgctcttacatagaaacttgagatgctgctagttttaatactgtggaggttgattctctaaaattgaaccagctagtcaaattacaattcaagaatcctttcctcttttagagatattaattacttagataagcttctttcaaagatcaatgagagtgtttgagagtctttaagttgtgaaagagcttctaagggaactgttttgcaagtttgggagagtgcttggtaccaagaagccattgctgatcttcaactgtaaacaaagtgtcttgttcaaaactgaatgtaggctattatccaaaccagtataatacttggtgccaatttcttttattatttataatctctatttgcttaagtttattgctttgtgttctgttcttgaacttgtgttgttgaaaaacacaacaaatattacatagctagtaacaatataagcacttttacagtaagataaccatttttaattctcaagtgtttatcttttagttacaacgtgttaagcaaatggttcattccattattttaaattgtatgtgccaatgttattatcaatccttattttagtctttcttgaactagtttatttttttattgggcgagaatatataaggtcattttttttacttatcttttattgaattgatttttattgctggatacttgtttttatttttgttcaagttattgttatcatcctcaattgattaatgagttgattttcattttcttgtttctgtgttagattagactagacaatatgaaataatgaactaaattttgaaatgctagtgtaactttcgtatatatgtgtagtgtaattttttaattgtttgtgtttgaaagagcatgcaaacttgtttattagtacttttatagttatatattaaaatattattaatccttaataatatgcagcatatgactacttgtgttggcccatttttttaacttgtgtttttcctactttcctccattgcattcatattttgaattttgttctcaatgaaaggctccctccattaataagctctaatatgcttctctctatattttctgcttgtagatttggattttcatcaaaataaaagtgtttccttgtatgaatgtgttgtaggtaatattagagaagcgaagcgacagctttattagataaggtaaattttttaaatttatttattttattacaaagtttaatatttatagtgccactactaattactt

SEQ ID NO: 165166 - DNA, 684 bp, Cannabis sativa
gacttttgatattttgataatgctgtcatgaaaaaatacgtcagttatagccgatttgactttgtggggtcactatactggttttcggaaaaaaatgatattaacatattgttttaaaaatatctgctcttacgaaaatattttaacacaattaatttaaaaataaattataattaatcccaataaaaatcaattatcaattagttcgtaaaggaaacaaacaacccattagtttagtgaaaatatgacgtgtataagtacagtgaacatgtgtgaatatactatacacgtcatatatgtacgtgtgcgcatatactgtacacgtgtgattatatgcacacatgggcatgtctacacaaaatatgtagttgcctatgtcgtttttctcatgaaaaatgctaatgttcaaacttaaagaattcaaacgacagaagaaatatatgagcttcaattcagtactttttttaattaaaaaaaagagagtaattgatggttaaatcctcctaacttttatttcacttgaatttaactttttaaacttaaattttggtagaaaaacttaccaaactcattttctgtttgtatttttaaagtaatgtattagtttatcattttgcctatgtagctagtgacacatcaccgctaaaattcaatataattactaaacactacaaaaaattgcta

SEQ ID NO: 165167 - DNA, 1016 bp, Cannabis sativa
  modified_base (978)..(983): a, c, t, g, unknown or other
tataattttgtacaattttatgactaaacaaaagttattagttatacttttttgaagtagggtcgagtctttcttttcttcttgaaactaatttcatttagaaatcgattctatctagatgttgatgtagcgatcctattgtgcagacttgttccgaaaaatttctaaccaaatcttcatagtaggtgagctttagcatagtggaattagtttaggtatacattgatctgagggtcttagctctagtctggtgtcactcaccatccagtatcgatccctagcaagtttatgcatagcttgaacttgtttacggtaacaatcttagttttcatgtcagcaaggttctctttggtggaaatcttttgtatgtatatatgttcctttaccattttatctttgatgaagtggtattttatttacatgttttgttcaatcatggaacatcaggctcttacataaatgtatgcaactctgactgtctaaatagatcatagggactctatcttctttagttatcacatttatcaatccttgtagccaagctacttccttaattgcttctgtaacaacaatatatttacattcaatggtagatagggctaccactagttggagctagactttccagttattgcaacacccattgatgatgaagtagtaagcagaggttgatcttttgttatccatgtcaccagcataatctgcatcattatatcctttgatgcctaggtttttattttgtcttctgtatgtaagtcataccttatatagttctctttaccagggttggccatgtatttactcaacatgctcatggtgtgtgcaagatcagatctggtgcacactatgagatatattatcaactgcatttgagtggggaatgtcattcatagactttacttcagcttctgttttggggcatttgttacgaattttatgtttattacgcaagtgtacgcaatcaagtagtatctcacnnnnnngaggtcgaaccacaggaaattggattaagtact

SEQ ID NO: 165168 - DNA, 1755 bp, Cannabis sativa
ataaattaattacgctgaaattttgtagtgtataactatttcaattttatatattgctagtatctctatagtgatcaaagcaaataagaatcaattttcccattttttcaaaatcagaaccccattttgcatgttctttggtattgtgaagactccacattaacgcataaaaaaataaaaaaataaaactcaaaatcccattttccaaccaagaaccataagaatcaaaacctcacatttcatgctatcatttctcacattcttttctcttgttgaacctgttagaatatctttgtagggtaataaatcaaatatttaaaatattctaaggtcatattctactacttaatattacagttacacattttaaattctagatttaattattaaaatattctgataattaattatggctgagattttgatataaggtctcacctatttaaatatacggtcttgatccccgagctcactactcattctgtaaaacacggtaagttcatctaaaaagagtagagagagcttggaaacccgattacccagactaatcagtttctttttcttttgcaaatcaaagcttgtgtgggactgaagctcaaagaatcaatagttagaggtatttcgatccttagttatagtgcatatatatttcattaatttcacacttcatacaataatcatatatgcttcatctcatacatataaatgtcaaacaattggtatcaaagcaaattttatatctctatcttgatcctttaaaatttttggtgaatatatattttgtattttttgttcattcatttatatatatatatttatatatttatctatttagtctattaatttggtaatattaagaatatttttattcaatcaattcgatattatctatgcattaaaatcaatattttcatatatatatatatatatatatcttatattcattttcttcgtgtgtgtacatacatataatttcgcctatatatatttatatataattttctttgattatatgattttattatttagtattatttagtattgattatatttattatatgatgtcaacgtaagccaagccaaagataaaatacatgtggaatacagcgttcccaatagcaagacagggtctccataaaaggtgtgaaaagatcgtcaagcaacaaccgaaaggagtgaagcgagccatcaagaagctataccaacatgtctagccgactaagagaagcctataggctgggtagagtgagcttgtatggccaagcaggatttaggcacaagctggccggccaaaaggtgactttcagacgaagagagcttatgttcaaccaagggaacctgatttctacaagggaaaggtgtacaaagctaacattcacttgccaaaggcgggcctcctcttggtaaagctgacaggaacatgacctataagatcctagtaggcatatgacttgccaagttctggtaggaccatggcttgccaaatctcaacctgcaaaacctgcatggtcggctagaccatatcctacaatgtatggctggctaggattgaccaaataggattctctgtacaacctgatacatggactgcaagctacttgggaattggactctaaacaacctaacaaactgatggaaaataattacttttaaggggcaatttagtattttatatttactcaatttaatatgtaaatatctaatgattttagttgtaacttaggatttagattttcctatataaaggccttaact

SEQ ID NO: 165169 - DNA, 653 bp, Cannabis sativa
tatgtaaataataattaatatatccattgttggaaaaattatttctctacactagcatgatactcccactcaccgactcaaatataatgaccttactatatgtattgtagtcttatgcatgtattgctagtgttccaactttattaatatttatgtaatttccataatttaattacaacttctgttcagggtttccgagtgttaacacataataacattcgttgcctgtggattatttagccaagtaaactacttgatagttattactcatgtgagatttggtctatcaaacattgttttgtttatgcttagttaaataataataagctctattattatttctgttaatagctgtaaggaaaaagaaaaaaaagttaatggatattttaaagtgtcaactaaatacttataacgtattatatcaatattagacattttaagatacttcataatatcattgctgaggaagataacatgtaaagtttgtcattttaatagggaaatttgacattttatgttaaaaaatgacaaatggtgtttaattatacaactttcctattttttttttaattatgctaatcttttagtgttaaccccaaaatgtccctctcctcaaattcaaaaaatttagcctcctctctctctctctctct

SEQ ID NO: 165170 - DNA, 945 bp, Cannabis sativa
atatggtactattatatatcatgaatctttgctatcaaaaaaatgtggttaacttagttggaccacctcacccacaacaccaaaataccttatatatattcatacacagatttagttgtatatatatacaaaaacacattcattccagtggttggaatggggatatatgtcacattagtaaatcttatttaaacctatatacataaatatatatatgtatacatacatgtatatataggccattaattaatatttagggggggtcaatttcatccaatttctaaaccccaataacccaagaccagtctacatctatttctcaaattcttataccaaaatatatttggtgaagatctcaaatggggatttgattgttttgtaataaaagaacaagagtgctttcaattttcccataattccctatgagttgtaacaaaactcaattattaaaaaattttaaccttaaaattgaaattggaccacaacttttgcttttggatattaaaaagtaatgtctatgcattgcctttaataattatttatttcaaaatataaaataaatatatatttcttttcttcaatattttcatgaagaattggttaataatattggtatagagaaaatgacactacaaaaatacatttgatttattgtttcttgttatgggtgcattgatgccatgcactaatattattcaatggtaattttctatatatcttttttcttattttggttattctctttgtttatatatgatttatatatatgcttatataattctttactaattatttcttgtcaaattaatgatatatgatcatttaagcaactaaaaatgtgttaaaatttactttgatactactataatctcaaaacattatgcagccatattttaatatgaacaacaaaaatgtacttgtattaatatgttttgatatatatat

SEQ ID NO: 165171 - DNA, 763 bp, Cannabis sativa
agatgagctaccaagtgatagaaataaagctcaaaaaatgtgaaggaaagctatgtggtacttaattatggagaggcttatccatgcctttcctaacatgtgttactaaagaagaggctacacaactattaactgaagttaacgaagggttttgtggcaatcacactaggggcagagcttgtctaagaaaatattaaggcaagttacttctggctgataatgatcaaagattccaaagcttatgtgaaaaaatgtgataagtgtcaaaggttttctaaggttctttgggcaccgcccaatgagttaatacatatacaaaacttgtggccatttgtgatttggggaataaacctgatcgggcagctacccaaaggaaaagttggagtgcagtatgcagtggtggctatttagtactttaaaaagtgggcagagcctgaatcactagcaataatcacttccaagagagtgttagattttgtggtaaaaaatatatgtcgatttggtcatcctcaaaaaattggtttagataatgggaagcaattcgatagccaaatgttcatagacttctacatcaagtaaggaatcatcaaaagcttcttggcagttgcacaccatcaagctaatggccaagtcaaagtagttaataaaactctcaaggacaccttgaagaaaaggctagaagaagctaagggcaattggcctaaagaactgctcaaagtactttggtcgtacaaaaccacagaaagaacttccatcgggcaaa

SEQ ID NO: 165172 - DNA, 1469 bp, Cannabis sativa
  modified_base (1355)..(1375): a, c, t, g, unknown or other
aatcaaatatttgtttatcatcaacataagtgagtgattgactttatgtcaacatgttagggtattaatgagtcttattccacaagtcactgtattaatgagaatatttaatacaaagagtttttcagtcgatctccatttatgtttgtcattgagatatttatagacttatgatagtggtaaaaaggctactattgtcgtgtttgtttacaccatacttggcacaatttcccaactctgacttagggcatcattgcctactttatgatgatttttaagttgcctataggagtttggtgggatgtgatttatcccttgtttatgacttcaaaactcatttataaagtcttcgattgatgtatggaggttcgtaaaatgagagaataatgggcttaaacacttaaaaatgcttggcagagtaaggtgtttgacgctctttcccatctcgcataaaatgcgagtattgtgtctcaatcgttgagtgacatgtcatcttttgttagtactcttgtcccactctccatatgtacttcactcatagagcggaagaggcaagagttcctcgcaaagcaactagattctcttagagatgactaacttattactaatccttgcaaataatgggttccaagagtaatataggtgatgtgtcctgtaatatggatctcattgccacctgtcttcttcctagactaccacgtatttagagagaaatctcagataacatttatccccaagttgtttttatatttttttaagataggacttgcgatgtgccttttggaatgctgacagcatcctgcacgtgatcattttcaaatgctacttatcaatttcccacatttttgataaaataattcaatttcttaatcaattctgatgtcattaattttagaatgtccgaaggacactcgagtagtgtattttgcttagttacgctatcatcttttccccccgagcctcgtattctccagattcatgatttaccaccagttatgaatcattgcagatctcaatatgttcggccttcatttctcaggctagttttagaccggcgatcaaagcttcatattcggcctcattattggatgccataaatccaaacttgacagcagcgtgcaggtgttgtcccccaggtgtgacaacgacgattcttgcaccggatacttgatctgtagctgacccgtccacatgtagtttccaagtcggcttgtcttcactgttacttggctgaggtatttgttttggcttagggtttttttctgatacgctttcttccttgcccgtgcattctactacaaagtctgctaaggcctggccctaaattgttttgtgttttgtgccctaaataaaannnnnnnnnnnnnnnnnnnnnttactaataaagatcagaaataacattttatgttccatgattcacatgatttatttcatgactatatgtggataatgtatgaattctatttaag

SEQ ID NO: 165173 - DNA, 896 bp, Cannabis sativa
atatggagagagaggatcaccctggcgtaaacctctttgaggaacaactgaacccgaaacctctccattgatctattagaaaagagaagttgttggtatgaagacatgtcataatgagagagatccaacgaatattgaagcccattttccccataatagccacaagaaaaatccattcaactcggtcaaaagctttactcatgtcaagttttagtgtagcataagctttgttgcctctattcctatgtttcaaactatgaaccagttcaaaagcaagaagaacattatccgtgatcaatctattggggagaaatgcactttgtgtttcaaaaatgacggttggaagaacctctttaaagcgaatgaacaacaacttagagataagcttatagatgacattgcaaagactaattggacagaagtctttcagtgtcttcagcttctttacttttgggatcaacgtgactaaagtcttattaaaagctgctgaactgctacctttattcaatacatttaaagtaactttggtgactaactccccaacaatgtcccagttatgatgataaaatattgccgacattccatctataccaggactttcatctgaccccattgtcttcaatgttgttaacacttttaaggtagtaaaatccttgcataagaactcattttgctcggttgtaatagttgcaggtattgtagataagacatgagacaaagcccaatgatcttcttcagaagctaagaataggtttagaaaataagaagaaaccatcattgtgatcccatctttggaggttattatagtctcatctaggggtgtttataaaatagccaatccaatccaatccgcacgatccaatccaatccagtccaatccgcaaagtgcggatatc

SEQ ID NO: 165174 - DNA, 511 bp, Cannabis sativa
gcaatcgaagcttagagaaacttaccccaactcatcaggatcaaaacgggcaaaacgcactgtgaccaaccaaaaccagaagaacaaaccccaaaataaagccctctccaaactagcgcttccataaaaaaaaaacccaaatctgtaacctaaggagtctaatttctgacaaaaaataatctgagaagcaagaaggcagcagtcggctgcacactcgtcagagaaaggctcggaacccaccaacaaatttggaggagtgacattggttttagttatttaaggtccaataggtttagaggagcgacctattcattaattattattattacaatggaactcaaatggaatggtagcaaagctctaaactaatttatttagtgagtggtttggaatatctttatataaaatatgaacatctaacggtttctattagtttgatagaatattttaaaaatataagaatattccgttaaatttaacggtgttaataaggttagttttataaatatat

SEQ ID NO: 165175 - DNA, 531 bp, Cannabis sativa
gacatttttaatgtgtaatacttttgaggtaaactattcgtgctttcaagcttgtagtgccaaagtttatatttttcgtgtcgcgtcatatcgtgtttaaattatattttttatgtcgtgtctaagtatattttttttcatgtcaattttgtgctcgtatcatttgagcttgtacttgcttcttgtattattattgaaattaaagaattagttatataaattatatattaattgcaggctgcggcaaaagtatcacatagagcagcttttaatataacaacaggtttctcaaacatgattggtcctcttgaagaaattagtttttatggtcatccactttcttacattgctgtagctgtttatggctttccacgtgtaagtttttctcttttattattacgaaattataatctcttattacaatctcttaattaatttgtacatttaaaatcatatatcaaaatatttttctatagttgtattcgttatagttacaatatcagtcctgtaaatttttaaaaattcaaaata

SEQ ID NO: 165176 - DNA, 536 bp, Cannabis sativa
aagaaagggacgatgagtctcaatgattatctcctcaaggttaaataacatgttgatttgtttgcatctattggagaggtgcttttagattgtgatcacatcgctgccatttttaaaggtttgccaagtgattatgacacattcatcattcctaccaatactcatattgaatgttacatagttggggagattgaagaatttttgctagcttctactctcaaattgagaaggatgatcaagaagttgaaccaagtgtcaacattgctatcactaagcaagatccgtcaatgaaagcattctttgcttagtccaatttttagatcctctgcctatcctcgacgtcagtacattccaaatggattcaattctgccaatttttctcaatttttccaactccaagggaagctttcaaggaaacacatctcgaggaggcaacacaagaaattaatagcttgtttggctgtgttttcagttttcaggtttcaaaattgtgtttttaaaagtgagaatagaaaacaattttttgtcattttaaa

SEQ ID NO: 165177 - DNA, 1890 bp, Cannabis sativa
aaaaaaaaaaaaaaaaaaggccttgataccgtgtgaggaataacagattagagagaaaaggatagagcgaatttgagctgaatgattttctgtatattattaaatgagtaataactcagtatatatacaagcgtagaagacagtacaaagctaacaaacaacaacagaatacagttgtacagtaactaacttaggcaaaagaaataacagactaagtaatagctctaacagttacttacttaccttacggactagcgcatacttgcatattgggaactcggtagtgggagtgttagtcatagatatagacatctataggttctatttgttggaagtaaaatgttgttttactttgaatttggttaaaggcgcattaaatgataaagtgctcatttcaataattatattaatttattgaaatattatttataaactaagtattttgaggatacaatatattgatggagtaaaatggtaattttagtccatgctcattgtgaattatctatatcattgattgctttgatattaataatggataaattatagtgtatctatatatattatgtatacattatatatagagcgttctataaacgaagagtacaattccgaatctataatgagatcacgagaaattaataaattaggaaatttattttttaaattttggatatatttattgagagctagaatttataggctcgtgatcccaacgagataatatcaattagtaaggtttaataattaatttatttaatcaattaaaattctattgttgacttggttaattttgagaatttttactatgttgggtgaaaataaagaagagaagaaaaataaaaaggtatcttattacttatgatattttatgtcaaattaatagatatatttaaattatgttttatttaataattatttgtaattattacaataaaactaatacttaaatataagaaattaattatggtaaaattcaaaaggtgatacaatttaagttcaatggacttggaaaagtgaagagcaaaactcataccctatgttcactaatggtttcggctatggtaaaattcaaaaggtgatacaatttaagttcaatggacttggaaaattgaagagcaaaactcatgccctatgttcaataatggtttcagctatgtggctcctttttgctcaagttatttcacttttattataattgactaattagtgagaaaaataaggttttaacatacatggttgcctatatataaaaggtgatatgagatattaatttgtatattttcagttagtttaacaaaagaaaattgaagctctcttacccctttacttttttcttcttctataattttcacaccaaagacattgagaaaatagcccactctatgttatttgcataccttgataattgtggaagattgtaaaaaaaattgttcaattcaaatttctaaaaaaatcgaggttcactacttgattatattctactatagaaagaaattaagggctggagtactaatcggggttcatacccttagttcctacacacatctccatgcatcaatgcgtggaggcgcatgtggcatcaatttcaatgatgattctctccagtggacagttttggtctgaccgttcacttttggttttgggttgtttggtgctcatattttttttgcagctttagttctccaaattttgggctttgattctatgattagcgtcttcatctttttgttctcttattggattttggttgtgagattttgattgctgactctgtatcttatttttttcccgagtatctcattttgttcccaacttgttgtctcaacttgtttgttgtttgttgtttgagttggtttggtgggacgaacataatatttgtaatggctt

SEQ ID NO: 165178 - DNA, 1275 bp, Cannabis sativa
tattagaaaaccaatctctatccttcttggaggccttcatggcattacaagacaaagcttttgaaaccaaagtacatcatttttaatgcacaagagttgctgcaagaaccgcatacattatgtttttcgggactttacttaacttttttgctttactaacccaacggatcaactctttaagttccaaggagtaacatttccattccaaccaacttttgatttctttgaggcatgctctactatacaggcagttaaaaaataagtgcagcagccccacaaagaaaacaatcttgatccactaatatgttcatctttcagtaattgtcttttgttcgaattctctgcaacaagactagccataacacaattctatactttggaatactaagtctatcctaaaccacttccaagttactttttgtaactggtttgatactgtattttgaaccagtaaaggtcagaaaattcgttggaactttaaatgcatctttgacagtaccattacatattagttctcttttttcttttgaagggctaccttgtatttctctccttactgtattgggttaaccttttaatacaagattagactattaggtatcctttgagatcacttggggaattagtacacatttaccttggaagttggaagcattatatttagtgggacttgtgttggttcagttgctggctctgatgatttctttaatacctcctgaaaattagcttgatatgccatttagtaatgataagaattacacataaatttcacacttggaataattgcaagtaatgtgttttatattgctattttgtgaaccaatcatttttaaagttaggtaatgaaaggtgagcttatctatataattattatctggaccaatttgttgaattgaatctaaaagcttttaagttcttcagtgttaagggaattcaattatactgtttgtctgttaaaaaaacaaggaatgagaaggtggaattccaaaaggatcagtctcatatagattagtggctggattgaattctttcatgggagggctcaaaaaatcatcagagacttatcttgactcgaatctagtaattgcttctccttttggactgggtatgttctcatcctgttccggttaaaaagacttaatcttacttcaacctacacacactcagctcggccacccagggtgtgaatttgcctcatatgttataagaaagtcacataaagagtatcttgaagtgatagggacaaaattagtacaatatttaaaaaaataggta

SEQ ID NO: 165179 - DNA, 596 bp, Cannabis sativa
  modified_base (534)..(549): a, c, t, g, unknown or other
atcaaaatttcttattcaaaataagttttcattctttgtattctccaattcattatatattcacacactatattatttaattcttctatctccaaacacatatatattgaaatttaactcaattttaaggaaaaatagtgtgaaaacatatataagagcatttcttaaatggtcatcttaaattcagcatttggttaaaaaattatctgaccagatatcacataattcttctaaaattagataatgtgaatttattatatccttataagctatagtttaaataattatttactatatgtataaaaaaaatagtcataacaaaatatttaaattttatttttgataaactattcacaatttttttttttttaaattgacaaataatcctaaaaaacatataccatgaaaaaaaaattagatcaattttttttttaagtactataattttttcttaaattatatattatctttatctcatataaataccatatataaacatggtaaccaaataatatcaaatatatatatatatannnnnnnnnnnnnnnngggtaatacccattgatgggaactaaaaaaaattaataaggtaataa

SEQ ID NO: 165180 - DNA, 500 bp, Cannabis sativa
  modified_base (454)..(457): a, c, t, g, unknown or other
aaaaaaactataattaatgggcgatagcatatcagcccttctttcacttcatctctaatagcaagagagccattcttattgaaggtattaaataaataaaactaaaaaaaataattaatttacttggaaagcacatcctactcctgttcattaccattgacggaatatgaaaaataaatggaatgaaacatagtgtaagatttttcaaaaaaaataaataagctaccaaggttagctaagtgttgagtgagtggtgagaaaaagggagaaagtatgggttcaaacttaagatttttaaattattagtaaattgtattatcattgcacttgaaaaaaatactaagacctcaatccagtagcacgactccgaccttgacatcgatcctggacaaacctagacctccatactagatttaagagaaatgctaaagggcaccactggtgcctagcaccnnnntacgtgtcaatatcgctattggtgcaattaagtatcgggtccc

SEQ ID NO: 165181 - DNA, 2848 bp, Cannabis sativa
  modified_base (2067)..(2067): a, c, t, g, unknown or other
tcatctccgtggattgcaaacaagtacctacctgctgtagtacacatgtcccaaagtaaaaaatgaccattgacgaactcataaagcttttacccaaattatgggtcaccaattatgaaaagcttcacaagccacaacttctgttcaaaccacaactgagccttcctaccatacaaaagaagatggatatgttaaaattgtttttgacagaagccgaacaaaaccacctagctattttcgcacccaatatgtcatcacacccatcaactaacagatgcagagataatgtacttcaattcccaaggaaagtaaatttacgcttttgaatcctcagatgggcataaatattgggatgtttatatctgtaaaagttctctaaaagatgatgagccctgacgacatcccactctaagaaagcgactcaagcaaaagctagaaaatagcgacaaaaacatcggtctattaggccaaccatctagaaaattcaactatgtagtcaaatactctacaccaaagagctacaattagcctacaccagaacccaccaaatgggattcagatgattcttcaatagcttcacagccacaaacagtcttgccttatcataaaaaaacaagcaaaatagatggagaagcatggagaaaaatattctgcaccagttgttcaaccatcagttcgatcactttttgacgcaaatatgatcacccctagtacatccattgataatgatgtacattttcctctgcttaagaggtttgaaaaaactaaagagcaaggtacctcttcccaccagcaaaaaatacaaaatcttacaaccagcaatgctgatggaactctactaaaggtcttcgcaagaaataagtattgaattggcaaacagaaaatatgattgcctaaaaccatgtcttaaaataggtagaataccaaatcaccctcatagagacaatggttgaacaacaatcacaatacatgatcattaaaaagttgacaaacaagattcaacaaatgcatgacgaactcatggccatcataaaattaaattctattccgctgtcattattcttggcaaaagaagctaatatgaaagccctaaaaacccaatatgaatctctaaaaaggcaaatttttcaaagagaattatattcgatagggtctcaatcaacaatttttggaggaaattcaacgccttttggagcaaatacaacatcagtaccatggtagttctcaaaaatgccaaagactgctccgacatcacctttctcagtctcttcataagaagactcacttctttgacttagacgaatgcttgacaaaaatcaacaacaacaaaaaactaaaatgggaaagaaaaaataaagcttggataattctcctccacaagcattctctctatcagagaaagagcctaaataattaatggcccgaacaactgtgactaatcctatttctcccttgatccatcaaatagataaagaacttgaggatgaaggaatttagtcctcttcctctaccaagaagagacttctgaaacttggtcccaagatttaaatactagtgatgagtctcaagatttagatactagtgaagatgacgtaccccaacattttatggctcaatctgcagaagaagcatatcccaaactgagcctattgtcaaaagtgaagacaaaaatgaagaagaagcaacagctactgtaaaactagaatccaatcatcatcgaaagagtaaatgttctaactttcaaacttttactcttgatgacattcccccatctaagtggtgagaaagattccaagaattccaagcttggcttagcctggaaacacaaaaaaccataggcatagacaagatgatcctcttgaattttgtctcaagattcataggaactttgcaggattggtggacaagcttaggcgaatacagatagatgactttcttgaaactcccatctgtcacaaatgccctaagctatctctatgtcgagttatgtggccaagatgcacaagtaattgaaagacttagagcagagtttttcaagctcaagtgttgttcaatggacaaaagagncttggaaaagcattataagagaatgactcaacgattctaccaaataggtggcattgatgatccaaatctaaagcaagtcttcctttcctctattccagaactacttggcgaagaaactttcaggctactctctggatcaggaaaaagccttatggatgctacaattggagaaattttccaactagtcttaaaagcccttgaaaaaatatgctcctgaagaaatttctctaggaatttatgaagcaaccgaaaaaactaggcaaagtttgtagcatatgagatttactcatcaaatgtcattctgaagcttcgtgttcttacaaaaacccaaagaataaaaacaagttcaagacattcaagttcttaaaatacaaaggacgcaaaataaaatttttacaaaggaagcttgagtttcaaaaaaaatattattggtgctatgtgtgtggaagaaaaaggtcattatgcaaaacaatgccctaaaggaaaaacagtcaagcttctctgacatatccaataaacgactaggatgtctcttaaggaaaatgacccagagtcaatcttcttaacgaatgatgaatttaactcagaatctctttgtggattcgaataatggagtgatttggacgctctagaatgttatcaaatgtccactattcacacaatgcaaccatctcttaacatcactgtgcaaattcttccaacaaaatatgccaagccgataaaagtggtagcatttttcgatacgggagcatcatacacgataatgaaccctgatattctt

SEQ ID NO: 165182 - DNA, 1390 bp, Cannabis sativa
aaaaatatgttacaatctaaaactgactgatgtacacttctacttaactcgacttaacaaaatcgcttattgggtttgggttgtcctcactttacttttttataagtggatgaaataggtatcatcagccaatataaaactctcataaaaacactttgttagcttattattgacttgtatcttttagcaacatttttatgtaatgtactttgtttcatttacttattaataaattttttaccttagaaaaaaataaactataaaggctcaagttaaattgaagtgctatttttccaaattttgttcaggatcacaattgaaggggaagtgtatttgtatacaacttttaacaaaatggagaattttttttattagattacgtagtgttgggtcatcccatcccagctcatagagcgcattaatttagtgatggtggtgttcaatcaatagaaaatgccaacaacagtgatagttactttgctgttcatgataatggatatgcaaatatatcataatattggtactagtaacgaaaaaaagacttatggtgatctcaagtcaaccaaaattgacggaatcaaatttggaaaattatgggataataacaaaaagtaccccattcagaaaaataaaaacaaaacaaaaacaaaaaaacaaagtaactatcactgttgttggcattacacgttgttcgttaaaccacatctaatatttatgcattttaggcatatatgctccgatttaattatatatatctattctatataaagtatgcctatataactgaaattcttggtttataagaaatggggtgatttttaatttttatttaataaaataataaaatattatttatacataataaaataaatcatattaatatttgaactgatattaaatattcgagaatcacaacccatttaaaaagaaaacaaccggggattaatctcaaaaatagctcttcccctttcaattgaaacctctttcttctcttcttcaaattcttcaacttaccactctcacgacgtcgtatttaccacctcttcttatttcttttgcaggtaccaattatcgttgtatttattgggtgacttatttttttaaaattttttattcaaaaaaattcttaatttaatattttttttctgttaagttttaattattcaccagatttttttttttcggttaacttttaactattcacgttattaacgttattagatttataaaattatatatcaaaatatattaataaaagctaatcttaaactaaagaatcgcaaacgttatattacctcccatgtaagtaacaaagatccaatataaatatatatataaacgttaaacgttatatgcgtctctgttttgccgaaagaaatctaatctttga

SEQ ID NO: 165183 - DNA, 1598 bp, Cannabis sativa
  modified_base (1225)..(1228): a, c, t, g, unknown or other
ttattgttgcattgttaatgtaacccttttgattgacataattttactgatagatggaatttttagcagtgaaaagtatattcataaatgcaaaattctaaagttaagttgtatagaaaaggagtgaaactttatgtataacacaacattaagaataaatttatagaacaataacttaagaaagtcttctcacattactggtattggcgtcgtggcgttgttgtctgtactctctacctctaaatttttagtgtaaaagggggcaaatgtgtctttttaccaagaatcgctaaggttactatataaacacatttaagtgcaattttcatcaattttttacctctgaaaagctcaaaaaagtatttggaggcttgggataatgaagattggagcatagggacaacctccaatctagtttcttctgttctttttttattttctgattttgaatgtcttttatggatttgattatgaacatgttaatggatattatgagttaaactttaatttaagaattttaagggagattgtttgaaactttctatggattaatgttatgttgatttttcttttttattgatgtatgatttattcatatttgtgcttattacatgtgttgaattagccacgttaagcataatttatgattttaatacaaaatctgaaagtacgtgctgaaagaactctaattgaataaatatgagttttgacacaaaacgagaatatttttgtaactcgtgtagcttttaagttattacttaatgctgattatgtgtatgttatatatagaaatgtatgatagtaccatgtaatttagaatttctatatcctaaacagaataatgattataatagaaaaaaaaaaaacattagttaaatgggaagtggaaacaattgaaggtacacaaatccatctctacaacatttaaacacgaacaacattacattacgaaattgaaattgcacatctgctacactcaagttaccttttgaaatttttcaaaaataatattttatttacaattttacgacttcaaatttttatttataaaaatgtattttcaaaattttaaaattacaaaaatatacttcgttcaacaaaaataagaaaacaactaaaaaataaccatcaattaatttcacaacaactataaatcaactacaaataaactgtaaaacaaccaaaaaaataacatcatgtcaactataatacaactataaataannnntaaaacaactaaaaaaataatttattatttttactgaagaagtatttttgtaaataaaaaagtttaaaaagtaaaaataaaaatttgtccgtattgaagtatttttgtaaatttttcttagttttatagagcagtttcactctgatttctatttttgtttctgaaaaaaaacagtagagagtctccacaataataatagtaaaagaacaatcaaaactcagttcagcactcccaacaattgacatgctttgatttttaaaagagctattaataaaaagccattccaagtttcaacagctgctgtataaaacccacaaccgaaaaacaacatccatttttttattatgttattttggatcagaaatgttgc

SEQ ID NO: 165184 - DNA, 975 bp, Cannabis sativa
atgaataaattgcaacttcattacttttatatgaccatatataatgtagttaaacggaatcttccacaaattttagaaactttggaataatttagaatattgctgaaattatgatttaaacaatttgtacacatataaatatctaaataattgcgcatacacctagttgttttattttctgtttcgatattttaaattatttagaataaatttggttggttttttctaatatataaattctctgttatactattgctgtttgttgaaggcttattagtgattgattaatcactttaattatttgggtggttttaattttctaagtatgttgatatcaatattggtcatgatcaggatttcacactggcatcaatgttgctgaggccatcaccagcaaggcctttgataaaagtagtggaagaggggagttgtgatgaaaatgcagtagtggtgcctagagtgtttataaagacaatgaaagacaaaatattcaagcaagaggatcaagaggaaatgataaggcaatggccaccctccaaagtgtttgctattcatgaaagtgatcactcaccatttttctcaaccccagatgtgcttttctcccttcttcttgaagcagccacttccatcaaaatcccataattaatttatgagacatgcatattatttaatatttataacccatatgctttgagtttgagatggatgttatatcttatatcatatagcaaatattatgtcaaatttacatcactttctttttttttttataaatcgaatacttatattggtcaacaaaccaactatttacaaagtaggaaaaaaattgaatgtatttaatgatgaataattttattattctacttacaaatttacctacaaatttaccatacatagctttcttatatttacaaatataattatttttaaatagttaaaaataatataccataattttagtatactttttttttt

SEQ ID NO: 165185 - DNA, 729 bp, Cannabis sativa
gttagaagttataattaattttaaaccgaagtaaaatctattttagttagaaaataattagattgatttctaattatattatgagaatcagtatgatcttaaatatttttattacacttaggtgaattctgaagtcttaataatttttctaaatatcattaaaaatatttgttacttgccattttaaccagttaaatattttactttgttactaaaaacttcattatttttagaactaggttagaatttaaataatttagattaaataagtattttttttttcgatttcatgcaattttcataagtttgacttcgttcttaacaatctcaatactacaatacaatgcacttgcgatttgataaattaaaaatgtaccactttttggtctaatatgatataataaagatataatatcccaaaaatttaggtatctatacataattaaattaattaatttattttcttaaattaatcatttttctcatgaataaatattacttaaaaataaaaaaagaaaaagaaaaaggaataagatagaatataatcattttagagtgttatgtcaccgtgttatactttagttttatatttatatcaattactataataaagagtattaatatgtgttatagtgggaattttttgtctagaaatacgagtagagtctcgtgaaagattaacatgtggacatatttttccaaaaaaaaaaaaaaaggatgacgtgtcaa

SEQ ID NO: 165186 - DNA, 601 bp, Cannabis sativa
acactaagcacattttagaaagaatattactgcatgcatataaatatttatttatatatttatgaggctaagaaaggagaaatatgcaagcctttgaatccaaatcaaattaagtctaatttaaacaacataaaaataatatataaataacaaaaaattaataataaaataataaaaatataatcttaaaaacattaaaaattttattttttataaataaaactctaaaacgtgtaaaacatatttaaaattttgttttttgtaatttttttttttgttattttttgtgtatttataaaataatcccttttaattttttaaggagaagaacctttttaattctattggaactttccagtgtggcttaagttttgcactattgcatttgcatgcgcaccccactaattttagttaaactgtccaatactttctatagtcattctcttgcaaaattaataataataattggatttttctgaacaaaaataatatagaaaaattacacaatgcactttcttaaaatagacacattgatatgctcgtatctattttaacattcgaaataattttttagtcaatttttttctcatgatcatgtacg

SEQ ID NO: 165187 - DNA, 1018 bp, Cannabis sativa
catttgaccttcctcttcctctagatctgcctcctcctcctctgtttccagatctgccaccattgttctgttgaacttggttagatcctcttccacgacctccattgttgggcctgtgagcaaagttagcatgtggatctgccatagctggcattaatttgttgcttgagttgagtccttgcagcctctccagcttgctgtcgaaactaagcaagatttcttgaagttcttgccatgttgtgtgtggtctggactcgatctgaacaacaatggacaaatatcctgcatcaaggcctgaaagacagttagcaacaagttgggaaataggataaggttccccagccagagccaaagaatcggcccaacttttcttttgtctaagatactccaccatgggggtgcttcctttcctggtggtttggatgagtgtgcgtgtatcatccattttggatttggagtgcgcaccatataggtgttcaagtgcacgccataagcctgctgcagtagaggagcccatgacctctgtggctatagtttcagacattgaactatacagccaccccatcagcaattggtcatttatgatccaatgttcataagctgggttgatgattttcgcatcttcggaatcgatactctccatgacggtatctgcatcaacaaactcagaaggacagatgttagtaccatttaggaaaccatctaatcgatggcctctaactatggtggaaaccatagttttccataggctatagttatgtcggtcaagcttcagtgagaaaggttggttaagtgtgctgaaatggtgagtgacagggtttgggagctgagaacttgcactggcaccagtcaaggctgatgttgctgcagcggctgtgttttgagcagtggcttgggttccatctgctccagagttttggggtgtattttggctttcggctgacatggtgtcgatattggctctgataccaagaaaagattataaaaggaatgatttgtaaaaatctcagctcaaatt

SEQ ID NO: 165188 - DNA, 2513 bp, Cannabis sativa
tctctctctctctctcttctttaccccttcgattccttaattgattgatcgaccccttttacgctctatttttgcggtatttatcgtgttctttgagagaatcactagaaagggatcacttgtctttaagattcagccccttaggggtacaaattcctagtagatacaaaataggacatacatgacctataccgtaggtatcttagggattaggtgaatataatattttttccttcctcaattgatgtgagtcttcataatggagctgtcactagactcgttgattatcgtgtaatcgcagtaaaagaggcttgcgccatctgtcaaatcctcttatggaggttctgatacgtttttcccatgccgcattaaatgcaaaatgactgctcaaacgagttcttctcctcccggagatgcattgttatactgctagctccctgagagtaagggcatcctgtacgctcctctccgggaggctcaccccgtgagatacacttctctgtccatttatgacttagccaatttttgtgagtgaggtgctcttgaaatctatgtgtcacacgcaaccgctgccacgtattttaggaaaaataaaaggcaacaatatatatatatataaagtaaaatttctatttaagaatacactcgagacaaaaaaaaaattatattctaactaaaaagttataattaaatagagttacactaaaagaagattaaaatacctaaaaatatcaatgtaacaacaataacaataaataatccttaatactatatcttaataaaattatttttgaacaaatataatatttatacatgtattacaatttgaaataaaattattaattctacataaataactttataaaatatatgtatatattttattaagatataattattcttatacataatggtatactttattataaatacgagacttagaaaatatataatatatttagaggttatttataattggtcgaaattgagacttaattttttttataataaattagagattattgttgaatagagtattcttaaatagagattccactgtatatatatcgtgtataatgagtacattatactaataggtataaattttattttagatttaaataattaaaataaattatatacttaaaataaattaatagtttcaattaaaatatttagtaagatatttttctcaactgatgtttataaatatttttattttttatttacagtaaaacctctatctaagaatattctattcaagaataatttctaatttattataaaaaattaagtcccaattcgagctagttataaataagaataactctaaattgtaattagttatatattttctaaatcacgtattaacaaatgtatatctctatataaaaataattacatctcaataaaatatatacatatattttataaatttattaatataattttcttggtttcaactgtattcttgaatagaggttctactgtataaggaagtaaataaaattaggtaatatatgatattataagtaatctattattatttttatttaatttttaaattaatcacaaccttttaacaataatgtaacaactaaaataaatataaccaccgtaattatatatttgatatagctaatgaaaccttcttctatatattatatactttaaataataaatgtaaaatccttgtgcacaaagttagacatgggtggaaagataaattctctctcataaatttgatgtgtaaaattataacctctgtctttaaatttctaatgttgttgttgcataagtacttagagctgaatatcatataggttgaccgagtttcaacttcacgggtttcgggcctaaaaaataaaacctaaacctgcccgtttaaaagattcttcaggtttgcgggtttacgccaactcagtcaatattttttttatcacacaaattctttaaagtaaaagaaaaatatttcaaatccaaggtatatagaaatgtaaatccaataatccaaaaccaaataaatcgttcgtcaaattgatgttcattgttcttgaaaatcatgaatgatgaacatcaattaacatgataataaaaactaaaagtatcaaaataaattgtgactaagaatttaaagttcatgctccatagtccatccatacatttcgtactagttattgtccaccatagttcatacatatgatatatccatatccataaaaatgtctaatttaaaaaggtatttataaaataatagttatacactaatatagtatatacatacaaacataatcttaaattttcatctccaatctataataaataaaggacaaatactattttagaccttgtgttttacaaaaatttactaatattggaccctctgttttaataaatgacaaaatgaaccatatattttccaaaatggtaaaaataggtttctgagctcaatttccaacaattttttttaatataactaactttaaaacaattttaacacgaacagatacaga

SEQ ID NO: 165189 - DNA, 720 bp, Cannabis sativa
ggagcacagcagcagcagccgccagttagacgaagctaccaccactcgcaccagctggtccatcttggcatcattttcaattgcaccacctcgacagtcgacactgccttccaattgcaccacgtcaatagttggcaccaccaccagtcacaccatcatctcggcactgcctccaaccactagtgcaaccaccgttaatcaatatcattctcgggtaatctctctttgccttttatttgtatttattatgttattctttgatttgagatgtgtatgagtttattattgtgactattttttatttgagatgtgtaggatttttggttttgcatccggttcgtagatgtggtgaatgtttcgagaggaaatctagtttttttaatatgacagtgcaaaattgtcggctatagttttcactattgctgacgaatttaaactaacagtaaagttttttgccgactgttttaaatcgtcgcttattctacctagttttgcgacagtcgaataggtgacgattatagagaccaaaggcaatacattagccggctgtttaaaatgatcaagaattataatccacctcttttagtagtggctctagaaaaataattaaaaatggattcaatatcttccataaataaagtttcaaacttacctctaagagtgtaaagacgaatctttttcacttgctccactcctttgttgcaagtttgaagcttctcc

SEQ ID NO: 165190 - DNA, 998 bp, Cannabis sativa
actcagaccccgaatctggataccggccccagccccgaccacggaccctagaccttggaccctagactcggaccttggactcgacccataccccgaacctcgactcgagccccagacttcggccccaaaccctgaactcgaacgtggacccggaccccaaacccaagagccagtctcggttctagaacctaaacccgaacctaaacccaaacttcgactctagacccaaactcggacccaaactctaagcctgaaccaggacccaaatgatcgtgtgcacttgcatatagctattaaatttcgcaacaacatcaaattctctatttataaatattatatttttaattaatatatttttttttttcatggatcttaaatatataatatatatatatatgaatatacacctaaatataaaaataattataaactaattataaaataaaagggtacatgaggcataaatattttaagttttcaattttatacacatacttatgtattatttgatttttttttcgacaaattaaataccacttatatacagaaatattttgcaccatgcataagataagtaggcaaccaaatggtatcatgtagcacagataataagaactggaataacagggaaaggtttaaatggatatctctaattatgatatgaaaatttgaaattgttcattggatattaatggactaacctaagacatattattgaaaattttgggctgagaacaaagcaagaaaattacatagcaaaatatatccgtattggtttttaaagcagtcgactatgaaaatatatcactagatcccattctaattttctcatataacccatcaagggaattgagtatataaatacacctaagattaggatcactttaactaaaaaagacaacaagtgttaatatcaaattaatgagtaatttctatttattagtttctcaactagtcaagaaaaattccctttcttttctaagaaaaagggtaaaagt

SEQ ID NO: 165191 - DNA, 3614 bp, Cannabis sativa
agcagcctcacgagtaaacatggattctgaagagcgagacgaaacgaatgatgaggagtacgaagaaaaccaggaagggtatgatgcttacgacgatggcagctataccgagttactggccctaaggcaaaaggaggctgatcatgaggccgaactagccgcgtaaaaggaacaaaataagaggatgtaagagataatggtcgccatgtaaaagactatggaaacagctggaatccacgtgcatcgcaaggtcgtgcctctaggacctgaagaaacacaagaagagtcctcaccaagtacccaaaagcctaagaatagggagccaagccccatacagtatccctctgaaggaaacccaaatagaaatcctacatcgttccccgaaaagaacaaaaaagcccaagattcatgaaaagtccgctctgatttcccgaaagggaaaggttcgcagaggggcaggctccctcgagagagcactggccctcaagactgagaggatcaaaagagcgtattagtgcatcaggaacccgaggagagagggagaaaaagtcgcaagcatccccctgccgacttaagacaaaaacttaatgataagcatggtgacttgagaaagcgtctggaaaaaaaaacaggcaatatcggtgtcagagggtgccctaaacgagggaatcttagccgaatgggcaatcttcaacaaaggcatcgctagggtcacgcggagacagaagggagatgactctgagtttgactacgaggatcgggagccctgtgccaggactatctgtcccgattcaatagagtcatgactgtcatgagaatcagtaatgatgcaaagtgtttatgtttcccactgatgctaggtggatctgctgaagaatggttcaagaagttagaacccggatctgtagactgttggaacaagctacaagtcagttttcggtgacattttgtggcgacaaggaagattaacctcgaagtaagcgccttgaccaacataaaacaactaccaatgaagaccttgaagaatttcataaagaggttcaaggaggaggcttcaaaaaccaaaaaggtcgacgatggaaaatagttagctttactccaagttggaatccggactaggactcttttttggaatgagctacaacaggaaggagctgctagcctccaagactttcaaaagatggtccagaagtacattaatctagaagaagcgcagataatgacttatggcaggtattatccaatgggagtattagggtatgcggcaggaacacaacttcctagagttgcgctccttgctaccccataaacaaacagaatatagttctctaccactccgggatatactcagaatcttgccctggctccggtactgtcacacctaggggtccccgtaagtaatccccctaggatgaatgcgcaacttccaactcagtctgcaccagccacaagtgttgcaggagtccccaaagttcctagagtaagagatcttctaaagctagtacgcgatttgaggataagagacaaatgagagggtatacgctccagtatacgcagtacaccgagctcacggacgctcaagaatgggtgtattttgcgactcaacaaaatacacattaccagaaacctcctcctttgtatagagacagttctcagagagaccccagcaaaaggtgtgactattacaacgacattggtcataccactaacgaatgcaaaaatttgaaggatgaaattgaaagtttaatccgattgggccacttgtatgagtggatcaagaataggttgccacacctgaatccggcccaacccagagtcctagtgcctcaaagagggcctacatcagcactggagaggcaggtacctcctagaggaatgccccatcagcaggcacccggactgcctccccagattaacggaagagtcgctatgatctctaggggtcctcacattgggggaacgacaagaaatgagctaaagcgttacgtcggggtcataaaacatgatggtgaggtatgggaagtcactcagcttccgactcaaaggcacaggctcatggatcaacccattaccttcatagaggaaggtgcaaagccaatacagtttctacatcatgaccccttggtcattgacacccctatcgcaaacaaagtcgtggctagaatattagtagacaatgggagcttagtaaatctactgttcaaagacactttcacagccattgggctcactgacagggatctctccctagcagttcacaactcataggattcaacggaacgtccctcatccctatgggaaaagttaggctcccagttaccttgtgtcctgacaccccacaaagcacgttcaaatattgcacctttgtggtagtggactgtcccactacttataatgccattctggtaggccggccttagttgacttcgaagcaatcacatccatccgacacctgtgtctcaagtttcctacccaagaggcaggagtaggaacgatcaggggtaaccaaggagaggcaagatagtgttataacgctgcagtaaacttgtcggtcctaacagcacagggtcccggactggcgttggcagtagagcaagaggaattagaatctcgtatcagttttgaggcagcattagaaccaatggaagacattgaagaagtaagggtatgtgatcgcgacccatctaaagtgatctgcctaggtaagaacctagagctggaagagtggagtaaaatcattaacaccataaaggcatcaacgaatgtgtttgcatggtgccatggggacatgactgggataagtcaccatgtaatcactcacgtcctaaatgttaaccgagatttgcccccagtgcaacaaaaaagacgtccgctaaacctagtgaaagctgacgccttagaaaaagaagtggacaaaatgttgtccaacatttttatccatgacgtgtactacccggagtggctagccaacctggttcttatacccaaaccaaacagaacatgggcgagtatgcatatacttcaccgatcttaacaaagcttacctaaaggattatttctcgttgcccatactcgaccaaatggtagacgccaccttaggttttaagctattatctttcatggatgcatatttcgaggataaccagatcaagatgcacgtcgccgatcaagagtgtaccagcttcaggaccgacaagggggtatattgttatctagtaatgcccttcagatgaaaaaatgctagagcgacctatcagcgcatggtcaaccggatgttcaagggcctcttgggacgtaacatggaagtgtccgtggacgacatgctggtcaaatccaaaacaagcatgggccatgcagaggaccttacagaatgctttgaagtagtctggaggtacggaatgaaacttaatcccaagaaatgtacttttggcgtcaaattaggaaaatttctgggattcatagtaagtcaatgtgggatagaggcaaacccaaaaaagatacaagccttgttgagtattccctccccgaagagacacaaggatgtgcaaagcttaaccaagaaggttgccgccttgagtcgcttcatctcccgctcaaccgataagtgcatccca

SEQ ID NO: 165192 - DNA, 2104 bp, Cannabis sativa
aacttggtttttcttttgatttcaatctctcttaaagttcaacgtttcccatgaaagggccaaggggtcctcgggcactctcttggagaagcttaaggctaaggggactaagcttatggcggagagggatgcccttaccaagacacatgctcttgtggaatagaaacatgatttcatcaatagtttggagcactttcttggcatcaaaaactaagaaaacactacccttgctgtttaggtctctaggttggaggtggaactcaagaagaaagatgaagcattgaaacatgcttttgatgccagcaagccatcagagacgagtatgttggcttctcctcagagatattgtacgaggcttatttgcgcaaccccaaagttgacctctcttacatgggatcctctttccttgaaagaacacttactaaagggagagaactctacgagagcaaaataaatacagaccaggctgaccagaccgtcatccagcctaaagattcatcatcgggccatcttaatgaggcaatggcccaccaacctatagaggaggtggtcggccaggctgctaatcatgtggttggctagcatggagaagctatggccggccaattacttggcgacgcaaatgctccagctctcagcttcactccacctacgcctacacatgattagacacattttattagtatcttgcatttatgattttattttaatagacatattcagtttcatgttcttgtatggcgtgttggcctttttctttttaacactacttatttttgatcttaggggtttcatgttcttacttttggcttataggcactctatttttgaacactactattgtttagccctatagccttttatcttggatatatgaccgaccaagcggtctttaatcatggctatcttcttattgccttgatatgtatgtatcaaaatttacttttctttatgccgagctgaagtatgtctgtacttgacttaaaggcaagtttagtagcttatactaagtgttaaaatttctttgcatgagttctccatgctagttggatgcattgtacggtgtgggtgcaccccaagtgagcacgtagacttacgatctcttggtcacttggaattaaccaaatttcatagatcttacctaggaattttcttggggtgctaccgggtgtacgcatgtgaaactaaaaaaagaataacattaagtagttaatcttgttagcaagtgttttagacacaatatatttgaagttaaacaccattttttattcatcaattggtctttgttgctttgcaacttacattaattgattctacaagcttacaaaataaaaaatctgcttctagatgtcaagtggctacccctgcctataatgacagacaaaggccattgctgaagagcaatgggagaccgtgctaaaaagccataggtactagctcttttaaactaactctttctaatgagttcataaaacttctactggaaattagctttcatataagcttgacactggtattactcacagaggtgctccccattccaatatcttggtatgagaaccagctacatgttctcgttatacttgctcaggttgtaggttcccttactcgttatcttagtaacttggtaggggccttcctagttaggtccaaacactcctactgtgggatctttggtgttcaggaacactctttggagcactaggtttcctatgaagaatttcctttctctgacttgtttattgaagtgacttgaaaccttttgctagtaggcctgcagctttaggttgacttggtctcttctttcttctacttcatcaagggattccgccaataagatgttgtttacatcttggtcataggttatcctcctgtgtgacagtggcaccaactatacaaatagcatcgcttcatagccataagctaaagcaaatggagtttgcccaggggccgtcttctcgagggtcccgtgtgaaaacacctttgggagaaattctagccaattgcattttgcctcttcaaggtgctttttcaaggtgtccttgagggtcttggtcacaacttcttgttggaagttattttactaggaacttagatctactca

SEQ ID NO: 165193 - DNA, 4324 bp, Cannabis sativa
agtacttaaagatatcattatctaaccttttcagcgatacaacttcaatctgttacaccagagaagacttctattgttatcatctcgccatacattgcttttctatcaatcttactattattgtgaccaaaatggtacgttttacaatatgaatcatagcgaaaggtcttcattatatgtcaagtattatcttctttgtattacgatatatttattatatagcaatgtattttatgtgacaatatacttaagcgaacaaaccgtaaacattatgtttattctgctctccttacgataattttctcagatgaaatcaaggtgcacgtgaatacaaaaaatatagaaattagagtttcactaaaaaaatttagttgtacatcaaaaaacaacataaggggtaactaaattctatatttactttatgatcattgaatttgtgttacgacatggatttagtcaaggagtttgccctggactccttgatctactcttagccgtattagcctctaattcttgtggtgattctttggtaggtcttcgccttccaaataagttagcgaatctacctctatttaagtatgtacacatactacctctttcttctctcctataaccttgtggtggatgtggaggacaactagaccggttaggcggttcattatttgtattttcattatttctttgagacgtctgctatccccttgcttgcgtttactgcaaagttgtggcaccctgattcaggacacctcgtccatcaataggaacgtcccttgtttcccctggttggttctcatagggtgagtgagattatttggctgatgttctttgatgttggatccttgtgcccttccggttcgtgaaccacggagccttcttcgctgtcattgtgcaagtttctcttcttgcactagcagtgcatcattttaagccactctagatgtagccatggcccgttccaactcctcatttctttgattgaattccagtaagccttcaacggagttgtcgatcttctaactccacaatggggacgtatcttgtgggatcatatgcatttgaatcccttctctcaggaatttcttcctcagggtcacttctcttggagttcctctcaataggagcccttccttggttggtttgagtttgtgtcccctgggctcttttccatgtcgacgtgttgtctcttctttcatgaccaactcgtcatgttgagtatttcccatgatgtatgaaataaaggggagatgtgttttgagtttttttttacaaaggctctcaagtgaaaacactaaactgttaattcggatttttgttaacaataaatgaagctttgtaaataaaagttatttttttataattaataaatatatatatgaaacactaaaagtttttacgtgacttcgtagctaaaatctacatacaccacgagtcattattatttttgagtatttcttggttatgtatatggattatagaggaataactatgagtatttatttaattctcataggggttttccttcccaaaaagattgatttctttccccatagattcttatagggtttttactatgacagttattctttttgatcttaataagataacgttcatgaaatgtagataatctccacatttcatgtttacaaaatgtggataaaaagaaataattattgataaccgtcttttgatcttatctggaagtagtcttttgttgctgaggtaacacattccaagtatggctcgtatctttcaacggtgttcaaggatagcagtttgcattttacgagatgttagttaagatatttattctcgctatagcctttccagggtagctcttagaattagtcttttgagattttgaaataagttacgtttttcttatttcccttaatctttcaacatactcatgagtatgtgggtcattgggttgcaagtatttaaggatatcattatctaacttttccagcgatacaatttcaatatgttactcctgagaagacttctattgttatcatctcgccatacgttgcttatctagcaatcttactatagttgtgacagaaatggtacgttttacgatatgaatcataacgataggtcctcattatatgtcgagtattatcttctttgtattacgatatacttattatatagcaatgtactttatgtgaaatataattaaccgaacatgctctaaatattatatttattctggtcctcttacgataattttctcagatgaaatcaaggtgcacgtgaatataaaaaatatagaaattagagtttcattaaataattttagttgtataaccaaaaactacataaggggtaactaaatcccatattcactttatgatctttgaattcgtgttacgacatggctttagtcaaggagttttcccttgactccttgatctactcttggctgtattagcctctaattcttgtggtgattctttggtaggtcttcacctttcaaataagttaacgaatctacctctatttaagtatgtatacatactgcctctttcttctctcctatgtccttatggtggatgtggaggacaaccagatcggttaggcagttcattgtttgtattttcattatttctttgagacgtatgttgtccccttgcttgcgtttaccgcgaatttgtggcaccctgagtcaggagacctcgtccatcaacaggaaagtcccttgtttccctttgttgttgctcttgggtgagtgggattatttagctcatgttcttcgatgttgggtccttgtgcccttcttgttcgtgaaccgcagggccttccttactgtcatcgtgcaagttgctcttcctgcactaggagtgcatcattttgagtcactctggctgtagcgatggcccgttccaactcctcatttctttgaatggattcttcaagccatcgatggagttatccatctgaatcccttctcttaagaatttcttcctcggggtcacttctctcggagttcctctcaataggaccccttccttggttggtccgagttagtgccccctaggctcttttcctggtcgacgtgttatcacttctttcatgaccgactcgtcacattgagtattttccatgatgtaatgaaataaatgagagatgtgtttcgagtttttttacaaaggctctcaagtgaaagcagtaaactgttaattctgatttttgttaacaataaatgaggccttgtaaataaaagttaactttttataattaataaatatatatatggaacactaaaagtttttacgtggttttgtagttaaaatttacgtactccacgagtcattattatttttgaatatttttttggttatgtatatggattatagaggaataactatgagtatttatttaattctcacagggttttccttcccaaaatgatcgatctcttttcccttaggttcttataggggtttttactatgacagttattctttttgatcttaaaaagataatcgttcatgaaacgtagactatccccacatttcatgtgttacaaaatgtggataaaatgaattaactgttgataaccgtcttttgatcttatcttgaagtagtcttttgttgccgaggtagcccattccaagtatggctcgtatctttcaacggtgttcaaggatagttttttgcattttacgagatgttagttaagatatttattctcgctatagcctttccaaggcagctcttagacttagtcttttgagattttgaaataagttgcattttgcttatttcccttaatctttcaacaaactcatgagtatgtgggtcaatgagttggaagtacttaaagatatcattatctaccctttccagcgatacaatttcaatctgttacacctgagaaggcttctattgttatcatctcgccatacattgcttttctagcgatcttactgctgttgtgaccgacattacacaagcgcacgaatctttattgtagtgtagagattgtgaagaacgaggtcgaacacatagaaaatacttatttaatctaaataactaaaactctgacctagttccaaaaatggtgaggtttttggtaacaaaataaaataaagtgttttaacggtgaaaatgacaataactaatattttcagtgatatttgagggaattattaaggattcagaatccacttaagtgtatataaaaatatttatagttatattgattctcataatttaattactaatcaaactaattatttctaacaaaaaaaaatttcttcgctttaaaattattacttctaagcattaaatgtgaaacaatttaatgtaaatacaaaaa

SEQ ID NO: 165194 - DNA, 723 bp, Cannabis sativa
gacgctgatttgtgtcaggctgagttggtttcgaaaaaggttgaaattccttctttggaggataggaatgatcaagtgaagttgtttagtaatattggatttgttatcaccaataaactttgatgttgattaatatgatcattatgtgtaataagtttctatcatttttttttttcaaattatattattattagaaaaataagaaataacgctagattttcggattttgttgattatttgcatgtgaaaagttgtgattagaaaaaatttattccttgtattttgttatatgcatgcatacaagatagcttctggaatttttttgatttttttggctctttttttaattttgacaacttgaaatatatgatcctttcttttggatggatggttcggtttattttttttctcttaatggtagatgtatattgaaagaaatttcgaatggaaaatcttttgaggtaacttcccgtaattaattttagtatatatatatatataaattttttatggtaagaacctttattttattcctatagtatgaagacattttcttaactatagataaatagacttttgatattataaattagttattgtatactattacaataaattgctattttaatgagaactttttaatcataatataatttttttgtgactaaatatgacttttagtcacaacaaacgttgttgtgactaaaatataatatttagtta

SEQ ID NO: 165195 - DNA, 895 bp, Cannabis sativa
  modified_base (821)..(823): a, c, t, g, unknown or other
tatggagtcctcaaaatgtctgttcaagaatagacattatctatttatatatatttgagtactagtcaatagtcatatatgtacaatcgtgtatgatatgtacgtactgtatattagctttgcctataatatatacagtacgtacctcaataataattatcataataagtgactcagcttgttcctttgctacaatcttaatttgttcttttttttttcttatatgaaagattcgcgataaccatatttagaacactcataccatttcgggaaatgaacatcttttgttaataatggtaaaccatgcatgtcaaccatccgacaaaaatttaacacatcatttattttttatttaataaatatattttaacccatccgtttatatagttacttttcattggtttatctattcttttaaaaaataaataatatcttaaatactaataaatagaaagtaatgtttccggacgataactacaaataattatgagacatgaataaaacataggattttttttcatttttatactttaaaataatttttttttttttgtatttttacgcactttcacagagaaactcctacagcaactaacagagtaacctaaatcgcaaccgaaagaacccacataagagcaactaatgcaacccaaactgtaatttttttttaaaaatagttaaaaaaaaatagtatatgagataattctcttaaaaaatatacaatacgaaatgaatagctcatgtgttactccaacaataaatactattatacttgggattcccataagaaaataaggaaatatgtgttggaaattattttnnnaggatcttagatctacttacaagtatgtttattaacatcctaaatatgcactttctaaaacgatgaaataaa

SEQ ID NO: 165196 - DNA, 881 bp, Cannabis sativa
taattttgctcaattgacgcctcatctcacgattctaattcaacaccactccttatgttttacactttttagtttttaccttttacataattatcatcacccatataataataaatcaataatatacatatattttaaaaattatttagtgagtttatttgtgttgatttttttttagtttttttatggtatgattatgttgtagttatttaaaatattttgtaaaattctataaaactatataaaaaaaaattaacaccttaaaaataaaatttaaactgtctattatactcgtgtcccttttattttacatttgtgcaagtacaataggctatttaaactctgctatctatattgtaaaaatatctcaaataaaaaaatgctaaggaataccttatggtgccaactgtcaagcaccttggcactataagaggttgcttgtcattattagtacaaattaatatcaagttatatacaatttaatttaataaataatataaaaaaaatattaatcaatttcttgagtatgaaatgggacactatatattgtctaataacaatgctcctcaaataaccataacttacacaacaaaaaatttcactaaaaaattattagtcctgtaaaagctgccaatagttttttattgaggtattaatattgggtaagagtggtatctaacacttataagtttataattagttatcaataatattttagatctatttttttaaatcatataaaacttaatacttaattacactaagagtatgtctcgatacattttaacatttatctttttattgatttttttctcaaaaaataaataaataataaacataaatataaggctaattaggatttttttccccgaactttgaca

SEQ ID NO: 165197 - DNA, 2468 bp, Cannabis sativa
tatcttaattgttgtcaaaatcagagttaaaagcattatgtcattctttgttatcatcatatattatatatcaaaatgatatatagggacactattttttttttcataaaatgtattttgtaatgtacaacagccgttagataatggagttatttgatctaatggctggggttgatttaggagtaattaggtttaaaaaatggtaatgtaccttgagacttatctaatgtaccttgagacccatctaatgtaccacggaatacattccgtgaaagtacatcacgagacataatcgtgtccctatatatatatttcaaaatgttaattaattagcgatggagacacctacctacatttcttaatttcccccctcactctttcccattctcttatctcttatggaccacacaaaataaataaataaataaaaatcaatattacttttgttgatataaaaaaattatgactaatggtgcagaactatcatgttaaaattttaaataattaaataattagtaatgacaaaattaatacatcaagaacaacaatgagataaaataggggcaaacatagtatataaaactagaaacaataaatgcaaaaaataagaaatcaacaccaagaaatatattggtttaagtcctatagatcgatgtaatctatagctctactctaatcctgaaacaccattgaaatccttctttattgattgagtaataatatgtatcatacagtcgagacgagattctctattgagttctcactaagtgtttcaactctcacacttagacccaagaatcttcttcatctacagcagattcttcttactaactcaaacccaatctctctctcttttcactgcattctctacgtctcaatcttttctctcacaaagtctcaatcccaatatgaatcgtgtcttcaattttgtactctatctttcttttaaattaactagtcaatgtggaatttatagtcttaagatcaagatcctaaagtcagtagctgcatggagcaaggttgttaagttagttaaaaacaattaacttaaccaaacttctcattgagtgaagtctctacgtcagtttaagtatcaacgcctccgagaacatgtatgagcttccagactcacggactaagtacactcgttgatgatgcttatggataggatatagtctacaagagtcgactatccagatctaccattccgtgaaggacaactagccaatttgaactcctttctagagggaggctagctatcctgaagactgaacctgaagtggacatgattgacatctgaaaactcccttccggactcaactatcattttacaagactccttctcggattggcatccgtgagcgaacaactttctaggaatgacatttgtggagaccttttcatttgaaggaactataccacaaattctacgtagttacttcaaattaaaagaatgacaatgatgaagaaagaatgcaaccatcattggttggtgttctaggaatctcagtatactaacttctgagattgattaagtataagcaatgcttgaacttgtttaagattaagaccttagtcccaacatttatcttcagtactaaccttctgtaaatcaaccagtccttcttctatcttctctctgatccagtagaatcttatatatctatatatttgctcttttcatgataaatcgggttcttacatagatggatggatgattggctatctgaatacacagttaattcccctttgatttgttttaacatcataaagtagtccaaagtcataatgcttccttaaaagcttctctggttgccatgaactctgcttcagtggtgggaaaagtataaccatgtattgtaattgagccttccagcatatacagtttcggtttgtcaagaaaacataggaagtgattgattttaccgtatctctattcgagtcatagtccacgtccacaaacccttttaactctaatcctccttttgctttttgataggttagaccatagtcccaagtgcccttcaaatatctcaataatcatttaagggctttccaatgttccatgcccggattggacatgaacctgcttaggatgcttacatcgtgagctatgtccggtctcgtgctcaccataacgtacattaagcatcctagaaccacatcataaggtacatcctgcatctcttctttctctttcatactattaggacatcgttcctttgacaaaacaaattgaccccctaacgaaacagatgtactctttgcatcttccatgataaacttctatataattttcttgatgtacctagattgctttaagttgatggtcccttcgttctgattccgtgagacttccataccaaattgaagtttaccctgaacagaagaacatttttaatttctgaattaaggggtcattttaaccaaattaaacgtgaaactaatcttcatattcacatcttagt

SEQ ID NO: 165198 - DNA, 1385 bp, Cannabis sativa
tattcttctttgtatgtgaggaggttaaagtttttgttctttaatctcgtgttaaataatatatattaaattaattaatatatattttaaataaaatatattcaatatgtaaaattataaatataattggatgaccatattagatgataattggatcggtttggtcggttatctattagattggatgttccatccaacaatcgatccgatccaattgaattttaaaaatttacgtccgatccaatccaattatgattggatatccgattttattggatcagttgggattggatcggtcggatgtaatcaaattggataactttctgcacacccctatgttaaggataaatttgtggtatatggtcaatagataagagaagtattttattttgtgctcactacttctacaaatgacttttcagattgatagataagtgtttcaagtattgatattataatatatgtatatatagattgttttactatttttattcacattacttatattttttttattaaaatgtgtagtaatagagttttatttattattattaatctataggttaattttgtggagggcctactgctacaaagattttgccaataagtttattttaaatataatttatttaagagttgttatcttctaattattaagaatttttctattagttttattaataccattgttaggggctgggttaattcacttttcttcatcttattttattttgtagatgttttgtgtgaacttttcttgataagttaatgagttgaagtgtagtttttcatttttctcccatttgcttgctttctttgaccgttcatattttgacaaagcataccattcgattagacgataagctatctttggttcgaaaaggatcttacgctatttgtaaatatttgcattgtaaattcataattaattctaatcactacatcaaaaaatagacatattgtctttgttccaaaaaaaaaaaaaaaaaaaacaaaacgaaaaaaacttattatatatcctttaatcataaaataactataactgatatatataacaataaagatttgtaataaactagtgaaagatttttctttggtatttagattttcttcaatagaattattttgccatttttgttttatatataaaaaaaaaactataattctgaaaattaatataacaactgaattttgaatttatgctctatcccacattacataaaatctatcttttagtcacaataaaacttgtaactaaaagtaaaaaaattgtgactaattataaataataattcttattattgtgactaaaaactttgtggctaaatgtattcgtcacaaaattataattttttgtgactaaatgtgtttttagtcacaatact

SEQ ID NO: 165199 - DNA, 587 bp, Cannabis sativa
ttcttttattataggaactcaacccacctctttagtaaaggtttcatgtgtattgtatcagtataggtcttctatactataatttatatataaatattagatagttaattattttaacaatgtcatcactggtttttaagcattgtggttttgtgactctgaatatgaaacatgtcaaactacattctgatttctgaagcttaatgattgttcatttcattacaatttcattctttggtttggttttgaaaactttataaaaatcaaactcttctggattaacatgatagtagaatgagtaccatgcttgtatctggatttcaaaccgtgtagttttaaccctaataatggttcaacattatcgctcgatagagaatcaaattagatttaccaatgaatcacgaaatgataatagtttttaaatatgattttaattttttagaagtaattcgtggaatcatacattacatcttttctttcctacaaatcaatacgcgccaagcactacacttagatttattggatttatatttagtcatatactttgcaaatcatcatcatataacataatcttctctctgagtatt

SEQ ID NO: 165200 - DNA, 1063 bp, Cannabis sativa
ggactgcagcatggagatgacagattgtatttgatttgaatcttcaccagtaatgaggatgtcatccacatatatgagaagtaggacaagtttcccatgagttcttcttaaaaataagctgttgtcagatttgctattggtaaaaccccattgtttaagggaatttttgaggttgtcataccaggctctaggggcctatttgaggccatagatagctttgtgaagcttgcaaacatagttaggatgttgttcactgatctacccttgtggttgtctcatgtagacatcttcttgtaactctctatgtaaaaaggcattgttaatgtctatttgttgtatgtcccatttgtgtgtaatagccaaagtgaatattattcggatagtgcatggctttattactgggctgtatgtttcaaaataatccacaccaggaatttgttgaaagcctttggcaaccaacctagcttttaatctctccacagtaccatctgtattgaatttaattctgtagacccatttattttcaacaattgtcatatcaggggagggaggaacaagagtgtaagtcttgttcttctttaatgcatcaatttcattatccatggcatgcttccgtttcgggttagcaaaggcagctttgacagatttaggttcttgtttagttatagtgtttgcaagatatgtcttaggtttataaatgccaagttttgaccttgtgaccatgggatggacattgtgtagatgaggctgctgagagacagattggagagaggtggaatcaggtgtatgaggagtaacaggttgagtagcaggtagactttctaagtggggatttagggaaggagggttatttggttgattggtagagtctactgagtgagtatgtgatgttgaggggttagtaggttgagtggtaggcaaaacagatggtatttgaaaggcagtgggatcaagaaatctggtttgtgtagatatgggacaaaaaagatctttgtaggggaattcttgttcattaaaggtgacacttctagcaacatagatgctgttagaaattattttacca

SEQ ID NO: 165201 - DNA, 1452 bp, Cannabis sativa
gggcataaaacccaacacaccaatggtctctcatatgctgttcgctgatgacagttatgttttttgtcaagctaataatggtactgctggtagtgtcttctccctgcttcagcaatttaaaaatgcgtatggacaacaaattaatttggccaaatcatcagtttttttcagccctaatgttcatgaacaacttctccacagtatttgctccattcttcatatgcctgaagcctctgaaaatagtctttacttgggacttcctaatattattgggagaaataaaaaggctattcttggttttctcaagaataatgtgctgaacagaatcaatagctggactggtaagttgttgtcaagtgcgagtaaggaaatcctcttaaaaactgtggttcaatctcttcccacttatgttatgagtgttttccttatccctctcggcacttgtgatgaaattgaaaaattaatggcccaattttggtggaaaaatacaaacagcaaaggcaatggaatcatttggatgaattgggaccgactctctcgtcctaaaggtgaaggtggcttaggctttcgtcttctccatgattttaacctggctatgttagctaagcaaggttggaggttgttgtgtcatcctgactctctcgtctccaggatttataaagcttgttattttccccatgatgactttctttcggctgctttgggacgtaatcctagctttgtttggcgtagtatctggagttctatagaactggtccgccagggggttagacgaactattggtactggttcttcaactagtattttgcaccatccttggctccctgatcctggtaatccttacataacttcttcccctgtgggtcttattggtcatgatgttagctcccttttttcggttgatgaaagaagttgggatgttgagttggatcgggatatgttcaatgatagagattccaacttaatcttaagtatccctttaagtttctcggcatcttcagatttctggtcctggtctaatgaaagctccagtcacttctctgtcaaaagtgcttaccgtattcttcaggcttctaaagatccttgaactggtagcaacaattcaggcttttggcaaaatttatggcaattaaagatcccaccgaaggtttgtaattttctctggcgtgctgcctctgggactctgccgacttgtgttaatctcaggacaaagcatgttgacgtcccctctctctgccctgtctgccgagccgctcctgaaacaacctcacacattcttctttcttgcacttttgcttcttcttgttggaaccatatgggtctaccagccggggtctctcttgagctctcttttgctagctggttggatagtctttttaactctcttgatactgaccgagtctgttcactggttatggttgggtggtccttatggaaagcaagaaactcaat

SEQ ID NO: 165202 - DNA, 2503 bp, Cannabis sativa
aaaggaggagtaaaatatattgtggttgtcgtggactactacccaaaatgggctgaagccaagcctatggcgactataacagcctccaaataatgcgactttgtctatagtgcaatcatctgcagatttggcattccttacaaattaatttctgacaatggtaagcaatttgattgtaaggagatgcgtcaactgtgcgatgacttggggatccagaaagctttttcagcggtcgcatatcctcaaagtaatggacaaatagaagtagtcgacaaaatcatcaagcatacaataaaaggaaagcttgaggagaaaaaaagtacttggctagaagaacttccacaagttctatggccgtataatacaacacctcgctccacgattggtgaactcccttctcactttcttacgggtaccaatcgaagttggaacagggtctttgagaagagatgtcttcaacatcaacagtaatacagaaaatcagttgctacaacttgattttctagaagaaaaatgcaatcaggcttatttgaaaaatgcagcccaccaacagcaaacaactcgctattttaactcgaaggtcaaagaacaaaacccgcgagtaggagatctagtgctgcgtaaagttatgcctaacacacgtaactcaacacatagagtattcatcgataactgggaaggaccgtacctaatcactaaaaaaatcagtaatgcgacttatcgattatctgatctcaatggtacagcaatcaaaagagcttagaatggagaaagtttaaagtattactattaatagtactcgcatgtatttatacttggtcaatttatttcaataaatgtactaagtatagggggtataacctaatattgtactattgattacattaatgaaatgtttgaagtttcagaccttttccaaatttttgttctaagttatgacaccaagctgtgaaaagatttataaagacttttgcaagaaaaaaaaagcaataattaaaagtacagcttaaataatgcgagtacccgtgtaccgctaaataagtatgcaaaagtaaaatatcctcgaaaagatgtgttgttcgataacaaaagaaagataatttgttcaaagtacaaagcgcgagtacccctgtaccgctaacgacagatataaaagtttgacaatagtgaaaagaaacttagaaaaattaggaggatggagtgttgggatcgtttgcgacattgcttgagcaccatctgcgacttcctccgcattcgcgttctcagcatcctcagggaagagatttcccccaagtccttgggtttcagtaggcaacatagcacaaaatgcatcggctatttcagccccctccgctccaagaattgcgaagtcgaagtcaagcagcttggacaaggtcgtataaatataatcagagacgacctgatcatacaatttcttcccgttctccttttcactctcaaggtcgcgagtgagtttgtcaactagcgattccaatagtttgaccttttcctccgcctgctccttagccttcccaaaatcctcgatgtctttgtctttcgaggtcacatccagctttagtttcttcatgacgtcttgaagaagcgtgttctgcttcctcaggaggtcaagctccttagaacctgtgacaaaagccatcaaaaacatagtaaaaaattgtgaggctaattctgcagagcgcggtaacaagtcctcagcaggaaccccctcgaccttggaaacgaactcatcgctcacgaatttgtcttgaagagctatgatgtcgcggtccctaatagcaggatcgatcatgaccttcttctccttgtcttgggcagatttgagctgctttttcaacgagtcagccattggcgtggggacaacatagcttttcctcttctgcaggatgacaggagaagttgtcgcggttccaaccttaggctttcggttgagaatgggagcttgcttcaagaatgtcatttccgcgagaagaccatgagataaggatattttttatagtataaaagcacatgcatatgttaaacacattacctgatgtcggtcttgatgtttgtttagatagatgcttgtctattctttccttttgttttttagaaggctccttgtatactggttctcgctgaaggccggcattctcaggtataagcttatgttctcgtaattttgcagtagtccacagcagccgccaatcgcgatcttgaacacgcaagctacctagaacttcagcaatttctctacgagcagaatccagtacaagtcgagccgccctatctacaattgacaaaaacagacattagagactatacaaggtaataaaaatataaactaagtattgggatacgcgacatactaggtcgacgattgaagtcagttctaactagggctgttcacagattggtttggtctgaattttcataatttttgaaccaagccagtataacagttttttgaatattagaaaccaaaccagaccaataaatttct

SEQ ID NO: 165203 - DNA, 1838 bp, Cannabis sativa
  modified_base (413)..(421): a, c, t, g, unknown or other
tttttttttttttttaatttgattgtattaggttggttcggtgtaattaaattggttagaccatctctaatgagagatgtaaaagttaaattattttatacaaaaagtagttttgtggtatgtttacatcaatttttactattgtactccaatgcataattgtaaatcttgatgcaaaatttaatatgttatttaaaactcactcttaataatttattaaaaaatataaaatagtagtaatgcaaagttaaatgtaaaatttaatgataaaatcataataataatgcaagtatgttagctaaaatttaataataaaatataaagcataatggtaaatataatagcattgctattaggcactactggtgtctagcacattctcgacatattgcgttgcgattggctagcgatannnnnnnnnagttattatattaaactatatgggacccaatacttagttggaccaatagcgatattaacacataggagggtgctagacatcactggtgtcctttagcatttctctaaatataaaagcataacatttattgtaatgcaaattttgcatcatgctatattgtaatgtaaatttggattattttttatcatgtgagatttttgcatcataatttggcacactattagagtagactttaacaaagcaagttgtattttgtatttgcattactaatttgtatctcctatattggagatgctcttagatcttgcccacatatatttgggtcattgttaaaagttctttctgaggcaattttgaggcaattttaactagggtggtgtttgattggaagtaatgaaaatagaattgaaagaaatcaatttttattttatttttttgtttgattacattttaaagtattggaatatcattgtaatggaatggtttttttattattttggtaaaatgtctattctattttagtattttgcattgaaatgaaagacaattcaaatggaagataagaaaaattattaatttttttattgaattttttttaatatattttaaattttatattattctaattctcaatttttaaactatgttgttattccttctaacctaaatgcataaaaaaacatatttacttgtatttttttttttttttgaaactttgcattgattttcaatataccttttctctccctacacaaatgggttttgccttcaacaaaatgtagtatatgttagcaaattagaagcaaaatttttcttaagaagatataatttggtgcacacaattcatatgactagaaaaaaaaccaacataaatttagataaaaaaacaaaacaaaaacaataaacaaaataaacgtttataatatgattaatgttacccttatgttaagacctaataaattcatttatatgtacatatagctaaatttaaaattgaagtttaatttcataaatagtattgaacattataattaccgcctcatgcgttgagatgtcttagacaatatttgagatttaacaatcacatacatatattatcctttggaagtggcgtgtgtaaagggttattttactcatattagagcatccataatagttatattatagaaattattaaatagaaaatataaattgacactttatttacaaaaatactttcataagatgtagataatatttatacattttgtgattttaattaccaaaatacctcttatactatcacttacacaatcaaacgatagttgcagggtggttgcataagacgaaggttttaatcagacgatggttgcagagtggttggccaaaggttgcatcagacgaaattttttgggtggttgctgggtggttggtcgaa

SEQ ID NO: 165204 - DNA, 2218 bp, Cannabis sativa
ttttttttttaagaattttaatataaacttataattttatacccattttaattttgtatgagtattattaaatacaatattatgtttggtattgacatgtattaatagatagtgtaaagataatatatttttaataaactctacccaacaccaacaacgggtcgggttcgggtccaagtttgggtccgggttcgagtttcggtctgagttaaggtcttcgctccgagtccgggtcttggtccgagtttgggttcaggttcaagttttggttcggatccgagtctgggtctgggttagggtcttgggtctggttctagttctcagtccgagatcaggtccgggtccggatcagggtccgggtcttgggtctgggtcagggtccaagtccgggtccgggtcccgatccgggtcccaggtcccgatccgggtaaaactcccgggtttgggtcccaggtctaggtccgcatctgggtctcggttcgggccgggtcccagttagggtctcgggtctgggttcgagtttgggtctgggttcaggtctgggtccgagtctgggtctgggtccgagtcccgggtctcggatccgggtcccgtgtccaggtccgggtcctacgtccgggtcccgtgtccgggtccgggtttgggtcccggtcccgaactcgggacccaagggatcctagtctagggtccgagtcttgaattaagttttttttaaaaaaaaaataaattgaaatcgggttggattagatctgatctagaaaaaaattaggaggggcagagcgaatctgatccaagatccattaagtatccgaatgtttcagatcagaggtgatctgtcagatcggagctccaatccgctccaactaaactgatctttttgacatgcctacttttaagttagaagtgagcttcaaattattcaagattaattaattttgcttttttttttttttataatatctttcggttataattaatggtgtgtgaattaataccaatgttagagtagaatttgcaaagaataatttgtggcgaaatctccttatgttttactttttatacacttaactctcttatttttattttggtggcaaaccccttaagtatacttttctttacaaatttaaagcgtcagttaaatatcactattaaataccaactagatgcaccaatgtacaaagctaatatagtaataatctaataagtatttgacgatgatatcagttggcacctctaacttgcatagaaaagtaaaaataaggtggttttaccacttataagaaaaatagtggggtcaagtatataaaattaaaatataaaaagattttgccgaaaataacctgatttaaaaaattacaggctaccttaccaaactctttatctaatcatccttcttttatatcattttattattttttattcattcatatttttattattttatatctactaatttaatctctagttgtaatttttctctttgtggatatgacaaatcctgtttattattgcggctgctgtgtaatttttaggtgattaatttttagcgctattgtcggagaagttctgcgttacaggagtttagtatagtaatttaattattctatttttaatttttcctaattagaaaaaaatttttaaaaaaaattattatgtagctatatatatattttttttaagttctttctgtacatattatataatttaatttatttattttgtctaatacatttacacattacattttatttatcacattagctttttttaagtattgctactcattatatatatagttaagtttgcatatatatatatatgaaacacttctcagtattacctattaacgagtaataaataaatttaactataaatattaatccattagattttaatttgatggcgaataataaaaaagaaacttaaatttttatgtttaaattaactacttaattcaagaaaacataaaaaaatatatttttttacactatataaaaaataagtttatatgaaatatatttaagtcaaacttaatattttttataattttttttttgctgaatttttttttttattattttcttttcatcagatggaacaatcttagcatatataatgtaaaaatgagagatttttttaattaaatagaaaaattaagcataaaaatttaaatttttctaatatattcattcatgggtaatacccattaagaatgcac

SEQ ID NO: 165205 - DNA, 1289 bp, Cannabis sativa
tgttttataatctttcgtgttacatgttatatctgtatcagttatctaaaataaatttaaaaacttcacatgataagattacactataaataacaatttacgttacaacttaccaacatatcataaaattttaggggttgtgtttatgttcgtattttataaattttccatgtcagatcgtattcgtgtcgatagttttttaataaatttaaaatgtcaatacaacttgaaaacgataggtaaatacaaatcgacaccttttctactcaatattgtgacaagatggcatttgtgaataatttagtaatttttaataatattttttaaattaaaatatgaaatacctgataatatgataatattttttctacttaatttaacttttttttttctcattcgatccaatcaaataagtaattggataaatatttggtgtgatttaaaaaaaaataaaaattaccccatacactattttttaagttaatactatttttgttcgtaatggatttgttaatactattttttttttttttgtaatggatttgttaatactgattgatgagtgttaattcatcatcacattttaagaaactgaataattattaatttaataatttttttatatttatccatgccattcttacaaaaactacccaaaaatcttattaagcaaattactttaagtaacattatttgtctaatgaccaatttatataaagctgctctttggattggtgaccctaaaaaatattggattggtaagccatctttaatggtgtcatttggttaaaaataataaaaaataagaataaatatcgcttaaaatagaattaaaattaaaacatataaaaaaatgataaaaaacttattaaatttttttgtcttgcattaaaatagttttcctttttattttatcttgtataatgtatagtacgtattttttgtataatgcttattatcgagtataataatgtgaatcgtgctttaatgaattttaatatgtaacctcaaataatttttctttctcacttgattgaaaaaaaaaaatacattgttaaaattgcattaaaatctcatataactctatacttaagagtcctcttatagccgaatatgaaagaaagattgtttataccaattcagacaagatggcaatggagatactaaagataataattgagagtataaaatagtataaaaactggttctagaaaaatgttgtgaaagccaaaactatcttaaagaaaggggaaggattttctcagatgcagctataaggactcggattc

SEQ ID NO: 165206 - DNA, 2702 bp, Cannabis sativa
  modified_base (2633)..(2675): a, c, t, g, unknown or other
gaagtagaagcacttgccaccgttactgttgtaaaactttacgagtttggattttgagctataatgtgcaagttcagcataccctaaaaactaatttctgacaatggtaaacaatttgattatacagaaatatagtaactgtgcaagaacttagggatacagaaggctttttctgcatccgcatatccctagagtaatgggaaaactgaggcattcaacaagttaatcaagcataccatcaaaggaaagctcaaagaaaggacaggcatatggcaagaagaattaccacaagtattgtggtcgtacaataccacaccgctgtcaacaattggcaaaactcccttcttactttcttgtgggtgcaaagccattgttctggttgaagtaggggcaggttcactccatcgcgatgctttcaatgtcaaagaaaatgaactgggatagcttctccaattgaatttgttggaaaaaaacgtaatcaagctaaaataaaaaaacgtagcctatatatcaacaatgcacgatgcattattttatttcgatggttaatgaaagaaaccttcgagtaggagacttggtactctgcaaagtcatgcctaatagtcgtaattaaatacatggagttttcgacgatagctgggagggtccatacctcattgttgaaaaaatttgcactacaacctaccgtctttttgatctttacgattcaatttttgacagagcttcgaatgtcgagcatttgaagttttataatcagtggtactcgcatgtatataattattcaaattcaatccttaattctctaagtatagggaggatatatgtatccttattattggtaatgaaatagactacttgttactgatacatttaattgttgcacaacttttaaaattttttattattttttgcttatttatttgcttaatgattttattattttcaagaacatcaagatgttcataaatcgcattataagagatcaaattattaaaaatttacaccaaactgcaatcatgatcgcataatgtggtaagataataaatgtaccaaattgcatttgtaatcacattaaaaaaatacaaactgcgtataaaaatacttcaaaaatatttttcataaataaatatccatgaaagatatattgttcagagactgcaaaaatataaaaggcatgaagcccaattatcttaaaaatcaagtacaaggcgcgagtacccttgtaccactattaaaaaggtaaatatacaaaaaaagaaatatttttttaagtagcaggggcattgatattttcattgaccttcttggtgacatccgcaaccttggtatcaagagcaacatcttcagggaaaagtgtgttggtcataccttgggtctcagttggagacatggtgcgaaaagcattttccatctcaactgctattatacgaaacacgacaaaattgaagtgaggcaactttgtcagagtagtatatatgtagtttccacccacctggtcataggttttcttcttttcctctttctcgttgttcaagtcgcgagtaagattaacgacttggtcctctagttttttgatcttattatttgctttgtccttctcctttcaaagatcattgatttccttatccttgttggccatatcgagcttagtcttcttccaaccttctcgaagagcaaaattttacttctttataagctcacagtccttgaaaacctattgatttgtagtaacagcaaacaagtattcgtccatcccttagatcatatgctcagagcagcgagcccaaaggtcttcgacaggcgtcacctcgatgtagacaaaaacatcatcgctgacatattggtcctacaggaccatcaagtcgcgagccttagtctctggctccaccataggttttttctctttctcctaggggaccttctacatctttttagacaactcgatagccaatggaaagaccacatcaatatttttcagatagagagggttcacagaagaaggagtcgcaagctccttgttggtcttcgacttgcagttaagagctagggcactttgcaagaatgtcgcatctgtaaaaaatatatcaagtgttaaaattttcagtagaaaatttactttcaactaagtctaataggggcacactacttgggggttgtcttagtgtttttttaatcttcaatttctgcttctcagagggctccttgtataccggttctcgctaaattctggtgccactcaaattaatccttgttctaccagtttagaagaagtgcatagaaggtgccaatctcgatctctgatttgaagatttctcaagacttctacaattttcacacgatcctaagctagttcacatcgagctggtctacctacgagtacaaataaaggtcaacattcataagattaaaggaagaaaaatacgatgaataaaaatctacaatgtacgaggataataattaaactctattctaactctaagtaataaaaacacgtaaaaccactttgatttccaatctcccatattagaaattgtgccttatagttcattggcctctcagttggcccatttactaaagtagtaaaagtcgttgtcatggctaactgttaaatattttttaccaggatctagatnnnnnnnnnnnnnnnnnnnnnnnnnnnnnnnnnnnnnnnnnnnaaacaataaaataaacacataagagtt

SEQ ID NO: 165207 - DNA, 2236 bp, Cannabis sativa
gcaagtcgtttctatagaaaccatctagcatttttactagcagactacctaaaaaaatggtctaccatttttcttgacaatttttccaaagtctcgacttttcgagtttttttacttttgagtttaggtccctgagaaggttttagcaagttctttacgtaattgatgtgattgtgacaaagggcctccgttcaatgtgtgaatttccattaaggttgattggaacacttgaataaggaaatgaggtaagactagcataagatatgtatatttatatgtgtatgtatgtaaattgtatgttgtgtaatgtcattcgtatactaccaacactagtacggtgacggtacagagtgcattggtacaatatatgatgttcaaagggtatgatccagtgttaccaatactagtataggacgggtatatagtttatgcagtacaacactctgtggtactcgaggtacagtttatccctaccaaaactagtactggaagaaaactaagtgtacgtgctacagaggtcttacttctattaagaacggtcttgatgcatctaaagccttgtagataggtgtacgggaacctagatacaagtcaacattatgttatatgctttgtgcttttcttactcactttgtcaactcacagatattctttgcatgtgtcggtaaagaaaaggctaagactaagaaccaatgagttcggagctcagggatgattgtacatattagggttgttagacgtggagagtttggtctcaggataacttgggcctttattttgtagtcgctgtgcggcatgtttataaagggagttttgaatatgattgtaaattttaaagacgggatcccaaattttgtgtatgattatatatttataaaagtttaaagttttaccaatagtttaaaagcaaaggcgtgcacgataagtaaaaaattactgtagcatgcctaagcaagacggcattacaatttttgtattagagctgctaggttgtttacaaaataccatcaagatatgtaaaatcatcgtcagagaaaatctcaactcacggttcagaagtctttacttatttagtaatttatttgtttagaaaggcatgataggaagcttgttagtaatatgtcagttgagtaatgtgttgcctaaaattctatgcatgcaataattgattgtacgtgatcgttgtctgaccaacatgacttatgggttcaatggctaagtcctataatattgacgcccagtgaaataaaggagtcgaggtaatgtggctgagtccaaaggcggtcaaggaggtcaaaatcctccgaatccctgtagacgcaacagaggccgtggaaggttccaagaaggtggttatgaaaacccgccataggctccataggattaggagaaaaggtttgcagacatgcaagcccgaattaattagcaaaatgaagagattcagaggttgagataggagggtcctcctacaatacctccttagcatgtgccaaccgctctggttcttatggtgccaacagagcaatttgttgttgtaaccgcattgagcctctatatgagagattccgtaagaaagtgcctccagtctttttaggagggcacgatgttatgaaggtcgagcagtggctaacagtaattaagagaatcctaaattttatgggtgtcaccagaaatgaccaggtgacatgtgccacattccatttccaagaagaagctctcgtgtggttggaaatggtgtagtacctacgaattttattaaaaaggaaaaatacttggcgtgattgaatgtcaagattggacatgatctggtcattactacatattatcgcaatttttgtcctactggtgtggcatgcctacagtggacaaaattagtgttacgtggcagtgcagctcaccaatgagaaggccaagtcatcacttgagtaaacagggatcccagcactcaaacgggcatcgagtgatagactagatccctcacaagagttggctggccacccctggaccggccagccatggggctgcaccatggtcggccaccctgcctccataggggcttggctggtcaagaggtgtcctatagggtttcctgtgcacttctacaggtggacaacactctctgggctacaaattgggccctaaaagcccaatataataactgaataatatctaggtccaagggaactttggtctttttgtaactaaataataagatatacaaatatctagggtttca

SEQ ID NO: 165208 - DNA, 1193 bp, Cannabis sativa
gtatagaaagcgcgtttctaaagctgacgtggaatatgttgttagagctgaatttgagaatttaaggcagcattaattagcccaatagaatctgagataattttagcaactatgcaaatttatatatagctatcgtttttgtaatacatagtgaattagaccatcgaaaaatttgagagaaaatcatgattgtgtaaggatagagagagaattaaaactttgagaaaaagttcgtcttgtaatgtctgtgagagttttgtaaattctgtaaccttaaaaacaataaagatatgtctattgctactgttccaatcgagatgttaagcattccgtatgactgaactcgttaaatcctggtgttatcttgttcttaatttactgcttaattcgctatctggttcttgagattctttgatagtattattcttgattgcgtgtttattggttcaatattattacattgtaagtcattgatttattcatagcacatttgatatacatcactacaaatttttttacttttagtcacaacaaaacttgtgactgaaaatgaaaagttgtgactaagtataaattatcattcttatattgtgactaaaatgtctgtagctaaaggtattagtcacaaaattacaatttgttgttactaattaaatgtatttttagtcacaatatatacttgctgtaactaaaactaaattagtgacaatttatatctaaatatcatgttttcgttataagtaatattttgctgtgaaaagtcacattttgtcacaaaaaaaaattaaattgtgattaaaaaattatcactaaatgtagcaggtttttgtagtgtattattggtgcataaaagcaattaacactctaaataaatctagactgtattaaataaatggaaaaaatatagtaattggatgataataaaaattattatttttattatgttgagaaaaatgtgtatccattagatgttcgcaatctccttgaagtaaatttggctaatccatggacaatgttattatttgcttcccatggagaaacctgatttctgtttatagaaataagctatagagactcatgaatttgtagaacatgaaattaaaataagctatatagatacgtaccatgaatttaagaaaaagcaattgatttaaataaatttagactttttctagtgatttgccgcaaccctt

SEQ ID NO: 165209 - DNA, 1026 bp, Cannabis sativa
  modified_base (981)..(984): a, c, t, g, unknown or other
aactaagcggtctttacaggttgtctccaggttttccacctctttctgaagcgcttcccgctctacctgcccggacctgacactctcttccaaatcagtctcctcttgagttaacttagagagaatagtccgaagactttccctctcgtcctttaaggcattgccatctttggtcagtgagtcaacatccacttcaagttaggcagtagatggcatgtcctgaatctccttctgcagctcctcaaatcgcttgttggtggccaaaagttgtttgttcacctcacttagcttcgccctcatatcctcgacctccttcttggctgcatccacctctttctagaagttggtggtggtggttatagtccttaaggccatggacttagcttgggaataagtgtaggccatcttcaagttaacctgcgcggagaaaactcaaaacctacacgggtgaaagaatgaattaaaaaccaaaggagaagtgcttactcgggttgcctccttctgtagtccacccatcagcaactccacggacatatcatcccctctagacagttggtcgttcacctcagggagcaaccagtcctgttaaaattgaagcatttctttgcccttcttggtctcagggttcagcacggtaggagcacctgaagacttaagcaccccagatccgtccgtgcttcctcctttggcacttttggacttaaagttcttcttgaccagtggttccacctccgacaccacctcctcggaaagatcaatgggcaactcaatcaaactcttttccttgggcagtacctcatccacctttgatcttttggccggaggtacctggccttagttgtccctcgaactcttctttagagcttgaagcacattctgagacgtatctgtatacgagtaaaataagaaggttaaaaataagtacaatataagcaaatgcaaataaaatttgaaagtaagttaatgttgggttttatgccnnnnataaaactctatttcaatataatccagattattcaatatcaa

SEQ ID NO: 165210 - DNA, 853 bp, Cannabis sativa
gtataattaattattaaatctcacctaattaatcaaaaaacaccacctctatacatgactatggatgcacaacctaatatcaacatttttattttaatggccaacacttgtctactctttgagaaattttaaataatttaaatattgaaaaaaaaaaacaagttttaaataatttaattatagctaacattacatatttcgaaaatgttttttttttttcactacagaatacagatgctaatataggattaaaaattaataatgtatacgtacgtacgtgttaaatatgtatacatatataatatttactatttactatttactataaaatatgaaaagaataacaatgattgtcatattattatattatatatatggttatttggaaaacgtagttttattacctatgctacgtataaatggttaaaatttaatgaaaaaaatttacataatatatatattattaattttaccatattaatttggctcttagtcaaacatcatgtggacgaaaataaattaattaacaataaagaaagagaaatgatctgacaaaactattcatgaagaaattaaaaagtaattgaaaatattaagttgtacttataaatttatagaaaattaattttaaataatttatagtattaaaaataagatttaaatatttaaatattatacgtattgattattttttttatatatataatatataattgtttgaatattattttttaatacgataaattgtccaatattatgataattttatctttttttcccagctttttctctgatatttttctaatcttcttctattttaaatctgcacaaataaaagataacaagcgtaaaa

SEQ ID NO: 165211 - DNA, 1217 bp, Cannabis sativa
  modified_base (442)..(446): a, c, t, g, unknown or other
tccaaataggcggcccgtgacaatcatcatcaacattttactaatagccataaacatatttttttctctttattttgtcgagacagagataatagtagggaattagctaggataggctttatagtgtggcttcagtctaagctacaccttaaggatattagttgttttttttttctgtttttttaaagagatattagttgtgaaatataattgttttactaaaaaagaattgattgataaaaaaaactgtactacgaaaattgataaaataaaaataaaaactttactatggaaataaacaaattgatttaattaatctataacaatatagctattcttaattagtctaaattctaaaccttttggtgagtagagtaatgaaaaaaaaaacatgagtttgaaatattattataaccaaaaataagtttttttttaaaaaaannnnnaaaaaaagaaaaaaaaaacatatttttaattagaaatataagttaaaataattagtattaatggtttaaaaaaaatctataccattatacttggagagagaatagtattctgcttagagagaatattagtagtgaaaacaaaatttataccaatattattactttaaatttaaactgattattaatttattatttttattagagagataacatagcaacaattaattagagagagaattgagtaaaaataaggctaacgttaacattaattaattgaatctgttaattatatttaagtgaggtggtgttgagtttttggtggcacatggtgcgaatagggtattggggacagtaaactttttctcaacattttgctaatagccataaacacattttttcctctttattttgtcgaggacaaaggtaattgtaggaaattagctagagggggcttattagatgtggcttcagtctaagctagaacttaaggaaaagaataaatagaagggagagggttcaattttgggagtgtgaaggattgggtaggttgtaactttagtgggagagaactagggctctcaaactccgtaggatatcaaatataatattaatagagaaatttcatttcttatacttgataaaaaatcccatctacaaaaaataccctattaatttttttatacaatattattctaataattcctcattttacctaacatacccttaccatttattttttttcaaaacctaaaaataatcctctctctctct

SEQ ID NO: 165212 - DNA, 894 bp, Cannabis sativa
tttttttttttttttatgatattccacatagaaacttccataataacttacaaagcaaccaaaatccccacatagaaatcactagagtaactgaaaccataaatttgaaaaaaaaaaattaaaaatggtatctgaaataattttcctagtctaaatttgtattttattattaacgtggatccttaaccacgattgtggccacctaacgttgtggcgcaccatgcaattggaggctaaatgcttaattatgtcgcataaaatttattctagacctctattagtatgtaacatctcaagcttgagaaactcacttttgttcccgtgatctttagtcttacaccaattatcaataacaacactaattggagtaggtcataaccactataaattttttgttgttggttttttacttttagctctttgatttgctactatcataactcagtgacgttggcatagtcaagtgaacgatatgccataaaatttatatatatatttatatataccaacaacttataattctttttagggaaaaaaatacaaaataaaaaaaaaaacataactttataatataactaatttgaatatactaggatatttagcttataattaagcttcaatttagaaagataaaaaaaagttattaagtttatgatgatgatgatgatgatgataatgatgatcagtgacagagggaggaaattgtaaagaaaaaatatttgagagcaaataaaaaaagatatacatttttatatatatgtcaaaaaaaatgagtagctatttccttttacatatcttatcttactatattaaaagtgtcttaatcatgtgatacttttaatgacatatatactctttaaattaacattatattatttgtaatgacatatatat

SEQ ID NO: 165213 - DNA, 1584 bp, Cannabis sativa
aaattaataataaataaatgaactacttttgtgaaaggcccaccatccactgtcaaattgcatctctttaggtctcaactttctaaaacaaggttttgtgctatttgtcttctatatagtagacaacatataggtgaaaaagaaaagaatgcaatgagaagtgagatatatcttataataaatattaattattattattaatttagcataatttgcttttgcttctaattgactctacctttagactaaacccaacattactactttttatgataaagcttacccaaaaggactaggacacctaatatcaaataattataattattataatttaattactgtttttcttgacttgatgatctctatcaaatcccattattaataaattaaattaaattaaatccccctttccctccctatatactattgttttactcactcttttgttttagtgacattatttttttgaaatagtaaatattaatttagataaatataattagttaaaataatttatacattattgtgtataatatttggagtaaaagttcttttatttataattgttacatatatgattttaataataaatagcaataaaaatattttattttacaattttattgcagtaccttttttggatgttaagtactaattaaacttgttaagtgtcaattttaaaatgtgtggtgatatattttttttaatttatttaatgtgtagtgtaacaatatgttaccatatgttgttgagttgatacttaatggctaacaaatagtacaactataataaaaattgtaaaataatgtatttttacggttatttttttttattaagatcatgtatgtatgtaataattataaatattatgaaatttgctgcaaatatctcaatatttgattgtgttttttataaaatatacatataaaagccagttagagcctaaaaggtgaaatataatgaatatgcttacccaatacatggattttttttttttaataatttatctatttaattagacataatcagacacacaaaaaggacccctttgaaatggtggtgctcctgtgtatatattattaatattattttacactagaaattaacattaccaaacttttctcactccaaagttattaaattttcaatttttattttttttttatattttattttaatcttctttgttctattttcaagaaatctatcaagttgtttaggagaccacaaaacaaaaccacaataaattaatgtggtactgacagttcaacttcttttcatttgtttaatgagaaaatcattttcattgtaaaaagtataaagtatttctttatttatttacattgttaaataataatagtgattagagattaagatatggtgatttttatgtcattttaacaacaatatatagaagtattctaatatacatatagggaatgttttttctccctctctttgtgaaaaatggaatgtatttcattttcattatgtaatataattaaaaaggataaattgcggcataaatacttaatatttcagattttatacacttaaatacttaatgtttatttttggaggcaa

SEQ ID NO: 165214 - DNA, 2528 bp, Cannabis sativa
  modified_base (2480)..(2498): a, c, t, g, unknown or other
gtgccaatagtactttgataactaattttatacgaaaactcgatcagaggaagatacttttccaggaaccctcgaagtctaatacacacgcccgaagcatatcctcaagtatctgaatactcctctcagactgaccatcagttggtacccattgctcgttgcaaactctcccaaaacttggatgtaaactttggatctcgatcgactttggagcaccatgaagtcaaactatttccttgacatatatatcagcgtattgatccaccatatatgtagtccgcattggtaaaaaaaagtgtgctgactttgtatatcaatccataattacccaaatagaatcatagaaccctattgttcttggtaatccaacaacaaaatcaatggctatatcttcccaattctattcaagaatcttcagaggttcaagtaatctcgctagtctctgatgctctgccttgacctgttgcaagttaggcatttcgatacatactccataatgtcatcgttcatgcctgaccaccaatacatggcttttacatcttgatacatcttagttgtccccggatgtaaggaatattgtgtggtatgagagtctccataatctcctatctgatacatttttcggctggtacacaatccctatccttataccgtagtaatccgtccgatgaaatagaaattcctgtgttgacctaaattcaagcctttctttgaactcctacagttcgggatcactctactgggttgtcttgattctttctaacaaatcaaactgcaacgtgatattagaaagttttccaaccacgaactcaatcccccgtctagtcatatcttcagccaaccctaatgaaatcttcttcaatttgtagacttgccctggaccattttgacttagagcatctgctaccatatttgcttttcgagggtggtagagaatctcgcaatcataatatttaaccagttccaagcattgccgctgcctcatttttaaatccttttgagtgaaaaagtatttgaggctcttgtgatctgtgtagattttgcactttttgtcgtacaggtgatggcgccaaactttcagtgcaaaaatgactgctgccagtcatgagtaggataccgctgctcatactccttcaattgcctacataggcaataactttgtcagactgcattagaaaacaacctaacccctatttggaagcgtcacaataaatcataaacttttcattactaacttgcaaggttaacactggtgcgctaattaacctctgcttaaattcctagaagctactctcacacttgttagtccaaacaaacttatagttctttcaactcaattctgttaagggcatagaaatttagcaaacccttcaacaaatcttctgtagtatcctgctaatcccaggaagcttttaacctcagttgtagacttgggttgaggctaatcatgaaccacttctattttcacaagatccactaatacaccgtcttcattcaccacatgccctaagaaacttacttggggcagccagaattcacatttcttgaatttagcctataacttatgctcctagagacattgcaatacaatccaaaggtgtttctcatgtgtctcttctgaaccagagtagattgaaatatcatcattgaagtcaattacaaaataatctaaaatgtccttgaacactcggttcattgaatccatgaatgtcgctggggcatttgttaatcgaaaggacatcactagaaattcatctaaaatgtcctgcgagatatgcctttggccaagcagctggaggctgataatttttctttgtccaaggaggtcaataatcttaaagattagagggagagtctcctgactcttttttccaaactggagaaggatgtcaagaataaacagaccagtgaggaggaactggagaaggaggtcaggaataagcagaccagggaagaggagcaagagaaagaggtggagaccctggagacagctcctctttaggttttctatgatttttggaaggctaatcctgaagaaaattttgattaccttggtaaatccaagaacatgtaccttgacttccgcacgactcaggttgccaaagaaaaccccgaggtaactacctccacagttccagttgactagagcatcgaactccccgtcgctcagagtgttgatcctctggccccctcagaccaaggcgatccgtaccaagagcttgggactcctggtgtttgaatattttctcattttttatatatgtttgtacgtcccatagtccttcttttgagataaaatgaccagccaagcagctttcaaacttggaatatgtttttcatttttaagacaactggctgactgggcagcctttaatcccagatttaccgtgctttgttatcttttttcaatgaatatagtttcttgttatgataattgattgtggaactgtgtttgtttttttttttttttgagcttgttnnnnnnnnnnnnnnnnnnnttgtacgggtatagttgccccccaagtgac

SEQ ID NO: 165215 - DNA, 2227 bp, Cannabis sativa
  modified_base (710)..(718): a, c, t, g, unknown or other
  modified_base (2134)..(2138): a, c, t, g, unknown or other
ctaataagacatcgtcgacagtggaagtgaatgcggccgcggcctcggcactgggtggtatggtttgcttaccacagaatattgctacgttgccttggacagtagcttggtcgaagaactcattggcctcgtaccttaatttatcatgttattattgttattagacatttccaatgagagatttaaaagttgagctatgttttgtacaaaaagtaattttgtgatatttttacttaacttttattattgtgctctaatacataattgtaaatcttaacgtaaaatttaatatattaattaatgttcacttgataatttattaaaaatataaaataataataataatacaaaattaaatgtgaaatttaataaaagagtatgttaattaaaatttaataaaaaattatttaaaatgacataataataaatataaagtattatataatacaatatataatttcatccactaatttttttatttgttttgatgaagttaatcaactcaaaatatataaagaattctctctgtttcagttggagtttgactcaaattatttatttatttattatatttataaagttgcaattttattttgtgtaattattaattatgggaaaagaaaagtcttagttgccaagttttaaaaagtctcttaaagaagctttggaatgttttggtcctcaagttgtcttgatgcccaagttttgtnnnnnnnnnaatatgtgttttgtgtgagagagatgtatgtgtgtgtagagaaaaatagtgagttgtaaaaagaaaagtgtatgtgagtttgttgtgtggtaagagtgaggaagaaacaaatggtgtattgagatttgggtagagattaagatagagagtacacgtaattttgaagtgataagtgaaatatatctatctttgtggatttggtagttttaccaaattgagtaaattgccttgtttcatttttttttatttcgctgtacttgaagtttatcgtttttctcaacactcgcccactcaatgtttactgtgataacatatgttatattttgagcaatgcttgtttttgcttaatatataattagtaatgggataattataataatattagaatgttataactaaatattaaacaaaaacaaagagttgccctagctgtacatatactaattctattctattatttgtacaatatatgtattatttatttcttttaaaatgtatatggtcatttaacaaagagaagtgcagaggaccttagcaacctatagagtcttccaattatttgagtgtgcataattatacatttttttttctgtccaaacgtttttcttacaagcccctatgatttgatagaagcattaaaatagtgtttggttataggtaatgaaatgaaataaagaaaataattttattctattttttttatttagatgtattttgaaatatttaaatgacatttcaatgaaatgatttttctattattttggtagaatgactaatttattttgaaatggaaggaattatcattcaaatgtatatatgatgagaaaattttaataatttttttattaattattttatgcattttaaatttgattatatttcattcctattaactttcctatttttatattttcatttctcttaactaaacgctactaattagttataatagattttatgtccaaaaaaaaaaaaaaaaattaggggtttttataccacatactgaatttttttttttttcttttttacagtgaggtgatttttttttcgaaaatattgtgtattgtgttaagttttcactattgttctacggttgtttttagttgttctactattatttttaattattctgttttgttattttacggttgtttaataaaaagagagaatttttgtgaaaaatcccgtgtgacagtaaaattataacttttgcctaaaattcagtatttttataaaacctcccaaaaaaaaaaaaaaactatgtataattgatttagtatcttcagtaatcatgatatatataccaataaagtataattagttatattaattatgtaactggaacctcttgcaatcacaacttcaaatttttatatagttttatctaatgtagaaatacatatatatatatatatnnnnnaggtgattgttacgtgccaagccacgtagtgttagttttatttaatattttagttttttattttaattaataattaaaatagtataatt

SEQ ID NO: 165216 - DNA, 542 bp, Cannabis sativa
agagaagaaaagaattggagggatttcttttggctgcaaaccatgtggagagttttcgtctagtatttataggaaaattaatttgagtctcccaacgcgttagaaatacttttttaaaaaaataaaaaataatactttttctatttttttattattttttaaatttaaaatgtataactttggaaaatgaaaaaggaagctagcgcgagtaaccgtttcttatgctgattcccattaagattcggatattacttttcttttgcccaattggttcgggcttaagggtcctattttagtagtgggctgggtatccaggcccggcccaacatgtcaactgtcatcctctttaaaaatgtagctcccctctctcttttctttttcactataactatactttgaaattcattaaaaaatttcttaaaaagtataagaaaattttataatgcactcttttaaaaaagatatactaatatatctttatttattttattatttgaaatatttttttacttaaattttttctcaaggtcatgtaaattata

SEQ ID NO: 165217 - DNA, 1787 bp, Cannabis sativa
ataaatgggttcagggtgatggtggggggtccaggatttgcaaagctcatgctgaggaatgtctatcatttgggctgctgttgggccaacatttggcattagactcataatgacattatcatcttttgggttggcacccaaatccaccataggatgaattgggcccgagaagagagtaagtctttgggctttatttgcactgatcggcccaggtaattcactagttgtttctttcaaattcataggggtccccacagtactattctgtcccaattgtgtagtagccgccacaccatttgtaccttccgtactgcatggtacgttttccaaagaaagaggtgccacgtcctccccctccgtaccctgaatattccctttcgccggcgacacggccttccccctattctgcaacaccgccgatttagtgccaaaattcgtatggagggcagggcgtcccgtatcaaaacagtctctaatgggaaccgaggctttcaaccatggtccatacaatggaaccgcttggccaacgggagggtaagcaaaagctttagctctcgagcaactcctatcattatgatccaaataaccacagttaaaacataacataggtatcttacagtatttgaactgtatccattcacgccggtctctgttgatactgaggtagaaacccgccaggagttgggcatcagtacgaatgtccactctgagtttcaagaagcctcgcctggaaatcgtcttgttgtctgctctgtcggattcaatgaactccccaacttttgcacctatcaccactgagttctgagcaaccaaaaaaggggtaggaagtccatggatttggacccaaactgctgctttactcatacacacattttgccaccttccatcctctggccagtcccttatattcagaagctggttggaaatcatccatggccgtctccgaagaacctccttcttgtccagttcattatcgaagaagaaaccccaaatgcctttctcaagagttttaatcttccatgatccttggaaaaaagaccacacctctgacatggtatcattttgattctattcctggagaagctacgattccccatcatcttaactatgacccctgatttagctacctcagcacttatctcgaaatcagcctctagttccaacgtagcttcctcaaggaactgtaatcgcaaagcttcaacatcatccatcatcgcagaacttccttctcctgtctcagccataatagatgttcgaagaaaaccaagaaatacaacgccgtgtatcagttagggaaaacccacatctcattcagagaaaacattcttgatatagtctttattaacactaacagagtaatattgtacctaacagagtaatattgatatctctatattattaacgcactctttttgaagcagtcttttttctaaaaaagtttatatgtattatgttttatcagtgatttttctggcaactaccttactggtaacatacctgacttcttggggaatatggcttcgctttactccttgtaagtgcataatatatatatatatataaatactaggtaaatattaaatagaatgcatgtatacttatttatatatttagtttaattcatttaaataatttatatttcaattatataattagttttattttaatttatgaatattattaaataagcaatattattttgataaaaagtattataaaaggaaatgtatatctctattctatataaagtgtgcctatataatagaattcttagtttatgagaaatt

SEQ ID NO: 165218 - DNA, 1205 bp, Cannabis sativa
  modified_base (1154)..(1175): a, c, t, g, unknown or other
ctctcatgcccatccgccgccacccagggtcacctaggcagcgaagctttgatcagatctaggtcgagctggaaggcccttgcccaccgaatgaagaacataaagtgcagtgcttctctttctaactttccttgtgattttacagatatggacaagccgcatcgctcaactaaaccttgctcgcccttcccgattcgcgacccgtcactttagtacgggatagctggcatccaaagtattgtggcacaatccgacattaagaggatagtgaataaatacgctgtgaagtggggttttaaactcttaccgaaagaccgcgctaacttgccacctaaagacatggtggccttgagtgagtccattcttaaggcgggtgtaccttggctgcttaaccctttctttattgaagtattgaagtactttggcatagctccccttcacctgatgcccaatgggtggaacatcttgacctgcttctacattgctttcagggaggctaccggcagagctcccactgccagggaggtgcattatgtgtacaacttccagcacaactctttgttcaggggttgttattacctccacaagaaggtttctactgacccgacggtggttggctccctctctaatacagggaagactaagaaacaagactttttcctcgtgcttagctaggagggcatgcacaaagtcttctgaatgcccagtaagtgactttattgcttgtatctacgttaattacttaatactgaattttccatgatgacccttcaactctctgtttttgtttctttatagcgtcgcgtccccctcctatcctcacacaagaggagtactcttctggcttgttgaagctgtttagagcggattatgacaacaagctctgccatcatctcttgactctgcctgaccataatttaaaatataaaataattacatttaaaattttaacctcaaaatattaaaaattaataataatctattaggatatttgtggtttgaaaagtaaaaaaatttgaaattggtgaaaaaatccccccaaaattgaatttttgtgcaaagcaccttggctgcctagtaggaggctgttggcagcctctacgcgcgcgcggagcagggattggtagggtcccattgttggaaattattttacnnnnnnnnnnnnnnnnnnnnnngtatgttggattaacatcctaatatgaatt

SEQ ID NO: 165219 - DNA, 6467 bp, Cannabis sativa
  modified_base (59)..(70): a, c, t, g, unknown or other
  modified_base (6316)..(6319): a, c, t, g, unknown or other
  modified_base (6414)..(6428): a, c, t, g, unknown or other
tatattgttaacacaaataacaaagtaaggtgagtagaatagtaataataataataatnnnnnnnnnnnnaataataataataattaataataagataattcaaactttaaagcaaattaattactcatcaaaattgttcattgcctaagtaagttagcatccattaagatttaagttaattgttcttaccttattataaaaaatcttgctttagaccatctattaggtttaaaggggtttttattgaattagtgaatgaaagtgcatgatattagaattttatgtattgatgatagaaacaaggatattatctaatagtattttatggattttatggatcatttattgatgatatttattaaaaatttagtaggttttatttaattttgagaatttaaagataaagttaggtttggagttttaaaaatttggttcgagtgttaaaatatatattatgggagattcatttaaaaggtgtttatgatgttatgcattcgtgtatgttttagtagccaatggactgaacattgacaattagtcgaccattgtatggtagaactagttttagatagcattcgttttgtttgaattttgacacttagacttggagatatttttctaaggttcatttggtattgttaaagatgtttaatgcatgttgtttgggcttagtaacattcattaagaaattatgggtagtttttcagctgagtttgaaactaaacctattgttatacattttatgaactagagttttgtaaggaattgtaggagattgttgtagattgttaggacctaatgtaaaaaagagtagacatatgcacacaaatcgtacgcttgacataaatatgttttgttgatgttgagaaatagccaacatagtatatctaatgagctacgttaaaattttttcctgaacttttacatttaccgaaatttagtcattttgttaagtttcattctattatttaatttaaatgcaaacgtgtctttgtaaattaacaatttttctccctgaactttgacactatcaaattgtaatccgttctaaataaaaatgtgaaaatttcaacatttttttaatcttaaaaaataatttatgttaaaaaaattgttttgaatgattaaaaaattaagaaataaattttaatttgtaaactaattaagtaatttaaaaaattaactattttattgaaaaatccatttaaatataaaattgtatatgacaaatttaatttttgtaaaaactaaattttataggaacaagtttgaccctattctttcctccaaaaaatcttgatttgtttaaatgtaacacttttttagtttaatttctattttttttcttaaataattttatttttttatcgaatttttaattattatttttttaattttttaagatatgagtttgtaaatataaaataaactgaattttctctacacaatacttaagtttgtttaaatgcaaaaattgaatttacaataatttttggttaaatttttaagatgtctttataaataaaataaagtttgaaaatatttttttaggaataatgaacgttttttaagtaagcatatttttttttattaatttaatatttttattaggttttttaactttttttaaactttttcaaaattagtagaaaaaaataatttttaaaattaacttctttttttttaaaaggggaaaaatttagtattggtcaaagttcaagggcaaaatttcaaattttaatggtaaaagaaacgaaacttgttaaatgaaacatgattatgtaactattaaatttaagagaaattttttaacaaatcgtatattttaaaaagcatgattaggtagcgccaaaagttcaggggacaataatactaattattcttaaaataataataaaatattacaagtatcagaaatatgctaggaatatttcttttgagacaatatgagattattaaatgatggcatgcctctgatgaatggttgagatcttttgatcttgaatgatgatcatcaatttgggagatcgaatttgagtcgttcgattagtttcagacgctctgatattgacaaatctcaattcaaaatgtaagctaattttttataaataataagtataattttgatatgcatgtgagaaatccatcgaaagattatcaaaattacctttctaattcagttggaatcgcataaacccgagttgtattaagtgagatactaccaaaacactacaaggtgtgtggctgctttgatatcatcaaccaagtcggcgtactagcgacaaggtaagcatttaacgtcaacctagttgcgaattcctctatttggcttgattttaacatattttaagattttgagtgatattggtgcatcacgaagccaaaatcatgatttgcttacatgactttggagaaaaacatgattagagcccctggtggtgcacgctacaccagcttggcataggcatcaccttggcacccaatgcttgggcactagttgatgtttctactaatctctcgaattgttggtgaaatagcatgattgagcaccacatagttgattttgacgatgaaatttatccattcttccactcttggtgattgatgattggttgagcactaggtgatgactggagatcagcatccatgtcaatttaggcataggttgatatactagattgagatttacctttgccatgagtgcttattcttggtgcaaaataaccataatgctctaggtgcttattcaacctaatcgatggttactctaggtgtgcataacctaggcacaaggtgtcaacttgagcgtagttttgaactaaagtgttatgttgagacaacacaacacctaggtgctcttggataaggtttactcacacaaaattgtcagaaaacttaacagagccctagtgtgagctaattgtcaatctggccactggtaacttgaagaagtcaacataggtacccctaggtgtttcaacatccagatggattcatttaattttagaaagctattgtttcctcttatttgatgaaaatgaaggaaattcttaagaaacatcttcagaaaacatgttttaagcatccaaggtcagcctaggcactgggtctaagttaaacatgcctggattctccttccttttcgcccaataattttcttggcgaaaatattcatggaaatctagttttttctaaggcagtaataatttgcttagatttttcacttgggtgacctgtgcacccagtgagtgcacactgccaatgagggcactagtacctgtttgtgccccgacctggtactcgctgcatgaactcaattacacacattgtttcatgatagatttgtggaatcatgactaaaagaagttctcaaaaaacataaactgttgtcgttgtgtgcccagggtgacatgatgttaacttgagcgctgatacctatatgggcgacccctaagtagggatctattctgaaattggatacaaagcttgaaacttgattatggcatgtcttccatgtactttgttgcatttgtatagtcatttgcctatggtattgaatcttagaaccaaaactgatgtgatctagggcaaatgagttaacatgggtgctaggtgcttacgtgggcgcccaattggacttttaacatgtcaaagtgatacctccagcttctagatctcattctagtgtcttcataaaccattttcttagactgttgaatgataaaacttaaaaacaattctgtaggatcttaagtgcttagctatgtgtccccgtttctcaacttaggccctactatggtgcctagcatgcaggttgattgccttgtctgggatgtggggcctagggttcttatgtttgtgccacattttaaaaaaagtgtccatagtgtgtacattaaggatgaggactagtgcaactacaaagctccaattcaagggagatggtactggaagagtcttgtctctcttaaagatcaattcaaatcctttctgaatggccaacattttttataggacaaatacacataatctaatatatataaaatgttttgtccctcataaaacaaagctcactgaagccatgaagtttgggggagattctatacccagcttcatactatggatggttgttcaactcttgctaaaaataaaggatcgacttctcagatttggtatttcttttgaagagacatgtatccaacaaaaataaacaacattgcatctgttccttgaatgtcaatatgttttctagtatttgtaggagattaattagaattggctacaacatgagcaatttctatttctcttcttagtccaattcggtggattcgcagagcaaagattagtaagtttcaaaaacttgtgttgatagctgctctggctagcttggtttacaacatttggaatgctcaaaatggtaagatatggagggataagttagaggactctaccaagcttatatgtgctattaaagcaaacttgaagcagagacttgatttggtctgtcctaaaaaggtcatgagaaagacaaaagaaatcaattctcataacaattttcaaatgatattggcacttcaattcgataatcatgttccatatactgcactggttcactaagctatggtgatatagtattgcatctttattattatttttttttttgaatcaagtagtatttagtttttgatattaagaatattaaattttaaaataaaataaataaatgtaacgcatctaggccctccacgtttccatatttatgagttaacagaagtggtagtaacatatgtaaaagaattgtaatattggatatttttgcctgcaaaaataaagataaagtatttaagtgtataaaaaaacattaggtattaatgccgcaatttagcctaataaataaccaatttaatttttagaaatgatacattttatattttattaaaaagaatgtccaatttttttttcttcaaaaatatcatattttaaatttatatatgtactatataatgaaaatatatgatattctcaaataaaacctaactgaaatttttgtttacaaaatcttgaattatcttgttgtggccttgatacataattaacaagcatatatttgttgggtattttcatatatatatatatatataaattatataataataatctgtagttctttaatatttttatggatttttttaacaaaaatattgaaactattatttttacgttaattttacaggaacaacattatacacgttgacactaaaaattggttaacactcgctcattaaattggtgagatgaaataagagatgagtagaataaatagagagacacacaaaatttatagtagttcactctttatgtcgcgatggtaatagagctacgtctactttgagtttttgattctcacaagaattagaagagaattgactaagtatgaaagatctaaatttttagagagatatgttctgacttcatgggcacttttctaaatgtgaaaaatgagctaaatttgaactctctttttatagtgaagtaggttctatgaaaataataattacatattcaaaaagtgtgaaaaaaatacatttaagcacttttctagtgtttgaatcccgtctgtgggacctttttcgggttgtagttgaaatttgttactcagttgacgatgaaattggacctattatctttagaattgtgattggggtatgagacaccacttgtagaacattgaaatagtttaaaatgcaagcttgaatcgcgtcaatcagatcattattgagtgggttatggttgtactaaaggtttctctaatatcagcgccaagttgacagcccaacgccccaagttaacatatggcgataacctgaacgctgagtaagtagaaaaacatcttaagaatatattttttgatgcctaagcaaaatattacttaatcaatttctgttttgttgctcatcatttttcaaagatattcacatagtttatatatgcctaagtaaaaaaactataatataacgtgaaaacatactatatataaaaacaactacttttagagacaattttttagttacaacataaattttttgtgactaaatgggacttttagtcacaacaaaaaattactttgactaaaacatagtatttagacacaagttgtcactaatttacttttagtcacaacaagtattgtgacgaaaagcacatttagtcacaacaaattgtaatttttgtgactaatacatttggtcacgaaccttttagtcacaatataagaatgataattaataattagttacaatttttttacttttagtnnnnagttttgttgtgactaaaagtatgattttttttaatgacaaatgatattcacattcaccctatctattctattatattaggctaattagtaattnnnnnnnnnnnnnnntgacatgtaccaaatcgtgcccctgaacttttttagccg

SEQ ID NO: 165220 - DNA, 2462 bp, Cannabis sativa
gccttggctagtctataaaaactcttcattcttattcctcaagatttttattctcatatttctcagaatcccaagctagtcaaaattccagacaatcccaatttttttctactttttctctgacgttgccaagctcagttttactaatgtcttgcatcagaatctgcaactgctcgaacttcttctatttgtaagtcactaatcacgagcacttcttctttccttgttctgatattgtaacttcttttgttgatatggttgtatgaatgtgatgttggcagtactgtatctgcaatttgggtatttctccaggtcgtctttccatgttagggcttataggactcaccatttttcttttcttttccatcttcagcactattcttctttatcatggtgcaattagcactcatttataggctccccaatgttctgtttttggttgattcatgaattgactgagcctgtttacaacataggctaagtcttgtctagtttggcacaggtattgtaatcctccaataatgctcccgtattttgtgggatttcgcagagcagtgcctgactcatgagtgagtttggagtttgagcacataggagtcgattgtggcttggcatccaacatttttgtttgagtgagaagatctttgatgtatttttgttgcgtgaggaagacagtgttggagtttttttgcacttcaaacccaagaaaatagttaacataccctagctattttagagtaaatttttgatgtaaggcttgaataacttgctttatttgattattgtcacctcatgttattaagatatcatcaacatagactaataagagtagaagctttccgtgtttgttgctatagaacagactagtatttgatttggattgctaaaaatctaatgatagaaggaagcactttagcttgtcatactaggccctaagtgcttgtttgaggccataaatgccttgtttaatttgcaaacacggttgggaaactgaggtcaatgaacccttgtggttgagacatgtagacactttcttgaagttcccctttaagaaaaaaaaatattgatgaatttgttgtatttcccaattgtaagtgtcagcaagtgtgaagatgactctaattgtacatggtttaacaacaaggttgtatgtctaaaaaaagtctatcccaagtgtttgttaaaaaccttttgccacaagcttgactttgtatgtgaaagtcaaactgtcagtattatattttattctaaaaatccatttgttgctgataatttaagcatcacctggattgggaactagaatccatgtgttgttccttactaaagcattattttctgtatccataacattttccacttaagattagcaagggctgctttaattgttgttggttcaagatctaattctgtggaggttaaataagtttctggtttaaaaattcccattttggctcgagtaagcatggggtgcacattttgtgttggtggtggattggatgtacttgagtttaaggaattggttgttaaggattagggacagtggagttgctgttagtgatggatataaatgatgacttacttggaggatggtgtgggggaggaggtggtatttaaggtgctggaatgtgagaaactttatatgttttggaatctatatagttagatgacacagtagtagtagaatggtctgtcaaacaaatttttgtatttgagttcattgagtgtatcacttctagctacatagactcggccactagggtgtaagcacctatacccttttgagtttagacaactttaaataaataagcattttgctaatctaaatgacaccttatgagatgggaaaataagagcacccaaagactataaacatgttgtaatcttgtttttgtttgaatagcttttcataggtgaaagaaactcaatttttttggtttggaagcctgtaaatgatgtaggcagctgaggtataggctttccaccagaaagccaagggcatttgtgcttgcgcaagaatggtgagtcctgtgtcaacaatatgtctatgttttctttcaaaccaaaccttgttgttgatgtgtgtttgggcaaaaatttcttttaagaatgcctagagtttgaacaatttgtaaagtggttcaaattctttacccaaatcagtttgcacacttttaagttttgtttgaaagaaactctctacataggcattaaaatgtaaaaacaaactgttcacttcagatttggtgtacataggaaataaccatacatattttgtgaagtcatctacaaaactaagatagtatttatacctataaattagacaagattaattcaacatgcattgtagttttattagtggtacttttaaagttgaaatggtgttgcttgccaattcgacaagcatcacaaaaagtgtaacgtccccgcttcaagcctccattgagcccttacacccacggaat

SEQ ID NO: 165221 - DNA, 1590 bp, Cannabis sativa
taagtggaggagccgttcgcaaattagaaagaaacaacggaatacagacaaggaactacgacatatgatagacttcaccaaaacatattcaccatagaaatctgattcaactaaaagcattaccataaacttttccctaacatgcaagtgaataatgaaagcagtatgaacccaagaaacttacacaaaggtagcaagctggaagttaatgacggctgacggtggaactttgactgacaacgatggaggaacaacagtaagaaatctatggtttctaaagttttctcaaaagggttacttgggttgaaatggcgaaatagcgaaagtaacccaatgaagggaaaatcctaccttttatagaccagaaagggtgcaaggcagcagtgatcagacaccatcgtacggtgggaaagtagaatcgattcgcattctatgatccaacggacgagatgaatgggtgccaaggcggttaaaaacgtttgagtacctttctgagaccatgattaaatttgtcgtcctctaaatagacgggaagcgaatcattgcaaggaaaaagaaataaatattaatgatgaccatcatacatgcagcccacgcgcctaaggcaagtgccgttatatcaacaagccaaccgaaggcctcaaacaagctcattttcccttcactaaatgaggcttagggggtaaatgttgcctttaatttttctcaaaatacgtggacacgagtaagggttacacgtggatatgaaagaacacccactcacgaaaatcaactaagtcttggacaagaaagtatacctcatggagtgagcctcccagaggagagcataagacacgtctttactctccgggaggctagtactatgctaaggcatttccgggagggaaagagattacttgaactgtcacttcgcatttaatgccgcatggggtaaaacgtatcagatgctccataaaaggatttgacagatggcactagcccttatttacggcgattacacagcaaataacgagtctagtgacgactacattatgaggaatcacatcagtcaagggaggataaatgattatatccacctagctccaaaaatacatacggtataggtcatgtatttcttattttggatctaccagaaagttattccccaaagagggtaacacaaaaagacaaaggatcccttcctagggatcctcccgaaaaacactataaatacaccatagacagaatgaaaaaggggtcgatcaattgattaaggaatcaaagagagtaaacaagagagaaattcacccagaacattctcggtaataaacactctcataaataagaaagactcgtcgactaaggctcgttaatgccccaaccacgtaaaaatcatctgcattaactttctacagctcttctaattctactaattaattggttatcgaaaatctcgctcaacatttatatatttttatttttatttgttattattatatatatacttcgaatgtaaggtatatattttttgttatatggcatataagtttttattgcataatatatcattttattttagatcatgtatgtttaatttttattttattaatt

SEQ ID NO: 165222 - DNA, 1546 bp, Cannabis sativa
ccacgtcaggatgaacgcccctagccaatctacggtaagcggtcttaatctcctgacacgtggcttccatccgaataccaagtacatcgtagagagatgacgtggaggccacgtgggatgcacgtttctggacggtggatgcgcatgaggctgaaacgacgttgattgggcgaaatccggtgcttgtgcttgtactggaatgagaatgagggccttgtacgacaacttttggggcgaaaaacgacgtcgttgaaatcatctcgatctaattcttaagatatataagaagagaagtgatggtgagttaaagagggtggatgagtaagggaagtgtgtttttataaggttgggtggggactgagttttaactatggtacgtattggttagttggttggttgattgatgagttaataattatgcccttatccatatttttgtatcttattttcctctttcttattatgctgactcagcaacgtgtcggtgtccatagaatctgtgaatttttgctggaattcaagtgttgatagtattttcctaattttattaattagaatctaattcgcaatttatattttactcttaaatatatttattataaagttaattagtaattttttccctcgactaaatcatgcacttgaatttttttgactgttaaaaattctctctaaattattaaaattgttaaatttaagaacttttgtctaattttaataaaaaaattctaacatagatgaaagttcagagaacatgatttaatatatatcaaagtttgaagggcatgattcggtagatatcaaagtctatggagcatgatttagtacataaacaattactgaaacattaaaattaaaattgaataaaattagacaaatgtccttaaatctaacaatttcaataattcaggaaaatttttaacggcaaaaaaaaattcaaaggacatgatttaatatttgtcaaaatttgaggaaaaaattatttattagtcttattataattaaaaaattgaagaaaaataaaatatttatagttacgaattctctcaaatatctttatccttttcaatgccacatattattaatttacgaatggggaagaaaaataatataaaatttaaaatataagcagtttaagcacatccttttatcaactactgtaagaactgcggcttcacactacttgctctttaattacgagtccatataaccaacccaaatagggctcatttagtaagtacataaatgcaaataatgtaatgtattttttctggatgtcaatattattgttagtgtaattaagtattagatttatataatttaatataataccttttaaaaaatatcactaactaattataaaataatacataatacccattaatagtgttctactaagtatgattgaattggattaaactaacaatattggttaattggattcaattaaccaaaattatagggctccggaaatagaatggaataaaacaacattgttataaatattattaattatgtggatgtccaaatcttttatttattacca

SEQ ID NO: 165223 - DNA, 2306 bp, Cannabis sativa
atggccagagtcggacaatgatagtaaatttattagatgatcattagctgtgtattaattctgttataaagttagttagcattctgttagttgttaggtttgtcatcctcttcaccgactctacttgattgtatatatataccattagctcttgtaaaaaattcattcagtgaataaggaacaataagactctgtcttttttcaccttccaaatctctgtttctcatatggtattagaagaaaacgcctccatggccagaccatccataagatctcaagatggtgtttccccatcagcaaacgacaacaacaactctgatgttcctcctgatgttacctcagcccctcttgcccaaccagtacccacaaatcatcgaacaactactgctcgatccagacctcagcttcatgatgaaatcgaaactcaatctccaagaatcgaaactcagcttctagctcaagaacagagaaccagtaatcaccatatcaacgatgatgactccagccccttcttcctcagctttagtgaccatcccgatcttgttctcgtttctactgtcctcaatggtagcaattgccagtcgtgaaaacgtggaatcacgatggccctggatgggaagaacaagctccaattcattaacgattccctcccatagcctgaacctggtaacaatctcctaaactcttggcttcgttgtaacaatatggtgatgtcttggctagtcaattcggtctcatctgaaatagctcaaagcctaatgtactttgatcttgctgtcgatatgtggcaagaccttgctgagcgatttaacgagggcaatggccctcggatcttccaactccaaacccaactcacaaggttgcaacaaggtgacagatccgtcacttcttacttcactaaactcaaatccctatgggatgagttgaaagaatttcaaccaaatacaacctgcacatgtggtgcaatgaaaatttttcttgactactacaatcaaaaccaagtccttcaattcttgactggtttgaatgagtcatacgcatctgtccgtgcacaaattttgctcaatgagcctataccaaatctttctagggtctttgccatgataatccaagaagagagacaacgttctcttggttctcatgacaaccctcctcttgctgcttttgtcaaacccccatctaccaatcccccacgaaccaagaagcctcgaccttcttgttccaactgtggaaaacttgggcatttggttgataaatgcttcttcattcacgacttccctccggttatggagataaaaagaagcaggacaaagtcaaagctaaagctcaccaggcctcttcttcaacccctgttgataccgcttccattcacatcagtgaaaatcccgtctatcacgaacgcaccaaacatgttgagatatagactgccatttcattcgggagaagattcaacaaggcctacttcagctaatacatgtttccttacaacagaacctagctgacatttttacaaaagctctacttcccactcattttaatcaaattgtatccaagttgagtgttcttaatatataaactccaccttgaggggggctattagatgattagctctgtattaattctgttataaagttagttagcattctgttagttgttaggtctgttatcctcttcaccgactctacttggttgtatatatataccattagctcttgtaaaagattcattcagtgaacaaggaacaataagactttgttttttttcaccttccaaatctttctcataaaattagaatttgatgaaatagagaatctatctcaaaacatgaatctttttagtatgtttgaatgttttctccaaaagaatatatattcatattttttttaattaaatatagaaattcaaatttttcttttattatttaccatcaaatcaaaatttaatggtttaaatttttttaaattaaacatagaaaatcatagccttgaccttattttgctttgtttcagtattttgatctttgatggtctctcaaagacccatatcatctaaatgaatttcatcattaagaattcatgataaatatattcttccaaaaatatcaagttccacaaagtcaaattttgcaagatttgcatgaagaaaattatattaatataaagtgtaaattgttagacatatacataaactttggaaagaaaataaagtacaacaaaatataacacatagaaagtaaaacactaaaatatagaataagaaaataaaattaaacaatatataatttaataaacaaatcaacacatata

SEQ ID NO: 165224 - DNA, 500 bp, Cannabis sativa
atgtaaataatagttagaacataccatctattagttttaggagaattttaagtactatagtgctaacaacaaggttaattaattaagtaattcagttaagtgaatgcattttcatgttttgttgtttatacgaatgtaactcgctatttgaatgttattttttgacaatatatttttgttacgtccatatcttaagcagtaattataaatatggcatgtggatgtaggtctcgaagatcgaggaaaacaataaatgtgaggaataaattaaatgttctacctcaggatagacgaccgtcaaaagatgtaatgacctcgcgttatgctataaatatagtgattttcgaggataacaagatcacaagctaatctcgaaacttgactgagataaacgaggtaggattatatcatgaagggatgagttaagtggaaaagttagataatgagttctttaagagcttccagtcttttgatccacatactcgtgagtatgttgaaag

SEQ ID NO: 165225 - DNA, 1302 bp, Cannabis sativa
cagaactacgtagaggaggagtattctgaggctcgccccataaacagaaggggtccgaggggagctcgatgggtttctccaccatctgttctgacttttaagaaattgtccaaactctttgagaaaggcctcctgggacaagtcgaatgcttccttccctctcccgggtagctggcaacaaaccttggagaaggttactgcgtgtgatcgagttctcacaccaaacaaggtgcaatgttgtcattgcatccatacttcaaggagatagccaattactacaacatgagtatgacctttctcactcctaagggcattaagtacttatctgcctatttgtgttgtacgcttctcaaggatggggttagtcatccgcccataataccaactggctatttgacttaaagttcagtcccaagtaaaacaagtctgggtacttctacttatacaaaatagaaattaagtaaaattatacaaaatatataaactatgacaataaatcgttacactaattatttaaaaagatgaatattgaaaaatagaaaataaataaactatacaaaatatataaacactacacaaattatacaacgtattttcaattatacatagatatatatatcaaccgatgttctggtaatagagatcgacgcaccaccgttcacgaaacatccttatccagtcatgcgtgacatcagctattggacattgcatcatcagattctctacatactcaatggcataaatgctaaaattaccactaaatgcaacataaaatatagaattagtagaatgtaaagcagattttattactatagtactttttttttaagatatgtacctttttttttaccttcaaaactaaatcgtgggtgactcgagatgaatacatcctcgaaagttggctgatattgttcatatctaacgtcatgatctggttattattttgaaaatctccggacgcatagagtaatgatggcaaccgatcttcccaggtctttaggatggctgccatgtccttctaattacaaatgctagaattacaatcgtacacattaattttcctctgctcaatgtcaacttcaatagccacccagtgcctttgtgtgagaagatgcagaataaagtaaatgaactcattacccccatctcgaatagaattggtcatgtaaatgtggaggacagctaaaaagttaacaaactataataaacttgtaattatagttgaaactttaaaacttgctaaaacaattcctaatgaacacctctgtagtactccatgatataatcctcccaaacaaagtt

SEQ ID NO: 165226 - DNA, 1447 bp, Cannabis sativa
  modified_base (1372)..(1411): a, c, t, g, unknown or other
ttttaaccctcaagaattgtgttttttgtagtagtggacattaaagatcttacaaactgataaggatggataatatttgcatatgcagttcaaagattatttaattgaacatggaattgaatcacaaactactgtcccatccactccacaacaaaatgttgttgtggagcattggaatcgcacgctattagaaatgtttatgtctatgcttagttgttcaactctactagtttatgtctatgcttagttgttcaactctattatggaatggtctatacctagcttaagacattacagaatttgagggtgccctgctcatgtcttaagaaagaaagaaccaaagctagaatgacatattgaagtttgcatgtttattggaaattaaaaagagacgacgggtggattgttttatagtaattaagacaagaaaatttttatttctacaaactcaactttgttggaagatgactatataaaaaaaatttaaaccacgtaccaaagtagtattagaggaaatgccttcaaaattaactccaaaagttgttccttcttcttttactcgtgtataagaaaatcccactacctcagttgaaccaatgcttgagacaataggagactatcacttaagtccctattcagaaagccatagtacctcctagtacggggagggtttcatagaacccacctcgctatctcttggatggtgaaatcaacatgattgttggtgacactagtgatgatgactaattaaactttaaataggaaaactcaagtcgtgattggaaaatatggttggctgtcatgaaccaaaaaatggattccatgaggaaaaataaaatctgggatgttgttgttgcaccagatgactttagggccatcaaatgtagataaatctacaaaaagaaaaaatgagttgatgtgcaagtggaaacttaaaaggctagacttgtagtaaagggctatacccaaagagaaggtacgagctataagaatacttttagtacagttgccatgctcaaatctatcaggatacttctttccacacttgtcgctcacaattatgagattaggcaaatagacttaaagatagctttccttaatggaactcttgacaaaactatctatatggagcaaccagaagggttcaaggttctagggtacaaagggaaactctataagcttaataggtccatttatagactttagcaagtttctcattcttgaaacaaaagttttgatgagatcatcaaaaacctatggcttcaaaaaaaaaaataatgataaaccttgtgtttaccaaatcaagaaaaatcacgtggtagctttcgtggtcctttatgtggatgacatctgtaacaccctaactagcatnnnnnnnnnnnnnnnnnnnnnnnnnnnnnnnnnnnnnnnntgctaatcaacgaggtttatagatcggaagagcgtc

SEQ ID NO: 165227 - DNA, 1143 bp, Cannabis sativa
  modified_base (157)..(159): a, c, t, g, unknown or other
  modified_base (772)..(772): a, c, t, g, unknown or other
aagagtttctttcttttatagtggtggtctcatcagcatcctcatctaaaagatcccagacattgccaggggagtaaaaattgacaatttcaactccattcttcaagttaggattgtaatatattaaattttcttgggatgcaagtatgaatggttnnntttggtaccattcacgggcaacacaaacactagtggaaaaaccatcactttttgtcctgtcaccgtttgtgtcccaccacttgcacctaaaataataacactacaatccttcaagtaagtgaactcgtacactagtttgagtaagcaataaaaaattttaccatcctctccaagcaccaaaataccactgttttgggtgttataattttcatccccgtcctcaactaagaatttaacaccattaacaatacatctgtgataacagtaacatgttggattagagggatttgcgatggcgtacaactcatctgatacttctgcatgattatctactcaaaattgattgatctatcattgagtaaaaaaatttaatcaatactagattaataaattgtatttgaataacaaaattagtagaaggcaatacttactcgagacttgaacaacctaggaaactcattctcttgaattgtgtcaagattttgatgacccctaagttgtagctcgttcctatgctcactacgcataaaatgggggaaaaggttagagaatgtcatcactcgtgagaattaaatagactatgaaaaaagtatcttacgtgatatacttctcnacttcattacaattgttcaaaatgtaccactttgcctttagtttatcttgcattggtaaagcatcaatggccctttgaccaattggtcatcgaacatgcttaaatatagagatttccctttcaggcttatttgggaggacataactatttctatcttgacggttaaatcaagtttcaacttcccggaagtacattgaacaaaaggttaagacttcattaactccataagcttcacaaatagatccttccggtcgagatcaatttttaacatattatttgtacacaaacatggctcgttcaattggatacatccacctgaagtgcactggtcccccaagtatcgcttctttaggtaaatgcatcaccaagtg

SEQ ID NO: 165228 - DNA, 1774 bp, Cannabis sativa
aagttgattgtcaacttggacgctgggcgcagcaccaggtccatctaggcgttgggccttatttccaggggctcgagtttgtggttttctccctgagttcacttgaatcttcattaattctgatgatggaaaaaaatgctctgaatactttttggtgacttgattgtaaacagcccaggttgacaatatgtcaacctgggcgctgggcccagtgccaagtgtcaacctgggcgctaggttccagttatggctcttcgaaagttccgtttggtctttgtaaatagttaaatctccatcctttttgaaaactgagaagatgcatagagtatttctcagaaaacatcatcgaaattagcccaggttgacaaaatgtcaacctaagcacttggccagccccaagttgcaacctgggcgctgagccttttctggcacctaagaagtgttgtttcttcccccaaatgacatatttccccatttttaatgaagagaaagaagatgaaaaagttggattgttgatttgatacttggaaggtgcctagattgacaaattgtcaaccatcactggggtgctcggggccctagggccctagtgctcaaaaatgaacttgctccggttctgattttgatgcctcaaatatgtctatggtatgtctagttgatgtcccaatgcaatttttaacacatttacattaaggtcttagaaactgaaaccatagttgggaatgtcaacttgggcattaggtgaaaccctaggtgcccaagttggcttccgggttataagttcgtgtaattttagctctcggggtttggattaggttgctccttatccttatggtacataatactaaaagatagtgagttgtattcttatttaagtgcaaacttctattctgaagttctcaaagtctaaccggcagggctagggacccttcctaggtagacttgctatgactcaggactactcaactttgagatgtcatattttttttcacgtgtcaaatattgatgtccatgtcatcaacgctacttttggcgtaaataattagaattctcaaaatagtcaattcagaacattattgttagttaacactatatgagagatcactgagagtaatgacatgtttatactattacttgatatagtacgttactcatattttatgatcctaatctattctggagaagattaaattattatttgataatctctgtaatacaaagaattcttgataaaccttaaatggtctaaatatttaaattctttgtgatgagatcaacgatagacttaattgtttcatagtttgcattgacaaactattattgtgattaatgttacgatttcattgagaattgttaaatagtctaaagtgtgatatgttatgaacgtcctaaaatccatgtatatgagtaataacaagaaatcaatattgaagttgtcctatacatatttatgcttatggaaggcctatggttcactaagtacatccactcatattgtgatatatgttgccaacatgttggattgctacttgagttgtcatccttatggtaccaaggatgtgttagtcattgacaaaccaacatcatgacatatagtagttggttttgggtgatattgattggaaaggctgcatggattataaaatccacttataagcattcatgattctaggaggagctattttgtaattaagtttcatattaacacctacaatttcctctctcatacaaagtgagtataatggtaaggaaagttatgttaggttttatgccc

SEQ ID NO: 165229 - DNA, 2092 bp, Cannabis sativa
  modified_base (1744)..(1747): a, c, t, g, unknown or other
tatagtcaataacgggtatttgattaagtgatcatcgacatggatgaaaggccttttgaaaagtaaggatgcagaggactggtttttggtaatgaagaggtgcttggaaacaaatttcgggtctttgattaaacccgagatcagcgaataacaaaacttgttcacaaatttaaactgaagcacagaatcaggaggtaccaataacataattctccccaatatgtttctgggcaaattacaaaaacttgccatgatctgcattaaccataaatagactttcttatattaaaactgtcctaaaatcacaccaaggattaaacaaggcttactcttgaaagaaaaagactaataaggaatttagtcaaacaggtggtaatagaaatctacataatgattaatgaagcttcaagattatttagtatgtattattaacagaataaacaaatcaaattaagaaaatgcatggcattttactttctttttgaacaataatcttgaaatgaaacttttcagaataataagaattaaagagaaaatggaggagaaaatgcaaaccaatgaggttgtaatcgaagcagagagaagataaactagtgaacaagagtttcctttgaagttgaaaagcagagaagaaatcttggagatgagaaatggcttttctttctcagaaaaactcaaaagaaaaaagattttcaaactaattgtttatatacaaatataattaatattatataaatatgcagaattttttttcttttttttttttaaaaaaaaatggaatttaattttgatccttaatctctttttttgagactctgtttacttaatgataataaaaacataaatacattttatttttgttaaggaaatattacaaaaaaaaaattgctaaaacaatttttttatttaattattctttgttttttcaaaaaaaaaaattatataacaatatacaacaacaacaaaattaggaacagtaggtaacacttttgttttttaatttttataaaaatgaaattaaaatttgtgtttttaagattttgttaataaaaaacaaaaatgtgttctataattatttttgtttttgaattttaaaaacagaaaacaaaaatgtactttataatttttatttttatttttatttttgattttattaaaactaggtttagattcggatttggggtcagcgtcatggtccgtgtacgggactggggtcggggtcatggaatgaaatttgtaacaattttggcaattatgatgatgaatgaaattcgcactcgaattgattgggagattaaccttgtctcgaagataacctgatactaacaagctaactgttatcataaatagctcgagattgatggaatcccaaatgtgttcattgacctatatgtattatgctactcgagagccaaaggtagcaagtagcgacggtggaagaggtggtggtagggatggatatttttcccatgaaaaacgggacggggacagagattattttttgtgctcgaatgttaaacgaggtggaaatagagacgacactgctcgttccgacagaaactcatttagtattttattttatatttctaataatattttataatttataatttatgtttgtatttattttaatatattagtatattttttataaatttaaattttagataataattcatttattgaataaaattaatatgtaatattttaatttttatattatttaatatttttatatatttannnntttattataaattttatttttttattagaggagtcgtcaccccgtcctcgcttccattaagagatttcctaccccatcacctatgaaaaataagcaaggatgaagattaaaatttttaacggggaaggggacaaaggagcactccccgccaattccccgccccgtgtgcatccctaggtggtggtttgtccatgacaatggcggcgaaagaagtggaagagtgagtaagtgagccatatttggaacattggtaattatgtgtctgtttgtaatcaactctctaattattttttatcttgtaattttacttttattccccgtggttgtaattttgctgcccataat

SEQ ID NO: 165230 - DNA, 2670 bp, Cannabis sativa
gtgcctatggtcggggtgccacagtggagcgaccagccgatgaatgcaaagtttgtggaggaggtgtggggggtcggagtgtgggccaagagaaatgatgaagggattgtgatgagaggagagatagagaggagtgtgagagaagtgatgggaggagagaaaagcggagagatcaaaaggaatgccttgaaatggagagaggctgctgtgaaggctattagcactggtggaacctcatataaaaacattgatggtttagtcgaatttctaaaagcagagaagaatagaggttgagacttttggtggacataatcttcaagaactttgaatagaactgtgattgtgatagtatgaatttgctagtgttatacttctctgggaaagtattttatttgaaagaaatcatgagatttattcaatgtgtattcataagcttagaattgcatttacatttctataaccagatgtgtattgtagagaaactacaagcctgaaaatcaagagagaaaaatccatgcctttttctatggtataagctcacatcttacaagagttgttgtctttacatacttcaccctgaaatgagaatttcaaactgttaagcatttcaaataagaagggctgttttcttcaatagtgcaatcaaacttcaaagagcaagaaaaggaaaatcttaatatgcctaaccttgttctttcgccgtgcttccattatttgttctagaggcggtcgccctaaaatcaaaaccaggagacatacttgtaaacataaattgaagaaaaggaactagtctatgtgatggaataataatgtttagacaatttaatgtacccgtgatcggaagacgatacttagcccaaacaccatatacagcatcagctatcttccctatctaaaaaaatgatacttcaacattagccacaaaaacaaaataaaccaggtgtaaaagtctatgcaagactattatatacttagaacgaaagtaacttacaggttcatatttggttatggcataaacccatccaagcccaacttcttcatatagttttctaaatgcctggtgaagttttaaatattagaatgaaaaatgaatagatgcattttcaaaacaacaatcgtagctattctgtttcaaattttaacctctatagctttgtaattttgtgcaaaaactcaaatgacttttaaggtaacaagagagacttacttcaacatctgtgactactgttccatcagagagaattgcatgaatctttcccattgccttaaacaaataagacaatgttaatatttatagagtttatctccatgggatattatgatcagtacacaaataacatgtgatatgataatagcttgagtttcaattcttggtcacttacagtttcaaagtcaagaccctgattctcctgtggagagtaatcctctgaacaaatgtcaacaaatttgatggtgccataacttttattcctctccctaagcatattcacctaattaacaatacaatcaccttaatttcacagagagaatcatcatcaacaacaaataaaatgaatttgttttttgggtttttgaaggcgcaaagtacaaacctccctcatgcaaagtggacagtctccatcgtagagcattttgattctccaattctctggtgaagaagattcttcatcttctttcttggaacttaaagggtttgaagcaacttcactcactgcccgaattccccaattgggtcctaacaaaccgaaaaagaaaaaaaaaatgaaaatataaccatatttatccaaactaactgctacccaattgagagaatgagcaacttgaacttacttgattggaatacagaaattggggtgaatttcaaaggagagatcagatgtgatttgggtgtgagagaatgagaaattgagaggagagatgggttgtttttggttcttttggctaatgcagaaatagcacctgctcctcttaatgccattagtttttgtgaaaacaaaagaatacctttaacaattaacatgcaaatgttttatgttttgtttgaacttaggaatggaaaaaagaaatgcatattttctttctttctttgttttcataaggtacaaaaactagttatatgcttaacgtggaaatccaagcttcactccataacagtagcaaacaaatggccctccttatgccacatgggatcctttaacacttccctatgccacgatggcattcctcctaatgccgtttgtcagagattgtggtgttgtactaaaacgggaccgtagcaatactctatatgattccgtttccaaaaatgaaaataattaaaaaaaaaaggtcattctatttcttaacactaattagtaatattttattaaattatttacgtactgcattataccaataaataggatactttgggtatgtgttaatatttctcttgcaatcttacattaatataagcgaaagcactaaaaagtgtaagtagggtcggtctaggcataagcaggttaggtttgcgcttaagacctatttattttaagagcctaaataaaaaaaatattttttaaaaaaatgaatgttataaatatattagaatttggattaatttttacaaaaatattattatacggaaattttttcaaaaatactgcatttttataaaacaaacataaaaaa

SEQ ID NO: 165231 - DNA, 652 bp, Cannabis sativa
tattaattatagagttggaaacaatttcataggaaggtgggaaatatgaaagtgacaaccacacctctttcattaataatgataactattattaattattttttatataaataataaattaattaataaattacaataattgccctatctcaattatatatactttgttctagcctagtctattctagttgcctaaaataataattaattgttttggtcaagttccaatatctaatattttataattcaatgcaacaagtagcaaactttgacttaagtttagcatgtgaattagttcaatatgtaagtgtcaatatcaaatttagaattaaaagaaaaatattaaaaaaaataatgactataaaaaaatatttaacacaatatttatattataatttagtaaatatatgttatacatgatgttattttgaaataaaattacaaatatataatattagtttataatatatattttgtactgcactaaatattttttttaaatatattaactaattgataataagaaaataacaactctaccactttaggggttttctatggaggaaattatgtagaatatggatttttttcctcaagtttgataaatatggagaaattatgattttacttaatctatggcttttttctaatt

SEQ ID NO: 165232 - DNA, 937 bp, Cannabis sativa
atatatatatatgtatgatgaatattataaatcaatctctttctccacatgacattcattcctttattggtctgcatttttcctagctttcggtgctgccgtgttgcctatcctaaaacgatggatccaattaattaattaaagaatttacagatattcttattcaaattcttttcattttcttactatatattaaaataagaattatttcataattacataaaaataaccaaaaaaaataaattacaaaaatacaaatagtataaaattttaaatattttttgtaatttatataattttattacaaaaaaatataatattttaataacatattattacaaaaataccctaaaatgtaaaaaaaaaaaaaaatctttaaatataaaaatataaattttttcctttatataattatatatatattaattaattattccatatgtgttgtaatattcataacattgtatattcattattcatttttgtatatgtatacatgcataggtatatattctatcaaatattagttgaactaaaagtactacatactacttttctatatagttatgattttttggttatatataaagatgccaaaagctttgtgaatgtatagagataataattaagatgcatttttgacttgtcggcacagcttaaatattatctttagatttagattcatgtcggttcaattcaagcaatattaattaataatattaacatttgctacttattataatgtaaaaggaacccttttttaaaggaataatatgttagcctttgaaagaaaaaattaggacttttttgtttggtcccatattgatccaatttgatgggtcgtaagcttataccttatctctatattagttataggaagactataaaaaataattactttgttataatataattttttgtgattaaatgtgatttt

SEQ ID NO: 165233 - DNA, 1125 bp, Cannabis sativa
agagattgaatttgagttttgtaaaaaaaaattctatagatgaaaaaaaaaattgggtgcaattgtgagagttgaaaacactttgttagaactcaacagagaatctcgtctcgactgtattacttatttttattgatcaatcaataaaaaaagattatgatggtgtttcaaaactggagtaaaactatagatcacatcgatctatcaaacaatcagtatatattggtacaaagtgtatgtatttggtacatagtgtatgaacctactcatttatttagaatgaaaaagttgagtcttttcaagtatgaatcgtatttgtacaaagtgtatgactaattattctaaattcatatagcaacaaaggaaaacttattctaagttgttaacagataaaggtaaatgggttcagtcaaatatgtttaatgaaaggagaacatgcattatgtgcattgtagactcaaataagcaaattctctacataaataaatgtaactttgacaactagtcaaacatcttccaaaacacacactacaatgatcatcataagtacttatcgtatcattagtatggcttttcatctgtttatattatctgattattcaaaatgtaatgaaaatcataataaaatcccatctcaagttctgcaatcaatcattcattatatataataaacaaatgttctaacttaattattatcctcaattgcctgcttgggaactcaaatttccaaaatcaacaaacatacaatttatatcctaatcaactttgtacatactactaatcaactttgtagcaccaaaatttaaagaagaaataaccaaccaacagcaactgaccagtataacagcaaacaaaagctccacacctagttaagtattacttatttttaattaccaccatcatcatcatcttcacatcctaattcaaatttcattacactctctttacaagaatccccaccaggtaaataagaagacaacttagcccaatgagctaaaaaagaagaaaacttgttgatctctgttatagtgagatttctctcacctagaaactcgagactagattcctccttaaaaggacacgtgtattcagattcccaatgaaagctgaaatgtccgtgagaga

SEQ ID NO: 165234 - DNA, 2064 bp, Cannabis sativa
tccaaaatggtatttaccctatcaaaaaattgcttttaaaaaaaatgaagagagtgcaattaaagatgcacattacaatgctatacaatttttgataaattttgaataattttttatactaaaaatataatttatctttatatattttatactattaaagaaaaaaaccatcactaattaaaatattaatgtaattttttatttttaggtgcaccacgaaattctcttatatatatatataattaggatctatgtaggtacaccacataattctccaatatatataattaggttttatgtagatatatacatggggatatatataggatctaaaaaagagtgtactcacgtctttattatattttatataggtataattttatttttataaatggtgatctatattgtatactcatttaaaatgttatgtaattattttttttaaaaaaaattagagtaatttatgtttttaaaaataagatttaaataacatgttttacaggagtattaaaaacagtaaatacaactgtaacatatcatatctttggcgctaactttatttagaattaatatatatacagaagctaatcttataagggagttaaaggttttctctggttctagctcttgcagccttcggctggtgctatggcaagaacaaggtcgaaaagccatggaaagcctaattctgctactaaaaattcgaagaaaaaagctaataaaataacttctgatgagattcgaggtgaagagttggatcgaatcacggagattgagcctttggaggtcatggatatggaggttctgcaggaggatgatgctctcacagatatgtttcaacctccattatcccctaattcatccttggaaacgataaagcgacaggaggaaattcgaattgatgctcggaatgacttcatccacttcctcaaagccaatgatcgatgtaacagtaaccttcagcaaggtaagaattcgatttcccctatattgcgatccagttctgtgaagcataatctggagaattcttttagagaaaccagtcagagtaatagggtgaagataacacttgatgatattgaggaagaaatcttattttggaaaccctcaattgtatgctatgttctcggggttaatcctcctctgcatattcttgaggggtttgcaaataggatttggaaggaacaagttgatcgagtgaaggtgttgtcacatggcatctttctcatacggttcaattcactggactatagggatcaggtcattaatggaggatacaacttcttcaaccggaggccagtcattatgaagccttggaatcctaatgtcaatttcaagaaggaagatgttaaatgtgtcccaatttacatccaacttgaggacttggaattgaaatattgggggggaaatcactttctaagatagttgggcaacttgggaagcctctcatggttgactctatcaccaaggagagggaaaggctgaactatcctagggttcttgttgaggttttcatggatcaacacctcccgaatttgttagactttgagaatgaatttgggtcgaatacgttagtaggcatcaaatatgaatggaaaccaataacttgctccaattgttatggcattgtacatgccactgctgactgtaagaaagttgctgctgtaaaacagcagtgggtggttaaaaaagatagcatgaaagtcttggaaactgatgaggagggctttactaaggtctcaaaagggaagaaagatgatagagaagtgaagtccaaagaagaaacgagtgtaacagtgatcaacaatacttttcagcctctttgtttggaagaacaaaatgatgtgctataatatgctgctactgatgctgcagctgatttcaatgagacaggggtgattttagagtcaacacagggggggggggggagatccttctctctccaatggataaactccttcgattgaatgttcgaggagccaacaatcaagctaaacaacaattaataaagcaatttattaattcacaaaaggttgattttgttgggcttctcgagactagagt

SEQ ID NO: 165235 - DNA, 512 bp, Cannabis sativa
aaaatttcgaaagtgtgttgaaggcgcacgagccgcgtctcccccaattttatcagttgagtttaagtagtcattaaagtcgcccaagattagccagggagaattatggacattggatccaattctgttaagaacattccaagagtgcattttttgggaatgatgtggtgccccatagaaaccagtgaagtaaaaagcagaaaagttattaggcttgagatagcaataaaaatgacttatattatatgacaaaagggttacatcaatatcatgagaccaaagcaacaaaagacctccactgaggccgactcgagggacttctaagccattaggaaaattaagatttaacttaaacctagttaaagcaccagcagggagtttagactccataataaacaaaagtgcgggcttatacttcctagttaatagggagagggatcggaatgctcgtttactccctaatccacgagcattccagcttatgacaatcatggcgcttggcgggtgcgctg

SEQ ID NO: 165236 - DNA, 1809 bp, Cannabis sativa
atcgtcatataaaaagaaataatgttaaaacttattaaaaatatatgtacgttagttggacttagctatagaataattttttattttatcaagtcaataaatatgttcatctaacatataatattattttgaatcttgtacattttataaaagttacactcatttattttgttttttgtttttttagaatcacactcaattattttgttaatattctatattttttaaaataataataagtagtatcttgagctcaacttagctcaattttagacgattttttttaatataaccaatttaaaaataatttctaacacaaacagatacaaaaaatgtaagttgtaactagtcttattataacacatccagatcgggttattattaagtttaattttgagaaaaatgtgcttagggtactatttgtagcatttttaaaaatacaaggtttaatttgtcatttaacaaaatagatagtccaattaataacttgtgcaaaatagaatgtccaaaatatataggggagaagttgaagaatacccactttttttgtacattaactaaatttacctctatataaaatttaattcaaatatatatctctttttatgagtattatacttaaattatccccacacactcatataattaagacataatttcaaacataatagatttatgttctttgtagatagatgtgtaagtttataggacagttgacgcaaaatttttattagagaattatgaaaagtatcgtgaaacaataggggtaaaattggtagaatgattgaaaaaagaagtgaaaataataaattttaaattaaaaaaataaaaattaaaagcatcaaattaaaagaagtatataacgtaatttctctacgtaccgtataaattttatgcaatccttgattatccgctaaatatagattcttgaaatcattatcgacgaatgcaagcttagatccatctttggaaaaggttggaaacactcctgaaaccctaaacaatcctacatctggacatggagaatccaacaccttgaaattttcttcaatatcatgatttccaccctgtcacaaaagtaaattagttattagctatttattttgtgaacaaggtttattaataattaatttaaaattaattaatattgtatatattaattaggttatagtatatttatttttttaagttatccatccatgccttatgtatgcagtaacaaaaaagttatctttagtaatgaatttttagttatagtataaaaataataattaataattaattataagttttttttttttttacttttagttataagttttagtaacaaattttggagtaatgacttgcaaatcatgatgatgaatatttgaaatttaattagtatatatgtatggaacagaaacaattagttttaagaattaatttttattttagtcttatattattgaaattaattttaggatgtaaatttaaattattttattataatttaaaatagttttccattttctttagtttgaaataaattaaaatacttattatattttaaaatacattgtaattgtttttaataatatacttactataggtttaaaagaagggcaaaaaagataaatgttaaataatttgaatattttggtacttttaccataaaagataaaaaaaaaaaatggtatttaactgtaaataaacacaaagtatttatatatatctttatatattaaaagtgcctatttaacgacatttcttggtttaacatttcttggtttaacagaatatacttaaaaataaaaaaatattctgtta

SEQ ID NO: 165237 - DNA, 1495 bp, Cannabis sativa
gttcgaatagacttgacattaaataggataaaataaaaattaacattaatattattaactttctaataaaataaaataaaaaattatttttaatttttttaggttatgggttagaacctgaccaaaaaaatccatttttaaaacccaaacctaaaacccgtgtggggcattttcgggttgaccccgacccgttcacacgagttttcaagtttttagtttttttggcagcgggtcggggtaggtggtcggattttttgggtttgcgggtctaaatgttcagccctaaaaagaacaataaggcccaagatccacgaaaggttcgctccgatttcccaaaaggaaaatgtctgcaaagggggaggctccttagagagcactggccctcgagaccaggaggaccgaaagagcaattcgtgcatcaagagcccgaggaaagaggaaggaaaaatcacaagcatccccttgctgatttaagataaaagctcaataacaagtgacctcaggaatcactttgagaaaaagaaacaagcaataccagtttcggaaggtgccttgaatgaaagaatactggctgaacttacaatcctccgaaaagacatagttaatgtctctcgtaggctaaagggagatgattcagaatttaattgtgaagaccgggagccatgtgctagaaacattttggaggcatgatggtattagcaaggtgattacttcaacgtgtagagggcgagattgatgaatgtagttattctctccacgtacaaatatgtggatcaattagttgaaagctcttattctcaagtataggtttccacatcttgaacaatttttattatgtactctgtttatcctgagatggacttattgccttgccaactgtacctgttaatagttgttattcttatctcgtatctgcttatgtggcagcgattttaaatatttttatcattcgtaattcttgaaataagttatttaaattacatttaatgatgtaatataatagcataatcatttagctaattcatattcctttcctggtacatgtgtcaacttctggttgttagtcgaaatttgagtgtaacagttatcataagggtatctagttaccttacttgattttctcatatttttcaactttttcttcaatttttttttcataaaataaactttttttttaaaaaaaaataactatatttttgtacaaaaataaatatatataaaaacccataaaatttataatttcctcgatataaaattactttttatattcttgttaaaataaattgttgacaactatatttttgacccaaatattacataaaagtaaaaaaaaaaaaattatagtaaatgaacccaaatcatagtactttataagtaaatgtcattattttaaatttgcatagaaatgatacttttacactatttattatttatattgtcatttgtcacctaaaaaattaataatttttttttcatattttttttagaattagaa

SEQ ID NO: 165238 - DNA, 946 bp, Cannabis sativa
tcttttttctttcttcttttttctcttctttttctttaaaattagtggggctcgagaaagtaaaagaaattaaagtgatttttgagccctccccacaaaaagatttatatagtttatatatgtatatatgcgcgacttaataataggcatttgtacaataattattattttttcttttatgaagggatggattcatggaagagaaaacaaatgcatagccatttctacagggttcctgatccatttcgtaatgaggtaattttaattaatttcacttaatgcttctaatttctatatatatagatatatatatattgtgatatatattttaaagcttttgaatatatgatataaacttatatatatatataaatatatatatatatgaccattgataattaataagatgtgcaggttgtggtgattgttggaagctcacttagtgggcaagatttatcaatggagcttgtggaagtggctaaggaagtgtatctcagttctagatcgatggacataactgaaggcttctcaaaagtcatagccaaacatcagaacttgcatcttcgtcaacaggttataattaactaccaatagatacctctttaaatattttaataatatattcttattataaaaattggtaattaacaataattacttctattgcagatagagtccattgaagaagatgggaaggtcttatttgtagatggctcttgggccatagctgacacaatcatatactgcacagggtaaaagtttaatttataatttcatcaatatttggtgactagatatttttcaattttcatcaaatggaataagatactataaagaaaaatcttagtgaaaaattgtaatttaaaaaaaatattataatatttacgttattattgaaaagttccgacaaaaattttaatttgttgtgattcgatagccgaaaaaa

SEQ ID NO: 165239 - DNA, 883 bp, Cannabis sativa
ttttatatacggttgtgttaagtaatgaatacattcaataagagcaacaaaatgagggtagccaaattagtatgcacaccttatgctcatcctccaccaacactagcttaacttaagagggagcaactccatatattagtttacttagaacaatgtacaaactgaattttagaaaaatcattacaaattaaaatgacatttttaacaatagatgatcctaaatagaaatcatgacaacgcttagctttcaaagcactgaaatcaattcgactagttgagattacaattgagagagaaatagagagaaagcttatgaagtaaacctctttattcaatgaatcaaagtatgtacagagaagtgtttatatagtacagtacagaaaaagattaaaggagctaacacactaactaacctagcaaaaaataatagactttaactaccaataacagacagtacatctagtgttgagtatcctcaacatcccccctcaagctggaaggaggatactctaatgacatcttgtgacatagaaagttaaattttggtagtgtgagaggttttgtgagtaagtctgcaggttgttcttctgttggaatatatgaaatttagacattatttttggtgattagctctctgacatagtgaacatcaacctctatatgcttggttcttgagtgaaaacagggttagaggctaactgttgagctccttgattgtcacaccagatggtaagagttttagataaggtgatgccaatttctttgagtactgatgtgatccatgttggaattaactttaccaggatcttagatctactcacaagtatgttgagttaacaacctaaatatgaacttcaaaaatgataaataaaaacacataaaa

SEQ ID NO: 165240 - DNA, 2529 bp, Cannabis sativa
agataaatctgctaagtttgtgtctagttaatagctgatcattgacaatttgccatcccataaatatgtgttttggcacattcatcctattccatatattctttgcataatcaaccatgtgagactgactaaaagagagatagaatagttttgctttgaaattacctcttttttcagccttcttgacatcttcttcacctatcaccgagcgaagacgaagaagattcttaaaataccaacttgtgtcttgtttaaaagttgctgcccagaaagtctgacccttcaggtatatagcatctatccaccgaacccataagttgtcttgttcactcgaaatagcccaaatatatttggccattagagcaatattccattttttaccctctcgaaactcaatgcctcctaacttttttgggagacagaccttttcccaagaaggactgtgcattttgcatctattgctgttagagccccaaagaaaattctacaacatttatcaatagctgcagtaactttttggggaactaagaacaaactcatccaataatttcgaaccccaaggagaatagaatggatcaactgagctcttcctgcaaatgacaaattcttgctagcccaattatgcaagtgtttgcggactttatcaataataattccacaatcagagaaatgccattttgttggcctaagataaactccaagatatttgagtagaaagcttccctcatccattctaagaatcttcatgagcctttgtttgtttttcagcttggatccctccaaagtacaccgtagattttgctttgttggccattaaccctgttgcttcactaaatatctgaaaagcttcactaacacacttgacagatttctcatttcccctgcagaaaattataagatcatctgcaaagtaaagattgacaagccctaaagacttacaaaggggatggaacccgatcccttctccttaaacttctgaataagcagtctcgttagatactccataatgagaacaaaaaggagcggggacattggggtcgccttgacgaagacccttctcacctttgaaagacccttgaattcttccatttaatataagagaataagaagctccatggaggcaactttgaatccatgaaataaatctggagggaaaacaaagccctttcaaaaagatcatctacaaagcaccaatccacagtgtcatacgctttgctcaagtcgatcttcatgatgcctctagcagagatgttactccgagtatacccttttaatagatcttgtaggattaggatgttgtgagctagtaaccttttcttgataaatgcaccttggttcttggaacacatcatcttggagatacatttataaatggtgttgcagcaggcagtaggccggaaatctcctgcattttgcggactttcagtcttgggaaggagagaaatagtagtctcattcatctccgtagggagagagccagtctggaaaaaacccaacacctctttagatatgtcatctcctatctcctcccagaggcctttgaaaaaaccagcaccaaaaccatccggccctgggcttttcgaagagtggatgtcaaataaagcctctttcacatccttctttttaaatggacgaattagttgaacttgttgctcaatgttcagcttattttcgtgttcaagacaatccagttccattcttctagtccccgtactttgtctccccatgaagttatgaaagtggttgagaaagtgttcaacaactttgtcgtactcatcaacaacaactccatcaatactattggaacaaattctcttctcttcttcttttcataattgagtgaaaatagcttgttttttcatcaccaaaccgcaaccaactaacttttgaattttgttggaggtagctaaagtattgctctcgagccttctgaaatgcttcatgagcagctttctcctctttagctgttgtattacagaggggattgaacgccaatttctcttgagcaacattgtaattctctttcgcaacagtatactcgtttgtcacatcctcccgattagagacaaaggaggttttgagcaagtgtttgactctgtagagttgtttgcttaggcttttgagatcattaacattcatcttcttccaagtggagagcactttttccgtgtacccatccttgaacatccagtagttacaaaagaaaaaaggtttgagacccctgttgctaatgttggggtgtttaatgagacaatagttgtgatctgaaatcacaccccatctgtagcttgcttctgtgttagtgaagctatcaagccacctttcgttgataaaaatcttgtcaagctttgaatgtactctactgccctcctcatgcttgttagaccaagtgtagaaagcacccgcagttttcatctcttccacttgaccctaagcgagccaattttgaccatcttgaatctcagcatgtaaagcccgcttagttaatttggaaattagcagttcattatgattaattatgaaaattat

SEQ ID NO: 165241 - DNA, 1185 bp, Cannabis sativa
ctatctatattaattgtttactgttattattgtctatattttattcttctattttatataatattgataaccaaaaagaaatggctagttattaataatgaaagatatatataatgattggagataaaatttcaatatatatatacaagatttgagatgcatggcgaactagcaataatgaaagatatatataatgattcccaatgaagagccgaatcaaggtaaggtacgcagctaattattaattaatggagcccaaagaagtccattaaagggttatagacaactttgttagcattgacacccataacaaaatctaaatgagcataattttctaccaactgaactaccaacttgtcttgctcgtgatctttaagcttctcaagtaaaacactcacatcatttacatcagaaagttcatcttttcctccatagctcaacagaagaggaaaattatttggaatactactcatattgtataatggaggagttggcttcccatattgcttcatgttctcgtctgcattaccataatcatacttggctattgtgccttttctaatcactgctccaaaattaacatattaataaattgtgtataatatcctcgtttattttattattaaagaagatttgaggtacttactttgagcaagatggattaagttcctagtggcagttgactgaggatcaacgtctatggtcgagctattgatacaacaatttaagcctgtgtatatcaaataagtggaaaatacaagtcaaacttgatatatgtagatagattattttaaatgagtattgcccaacttcttaaaatttactataattaaaaatcaattttaaaaatattaatttttagaaatataattttaattcaatgaccgatgataataaaaaaaattataatttttatgcttaatattactatttaattaaaaaaaaaaaaaaattgcattatatcaaaaaatatatatttatatttaatattgcttttatccctctattgttaactcaaacttaattttttatttatctgtcttgacccgatagaacaacctcaacaatataatgcaaaaataaagaatttttttaacaagatattaaaattaagaatagaaacttaaatttttctaataatacatattcatagataatactcattaagagtatactcatacataa

SEQ ID NO: 165242 - DNA, 1081 bp, Cannabis sativa
aatttagtaaatttgtctatatatcatttttgtgaagaatcaagaaatattttaggatttgaatagaaaaattccattagatttccattttcacaaattttgtcatttgaaaattttaaaaaatttataggttaatgaggttttatgaattttgagatttatttttttatatggtgtcgttgtattttacaattgtacttaatcttagtaattaaattatctacggatcattttgtagagattaagttagacatagttcaatagtatcttgaagaaaaaaattaattgatcactttgacaagatctcacatgagatttttgttgttgagatgaatgattttatttggtattttcaaggtaaataatctccttaaaaatttttgttagtttgtaattgtacttaattttttcgaaagaaatcaaactaaatgtagttcatattgtttataatcttgtattctttggataagtgagtactttattttgaatgaaagtttattttttatctcacttaaataaatgaaaaaatcacttgagttacaattttattttgacgaaaattgtgaaataaaatttaaatttacttcacgaaagtaatttgagtagtaaaatttaagaaaaatttactttgacaaagatatacatcatcatcatcttgcttatttaatactagaatttttctttctaatttttctcttgtacattttcttttaattcacggtacacatcattctttttagcctttcgactttatttgtttgttttgttttagtgtccctttttttttccatcagattttgtatgcactgctcatatctattgtgtgaatagtatggctgaaaatcatagttttggagtcgtacagcttctttcagagtcgcatcctcgcatccatggaaatacgaagaatatattggaatggattttcaatttttgaagaaagagatttgattctaaactcaggattctttccctgaaactcgaaaggttttaaccgtttcaacagggttgaatgggtttggagctttacctatttcggatgatgcttctcaattcattgtcttcaaggtttggtgtaatt

SEQ ID NO: 165243 - DNA, 1288 bp, Cannabis sativa
taattagggcatttttcagttatctacaactatataagaaagaaattagagtaataatacatattactatatcaacaatagcattattgatacaaaatttgccatatatcaattgtcacaagaaaaaaatatattgttagtatattcctcgtaatctagatagtgttttctttttttagattttcattttttaacggtcaaaaaatgttcacaaattatagatcattaatttttaaaattttgtcttattgttttaatcatgacttttcaatcaagaaattcaatttggataaattagatgccattggaaacttaataaaaaattcaattactttgtgtgaaatataatttttcatatccacactatattaacaataaaaatataatcatattatacgccgtattattttatattatactgtgttgtataatataatattaaattattttgtatattgttattttaatacaataatatatttactattaacatgtcttaatatgttgtatcaaattaaactatttttggtatgaaaaaaagaaatctttgttgagcagtagtattgtattgtattaatttagaaaataattaaataaaaatataattttaattatatcatatgtaatactaatcttaaccctaccgctggtaccactcaatctacgcatcttgattcaactcctaatccttaacaaactcaggacacaaacctagaattagacaagagcacgaactcaatcttggatctcaaccctgaccttgaccctgtactcgaaccctgacacccaaaaccaaactcggaactcgaccttgaacctcgtaccctaaccccaaatccaaactagacctcgacctcggagcttgtaccccaaccttgattgaccccatccttggaccccaaacctcaagccagactccggcctgaccctaggctcaatcccgatccaaacctcgaccttgtaccctgatcttgattagacccaaacactagatctccaccctaacccaaaccccttacccgaccctcgaccttgaacttgggccctgatcaagattcgagtgagtttttgtatataactaattatgttgggtccgccccttttgttgggtttggaccaataaaggataaatgcccattttatttgattcaattaaaagaaaaaaagaaaaagggggtagcaagctgaagagtacttcgtgagcagcaagtcagccaagagaaaagaaagaaaaagagagggaaagaagagaaagaaagctagagagagaaaggggttttgccatttt

SEQ ID NO: 165244 - DNA, 790 bp, Cannabis sativa
gggatataaatatatttatttatattattatgtttgttagaatgacaaccagttcatcccccattatacatctgatgcctttattttctacctatttatttttctttatttgtttaacttactatgttaatcattattgaagaatgctccaatgatatagttttttctctctaatgaacattattctaggcaagaacagaaaatgtcagataatttatgaaaaggggttaagaaaaaagatactcttaataatataagtggtgggtttatatttaacttttgttttttttttaatctttttctttaatagaggtcaggtattgaaaccgagttggcaatgctacaatctttttaatttttaatacaacaggtagtactaggttagtattctgctagcttagcatgttagcttttatggtaaaaccagaatttctaattaatgtctgctcttaatgtaattaattcttgtaatactctgccaaatgatagagttagttatgcacatagctgttattgtacagtagagtagtaggaaaaactatagctggtttgtatgtttaaattttggaaaacattcgatttatagttgttatgctgccaaaatttaataaaaaatttagaaaaaaatgattaagtttactagaggcataaaaaagcataatgcataataaaatggcataggacattataaaatagcatagaattaattttcaattcttgctcattcgtttactatagatggtgatcgataagacttggatgacattgaatcgttgtgatcctgctttct

SEQ ID NO: 165245 - DNA, 1522 bp, Cannabis sativa
atctttctaatggaataaacatatatacaaatatattttatgagaaataaaattgaatgactataggtactagtgttaattttggttcagcttgttccgagagtagtcgctctcacaattgtatatagtgatttgtatactcctacatctacactatatgctaacaacttttttcatttccttaagtttgataaaaaccgacttgtgtagtaaatgactcaaaaggcaatgtgttatatatctaacgtgaaagatgttgaaaaaaaaaaccacacatgatcatgatgatctatataaatatatgtgtgtatataaagtgggctattcatccacatgggagaatgtatgatgatgaccccatattattactgttagcttaacaatttaatgaggctctcttttctaatttatatgaacattatggcaactagactctatgttgtaacttattgtaagtgtttgtttgcaacacaactatctatttgtcattcaacgatgacgagacttggttggtttttccgcaaaccatttagctgtccaactttaatttcccattcgttatttttgacaagttgaagatatatatgcatgaaagcaaaggtgacaataaaattctagaggctgttttttatttggttgattttggagaaattcgcaagttttggtatttttagggtcgctaaaagagatgaataaaccaaagacgtacgtaggatcctcatatggcggcaattatactgaaaaggcatgccttggtctttatttccggaaatttttagaaaccaatttaaaatataataaagctaaagaaataaatcaaaaacgaagaataagacaagagtttttacgtgattcaaagattaaaaacctctagtctacgggtcaatcttattatgaggatggaatagcctatatgatttacacaagtattttgtcaagtgcttgaaccctagaatttgtctaagcactcaaggaatgagattctaactcctcgcatgaatgagttttcttatatttatagagctagggttctagtttgtaaacattatccattaatggagtaaatacacataacatatagactttgagcccatttgatgaagcctggcccataaagcattttctgttgacgtggatgccacgtcatgttgatagttgtctaaatgtgtcctactttggtagataataaagacacacaaatacttgactaataattactttatttacttatttagaatatttgattctcggacatgatcctcgaaataaagtcttgatattgtgggtagggaggcacacggtgcggggaattagtggggagtgttctccccgtccccatccccgtaaaggattttaatctccatccccgcttattccccatcggagatggggcagggaatcccctaatggggcggggaatggggacagggtggggaatcccctagtaaaaataaagtttattttaaaaatttaaatgtataaaattattaaattacctaaaaagataaaatattacatatta

SEQ ID NO: 165246 - DNA, 1058 bp, Cannabis sativa
cctatagagctatatctgctagttaagcccatcaaaatataatacatatcagtttttgggtatcaatagtacttaacactacttaaagatcacatcttactattagtgattttattaaattaaaaaattagatgagattaattacactaataattgctaaagtgatgtcattttagcacttctcaatacatataataggtccctagcattaattatctggtatgtatatatatataaatatggtagtctctttcatatatatatatatatataaacgccccatacctggctagtgtgaagtggcatgggggacttattagcttatgctttttttcattgagtagtcatttcgttgtttgaattaaatggtgatgaatcaacaagtgagcaaaatgtaatacagaagaaggcaataagtggcagctgtatatatacatgtttaaatcaacgtacatatatatatatatatttatttaatatatgtattttgagattcgtttcataataaatatatctttatgcatgtgtatctttatcttaaaaggatatgggacaagagatcccatttcgtctttttcatcatgagtttgattttcattgctattaatgcttttgtcttgtcaaatattgccatgcatttgaattattaatactattcatgactcctatgtatatatatgtactgatctctgatctcatctatctgcatgcaccagtggtctatgctcctaatgcttttattagtttaataattatgattattaatataaggagcaaataatgagattatcatctaaagtattagtacttaatgatatatacaaacagttaattataaccttttattataatttattagttaatttttactttcgaaattatatatattggaatatttttttttatattttttatagcagtatttattagagtcacaatattattcttgtaaattttttaaaaatttcgaataatttacatcactgaaaataaagtttttgatattccaatttatatcacgtgtgtttaaaaaatttcaaacttattattttttaaaa

SEQ ID NO: 165247 - DNA, 819 bp, Cannabis sativa
ctagttatccatcaaatggcactacaaaaggactatctgtttcatccagtttcaacacttttgtcagcttagacaccaattccaaattcatgcttggctctagtcccttaccactaacaccaaccaacaaaccactacacaaccctaatacccacaagcaaaacccaccttctatctcaccactgcctacagtcctacgcaccaaccacacccaactaccactcagacaacacacaagtcacttccaataaccagcacccaatcaatcccacactaacccagccctaaatggcttccacaataaaaactaacaaaagcctcaatcaaacaaaacccccagtatccagcccaacccaccccatggatcaacaccacccagagatctcctccacacaaatagaattggaccaacaataacccacccaagcaaaccaatcaacctgaatcccaaacaatgaatccacaatcaataaatactaaaatcctaactggattgagcaaaaatcttcaaccaaaccaaaatcaaagaatcacttaccaaccaccactcgcaccaccgatctcacccaccgtcgaacggtgctttggccagtcgctcaccctctcaactagagccaactccccagccgagctcgataatgtagttgccttcgaaatcaagcctacgtccttgaaggactaaaactcgtcgtcgaaattgagtctccgtccttcaatctccgatactcgccaatgtctgtccactcaagcgcacccccctttcaataaagggactaaagtgtaatgatattctttccaaggagagagagagagagagag

SEQ ID NO: 165248 - DNA, 603 bp, Cannabis sativa
tttttgtttttattttaatttttctccttgtcttcttcctttagccacacccgacccccacctattcttcttcctccagccacaccactctcacccaccaccatcttcagccatagaaatcaaaatcaaatccctaaagttctttttttattaaaaacttagcaagcactaacccaatataagtccatcacctttatatataaacgataccaactattagaaacccaaaataatggcctccattttgcactgtcggccagctcaagaataacaataaacttctcacagcaacagaatgaccacgagatctgacaaggagtaaataaaagaagatgataacaacgacaaaggttgacaaggacaaaaggacgatcacagaggtggacgacgagatttgggtttgttaaaataacttcagatctgaaaccaccttctcttatctgaaaaaaaatgggttctcaaatgtcagatactcgatgaaaaatgttgtacactcttctcgatgtcaaatatttacccgatgttaggtcataattagcctatgttacgggtctaataagtaagcattttctcggttattggtgtcttttggagcagttttac

SEQ ID NO: 165249 - DNA, 1450 bp, Cannabis sativa
ttagtttttattgaatgaattaatcaacaagagttgatttatatatataagctttagctagttacaaattaactctaactaactactaactactctaacaaactcaacatgtaactaatgaattgtcataacaaatctcaagcagcatttttggcttactaaattacaagcggcttttttttttgcttgttttttttaccggcaacatttttgactcactatctctgaattataagaggctcttttggtttatctttttgactgttattagatttgaattggatacttgttagaatttttttaggctatgatacttatgttataatttgtggaagtgtatgattgaaaatgtaaaaaaaattgtgtgtggtaaaatgcatgaagttttatcttaaaattaattgacaataaaaagagtaacgtactcatgtatcttatatattatattttcgatatatttttttttttgatgaatcagtgtaaattttattgctcacaacaatgtttatacaatctaaaagcaccttaacaaagtttgctaaggccttgataaatctgtctctatacataaaatttacaaattgttgaaccaaatctcatctttttgactaactttcttaggccatacaaggattattctttgttttacattttctttgattttggcagttagatgtacccaattaggctcatttccttgccaaattagctcattcctcatcctttctttgatatattttcgatacattagcaatattagcaatatgagattctccaacatatatatagggacataagaatgtatctagaaaactaccatataattagaattagatgtgatgcagaataattactaaattttatatagtcaaataattatacaataatcttacaataaattgtctgagatgccttatgctacgggttgagggtgcatatatttgcactgtttttttaatttaagcgttcatatattacaatacataatttgagattcaaactcaggacccttaacacacacaccctcctataactacttgaactagactcaagtggttatatatttgcaccgttgaaaatagttattacttactttgaccctttgggttattaaggtttttacctctcttcatccataaaattattaatacattatcccatttcataaccctataaaaactaggtgtaattactatcaattttaaacattaattactataataaaattactataataacattttacaagaagttggtagctcttaaagaacaactcaaagacattgcagaattttaggggcaaaaatacaccatagcagctggctataagctctttttacccccttcttgtaaaatgttctggtgccaagaagtaatggctagattaaatacccgaaagcatagtgtgatactatggatggcgatgctaaacaggttaaaaaccaaagac

SEQ ID NO: 165250 - DNA, 1350 bp, Cannabis sativa
aattctaggaaagaataggcagcattttgccttaaatttggagttcccaaaatttacaaatcttctcaaaaccacttccaagaaaactacaacacctcaagaataaaaaatgtgacaatatctcacccaaatatgaactttctacaatacattctcaaactccaataataaaaaattcacttcaaattcccaaaaaatcacaataaaagtcaagaaccaagaattacatacccttggagataaatttaagagtcaaaaccttaactttttacttgcttgaagaatattgaaaatccaatggttataggatgaggttttcgaatttggagatataattagggatttgagaatgaaaaacttaaatttagaggtggaaaggtgaagaaaatgatgggttgcgtaatttaggtggaaggatgataaatgttaaggtgagaagtcggagaagaagaagaagaatggtgggtttttgtgtttagacgcgaacctttttaaactgaaaattcaagggaaagtggcaaccttcaggggaagtcgcgactcttgggtgacacaaaatacaccatttctataactttgcaagggttgcgacctttggaggaaggtgactttcactctttttttttcattttttttttttaagtttttacgctttcaacgatttttttacaaagaaattaaatacaaaaatacaagaaataagaaaagacatgaaaataaaataaaaatatataaatgacaaaataaaaaacgtcaaaaaataaaaaataaaagtaaaataaaacaaaagtagggtgcctcccaagaagcgctgtttttaatatcttgtagccggacgctaaactttttctcaagtgttctttaagtaaattaataacttcgcgtgatcaattttaccaaagtaaggtttcaatttctgaccattaaccttgaaagaaacacacgaattttctcaaacttccacaaaaccatatgaaaaaactcaaacaatagtgaatggtcatgaccatcttgacttcaatttgctaggaagcaatctctaccttgaattaaaaagaagtatctattgtccaagttgaaattctttcctgaccaagttcttgtcatgccaagcttttgtcccctctttataaatcttagcattcctataagcttcatttctgaactcatcaagttcattcaactgtaacagtctcctttcactagttgcactcccatcataattcattttcttcattgcctagaatgtcttatgttccaattcaactggcaaaggcaagcattgccaaacaacaatctatagggagacatacctattgcagggccggctctgggcataggcgggctagg

SEQ ID NO: 165251 - DNA, 898 bp, Cannabis sativa
aaaaaaaaaaaaaacattaattactatacaatattcattattttacaatagctaaaattttcaatctactctacaattctcgtaatcataaataaataagaaaaacaggtgatcaccatcccttattgtacttatgtcatcaatttctgcactctctccattgatgatttttgtaggcttgcttccaaacttttcacctgtaattttacaaggactgagaagaaactatatgcatatatatatatacctaagtgcaatcttataatttctttgtaatagctaaaaattaaagctttatttataaatttaatgaaataaatggaaaaacgacgacagataaagtaaaataactcataattattttctgccctacaaataaatgaatggagtacccacgagtaattaaccctaccctaataatttttatgaaaaattattaaataaattaataaaattattatgttcaatggtaaaaaaaatattatcaatatatatatatataattacctaaataacaagtaactaccttaagtaattaccctaccttataaccgcatcaggtatatattttcatgctcttacctagctactctaaattctaattcaactagtaataccctacttatataagtagagtatttacgggtaattaaccgagtttcggagttaaattaccatccctataaacgagtactgaatggtgcatatatttttaactttttttaatgtataatataatataaaagtataaagtaaaataagaaaaaagtcaaatttagcaagttaaattttgaagaataaaatagaaaatgttggagtaatttattaaagcatattgaaggttcatatttttatttaggctaattaggattttcgccccttgaactttgacatgtac

SEQ ID NO: 165252 - DNA, 869 bp, Cannabis sativa
tttttttttttttggctagaacaagagttgatagcaaattttaatttgggagttttattttaccagaaaattaatttatataaaatgcatatttttctattttttttctaatattatatattaaaaatatctttatttttatatattaaaagtagttatgtgtttgcaattttattttaagagaaacactattatattaatttgaaaaaattacatgttgtaagtagagatgaaaattcctaactaaaaataatcagtatctactataagagcaaatttagtcataatatgggcataagtattaggagatcttggtacataataaatttgtcctcgtggaaaataggacactagaaagttaacattattcaaaatgaaaagtagaagtaaataagtgagaaaattgtaatccttgaactaccatgagtgcatcagtttcaatataatctgctgacaaattaagtgataacagtagacttaaagccaagctcaatgcttccatttcttctaatttgaaacagtcccgaagaggcttggataaagccgcaacaaatgaaccagcagagtttcttaaaaccgcaccaacaccaacaatacctttaaatttatcaatggcagcatctgtgttgagtttgagactttctgaaggtggagccaaccatcttggcttagaattgaaaccagtagaagtgcttgaatgcaaggcagctgccgtttgttgtggtttagattggagaatatttgcacgggctgcttgaaattcaatgagatatgaatgttagacatttatatgtataaactgaaatatatgtatgtgtatataaaatgcggaataaacaaatatatacactatataacttaaggatcga

SEQ ID NO: 165253 - DNA, 1674 bp, Cannabis sativa
agggcataaaacccaacacccgggacctgaatccaggacctagacatggacccgaacctggaccaacacccaaacccgaactcggacctgaaacggactcgggaccaagacccagaacccagacccaggacccagacccagacatggaccctggacccggactcagacccgaatcgagacccaggctagactcaaacacgaacctggatcgggacccgaacctagacctgggactttggactcaaacttgaacctgtactagaccctgacctgggtccagacccaaactgggaccctaaccctaacctgtaactcaaacccgaaacccagacccggatcctaaacccaaacccagacccaagccacaaactcaagacccaaactcgagaaccggacctaagacgcagacccaagacccggactaggacccagactcgagacttagacctagactcaagacccaagacccggacctggactcgacccgtagttggtgttgggatcgagtttattaaaaatatattataactttacacaatatattaatacaagtcaataccaaacatagtcttttattaaataatactaataaaaaattaactgaatatataattataagtttagatataaaaaaagaagaaaaagaaaaaggtcaggtcggattagatccaatctgagtatctgatttagcgaggcaggcggggtgaatcattacatgatctagatcaggttggatcatagtcggatcagatctgaccagattcatttacaatcctaactccatgtttgtcaattaggaaatgtgtaaaaccgtgattttgtaaatgccaatatattaattaaatttcagtaattaaaaacacaattgttacgatctatagtaatagaatgaaaacttgttcctgcagaacacagatttgcagtaacagagtagaattaatagtgtagaatatgaaaatttgacacaagagacttatacgtattatcaattgatgtgtgtcgtatgccgtataaaatttactattattttgattctaatacttttaattattccaatataaaagtaagtaaggatcgatcccataagtattatgcttataaatttattcaataatcagtcatagaattagaaagggagtttttaattatgagaattaaataaaataaattagaagataaaaatgcaatactatgatattcaagaaatagttaaaggttaatctccactctcaacaattattctctaatcccaataattgaatgttatttcaaatttccaatcgaactattaatcccacagataaagctgaagcaatcaattatcccaatctccctattataatcaagaagaagctctcaataattaactcttttacctaagcagtaaatctacgaagcatgcaatttatttaacttagataaagctttaagtttaatggtgatagactaatctaggtaataaattaataaagcatataattcatttaacttaggttgtactcttcatcacaattaaatatacctttgacaatattggaaattgcaattcatcacaaacacttagtgtaatgtccgctttagtaatttggattagtaaagacaattagcactaatttctgatatttttataattatttatgaatttaattatttatgggccccattgttagaaat

SEQ ID NO: 165254 - DNA, 708 bp, Cannabis sativa
caatgaaaacttgttattttctttcttgtaatgtcaaatctttgaaaggctcatcaacattaattctctctgctttttgtaggttggagattttggattgtcgagaatcaaaagaaacacacttgtatctggcggtgttcggggaactcttccatggatggcaccagaactattgaatggaagcagcagccgggtctctgagaaggttatctatttgttttttcttatcatggattctgagaaaccgaaaaaatctgaaaaatgcttaaacatgacgcgtttgtgcttgtttctttcctcaggttgatgtgttctcgtttggtattgtaatgtgggagatactaactggggaagaaccttatgctgacatgcattgcggcgctataataggtaagcgcttttactattgtcgaaatttctcaataaactctcttaaacttgatttttgaacaatatccaagctaactaagaatggactcatttgatcaagaactaaggttgcgtttggttgaaggtaaagaatcaaatgtctaccattgtcattcctacagaacgatttttcaccattttgttccattctattcctattctgattcccatttctattcttatgttttcattctttccaaccaaaccaaacgtatcctaacaccagacaatgctaagaatgcattattctgtttttcaccaaatatatcatcagcattg

SEQ ID NO: 165255 - DNA, 1507 bp, Cannabis sativa
aggaacttgctctttgatctcgttttccgaaaccttgagatcgatgggctcgaccagtggtttcttcttacggacggtggttttcctttgcctcttgggaggaattacctcgacaggagtaggaactccagggttggatgtccttttcttccgcttactgtccatgatgtcttcaaaacccatgtctacaaaacaagacgaggcattacaataattataaaggccgattaaaaaagggagaggagaataattttcctcctaagggatttaccaaaatcactagaaggcgagttgtcactagaagaaggggtagaaggaccataatattcgctaaaatccctacaccatgtaatttttaatatatcataaggctcgattggctctaaatcccagctcgcatatatgtcacctaccctatcttccattgtaccgtatttctcggctataccataaaatgacttgtgacagctaatctggatgtggaatctaggatattaactgtcaaacttatgagcaatgcggtccacgagaatgaaattccaaatataataattaagacatgagtcctggacggtaactaatgtattacgctgagccctaagtactgtaggagaccagccacattggttacctcgggatgctccttcaccagattcccgaggggcagtcatttgaaggtattgttcttgggccaagcgatcccaggccttgtcctcagctggaacaattatttcctgccaagaataatacttgggaaacttgtaatcgcaagtatattcatgatcagcgagaaggccaacggatcgcaagttaacttcgttcaatatgtagttgcatgaccgaaggccgtagggaatagttaacaagcgcctgttcctactaagtatatcgggggtaggagtaggtctcatcaaaagagctgtttagacaaacaacacagtagtcaaaaaacttgaaaaaggagactgatgtaaacaagtaagaagagaccattcacttacgaagttcacgaaacgtggttgtgccgataggggaaagaccagacgtccagaagaatttatccttgaaagacactttattaggcaaggctacaagaattttaggttcgcaagaatgactaccaagatagaaaaagcccactccagcgttcttccttgatgtaacagccttaactgagtagagaaactcaatctctactggtgtgggacattccctgttcagaattttatacaagactttcaaactagcgagaatcctataagagatgggagtcagatggaatggggcaactccaatgtggtttacataatccttgaagtagtctttaagaggaagggtggcccctgcattgatgtcctcgaggctccaagcacccatactagtcgagctagtagtacttgtctaaccactagtccccggattactgcttgcaaagcgcacaggagggtagtgttggaaatattttaccaggatctagatttactaaaaagtatgtttcattaacatc

SEQ ID NO: 165256 - DNA, 752 bp, Cannabis sativa
aacattcactatcttccttaactttttcattacaagaatcaagtttatgaaaaccttcagaagctaaatgatataactgttccttgtggaatagctttcgaataagaactgttgtcttccctgttcctgatctcccgagaatgaaggaagttctatcgaaatgaacaacttccatttcttgatttgttaattcaaatggaagtaccatttctgtaccactaaaaccagaaaccaagtgtctcaccatatcataagacaaagggtagaacttcatgagttgcaaactttcactcattttgaaatccttaaggctttttcttgatctactatgatcagaattttcagttgttaaccttatcccttcttcaatgaaattatgtttttcataaaaaacattatcatgagaggtttcccaactcataggaacctccaagtccctaaaccaataatgaaacaacagagtaaaaagacatcaaaaacagtttaaaacataacaatatgaaaactatccaccaataaaacacctacaaaaaataaagaaaaaaaattgattagtatcaaatatttaataaatatgaaaattttcataaatgtcattacacatagttctatgatgcaaagattaggatttatgctttctaaaaaaaaaaaaagattaggatttatgctttttaaaagtgtctcttatatatttgatattttctttagaccatactgagttgagtttttggtaaattataattttttaagtg

SEQ ID NO: 165257 - DNA, 2070 bp, Cannabis sativa
  modified_base (2019)..(2033): a, c, t, g, unknown or other
aaaaaaaagataccctctccatgctctttgtgcgatgaaacctatcatcaccatcactaattttctttgaatttcttagctgaacctagtgtttctaaccttattagcagctaggtagtgaatcattgaagaggaagaacttgaggtaagaatcggttctcttttcaaattgaaaagttaagttttatatattggctttgtgttttagaacggttagaggatctatgatctcgtggctttgctcgactcattgttagtaagtattatttatttgttatatgattgattgttatctgatgtcgttaccagtatgtatatagaataagcctgagttaagttgattgtagtatgttatgagtagatattaatagagatagcccagtagagctatatgattgattgatacatagaggaatatttattagtattaatgttgttcaagcaatatgagcagtgtgaagcaatgattagtaaagtattgagtacaagtcccatgaggaaatatgtgtgatccgatgaaaactttgactgtttaggaatgataggagagatagtaatttatcgctaccatgatcatgaagtgatgtgtgttgttatgcagtaaactaattaatgaaacaaacagcttaaaatattaattaagcagtaaacttgttggaaagtaagatgagtatttgatatgttatgtgggtcgtgaaatatgagaaattgttaagaacagttgtttaagtggtttagaaaatagaatcttcttaccctgaaggtggtttaaaaccctagaggtggaacaacagataagtatgattgtatccatttgggatttgaggtgaattgcagattgtgaataagtgagttgcgttattttgtgttacaaaagagatgttcagatagcataggatagattctgatgaacataaattgaacccatgctaattatagaataactcacttaataatttataaggaggtaatggcaagagcactgatattgctaagataaataagactatctaaattgttagtaatggtatgttgatgtggagaatacttttaaatttcaaatggatggagaatcttgtatatggagtatccatagaaattatgggaaaggtaaggcttatctggaaaatagaagagcacataacttgtgaataaaggaaatatactcaagtgattgatgagatgtatattattaatgatgagattgacagagtactagttattaataataacacttggagagatttttggaggtttctactctgtatttagtgatgtaggggttataaccccgattattgaaaggagaaatttagatgaccttctagatgtgggtctcagttagaagtattagagtattgaagttttcgttggaacaaaaataagactgataagcttaccaagagatttgaacatggaagatactttcctagaaaggaaggttgagtttaaatttatttcatggtaggatattagaccatatgttatattgttaagagaatgaggtacgttgttatctgtaaaagaattgattatctccttcacgtgaggtaaatttttctagtgaatgtagagaataaaatgtatatatatgggttgcttttcggacgaccagaaatgttgggttacttaattaagtaacattgagagtgatagagttattactctatgaaactattgtgaaattaacatgatattcttattaggcaacaaaagggtaattggtcattttatcaagtgataagtgaacattggttatcttattagataatggagttgattgttttaataaccaataacttgtataagtgaatataatatgagtttgatagtagatggttaagtataaaagtattattgattgcaaaatagtgatggtaaggtataaactggaaaggtgaaactctagtgataatgatggtaaaagaatacaagagtcctagatttcgataaataagtatttgtcaacgggggactcaccataagttagtatgataattcatgttgggttttgtgccnnnnnnnnnnnnnnnttcaatataatcagatttattaataaagatcagaaat

SEQ ID NO: 165258 - DNA, 1381 bp, Cannabis sativa
aaaaaaaaataaaagattcagtatttaaaagttaaaatataataaaattttgctgcaaattcttataattaaatctcctgttctattttcgaaatagagagcgtatcacctttgatcatttagtttttatgaagaaacccaatgaaatagctgtaatttgaattctgagaggtggagaagaggaagaatttagcatcatccttcgacccgtaagttgttatattagatacgtaactggccttgttttttgcaaaataatgaagttaactggccttctttctttctctgttccttcctgtcggcgaccatggaggttgagtagagatttattttcaccttttacgagatctgcgatgagtagatcggaatctcaggtttttcgaggttagatgcttcaatctggatgtatgcaacgtctagattcaggcggccataatacaactatgcgttggtcacctatgcctatcatttcaactcctccacggttttcaccaaatctaggattttcagtttcaaacttaaagctttttatctcattcgttatttagttttgaatagaagaatgtaattttgttttcaatttttatttgcaatttctttgatattgtttagtttttcttcagtaatcagtatctattttgttgagtgtttttgcactcgtttttaatttttctattgaggaacttttagaaatggattacggctgaggatggtgcctctgttctaaccaccaccccttctccacgacgtcgaagtccgtcaaactgcaatgaagaatcagatatcccgacgggtccaaaattatggcattgtttcacgtgtaaagatagcccttgatggtgaaatatgtaatctttaattaccgttgtttaaggtatgaaatcttattaaatttattataattttcagatatcttaaaaaaatatttttacagtattttctatctctaattttgtggactatttattgtttttactactatttattttaaaaagttttcatttctaactctaaaattaagtgattttgttttattttaaattttatatattacatatatttatttttctcatctattctatactcttttgtagcttttatgatttagaagcacttcaccttccttttaggttttaaatatttattattcttttgaatactcaattttagggattcccgttattaaaatttattgacaaattcataatttattcatttataaataatatacattttatattattattgtaatgtcattattttaatatttttattttaatatttattgactaatatagctttttaatttttatggctaatgtattttttggttttgtaaggcaatatgtctagttttgtaagtggtttttttttttttttt

SEQ ID NO: 165259 - DNA, 2537 bp, Cannabis sativa
cacatagactctaggtcagcattctagacccatcagcgagaccctcctcaaagatgaagtgggccaagcccatttggatatgcctttccaggagctatcttagttccatacttgtgaagtcttcagccttcgtcggaccgagcctagaaggcacctccggtatcatgagattggagggtaagatagtgccttctcggaagacccttctaatttctctatttattctcgcatataaataaggaaattccagttatcagatcatgcaagaatatcacatcacgattaaagtggaaactttccataacaaacgttgtgtagttaattcataataatcacccaccattaatggacatggtattgacctgatcaacttaactccaatctacctagtcagcagattgtattcttcatgggctagacctcatgagaaagcccaaagatatcgtttaattgtaaactcccagtagagggaaaagtaaaaatcctaatgtaattctccaactactacaaataccccattaatctcattgattatgggttgaactctcttgcatattttgctcaggcaaacttgagaacatacatcatgtgtatctcttaaagcatttacaagtaaagaacttactgaataaaactgactcgtggactaaggctagttaacgccccaaccacgtaaaaaattgtttgtttctttttatactttctctttcgattgtttattcttcagttcttattatttttattccatttcaaaaaatctcaggaaacattttagtacttttattgagagctaaaggaagcaatgagaccactagcaaattacgtccgagaaatcatggccctcactagaaccaaatataatctccatttcaccggtcctggtgccaaagcaaaagatacgagcgatcccaagaggtgactagctgctagaaaagttgttgagacgaggatcaaaatctagacgatcccatcattaaggatgcagaatcaggagaaagtagttctgaggatgtcgaagttaacaccgacgacgtcccggaggatatgcatgaagacaaccatcagtacaaagctgctaagaacaatgctggggagaaaagccagcctgacgagtcggaccccgtggtcatcatggcacgacaacttcaattgactgaaaagaggttatctcagcaagatcagttcaacgagatattacttggcacgatgacaaaaatggaggctataatgactgcattaactaagacagttcctgacgtacaagcccttccaacaacaaatgcacctaagaaggctgatctgaaggacgttggaacttcaggtgtttgtaaagataatgacaaaggaatcgctatcgaggagccaaagaagactccctccatgaagtagcccaagaagtttaaagatactggccaacctcaatagaagagaaacggaaaccacactttaaggcgtggagaccaaaccaattctagaggtaaagtcacagaataagacaaacagacgatgggacacggaagctagagtctcgaaagaaaatacccccacttattgatttgagcaactatgaagaagaggttaaagaagtgcatctgatattggatgatagtggcggaagcctttctacaaataatcttcgaagaaaactggatgctaaaaaggaaagagctaaagccaaaaaagcaagaccccgcggaaatgatttgaggaatcacatcaacgatcgcgttagcggaagagaatcctctagtgataagacttaatgtcttgaacgtaaagttgaagagttgatgaagatcactgaaaagatctctaggaaacaaagtggtgtcgtattcgactctgaggaagaggatacagagccttgtgtgaagagaattattgatgcaccattgccggagcatttcaggatgcccatgatggaacggtatgaaggatgaacggaccccaaggaccatttgtccaaatacaatcacatcatgcaagtcaccaaggctagtgatgacgctaaatgtttatgtttttcattaacattaagtaagtccatagaggactagtggaagaggttgtctccaggatctatccacaactggagagacgtacaagtaatgtttaggaaacagtttatagtagccaaggattatgatttgaaagctagctccttgacaagcgtcaagcaacaataaggagaaagtttgaagaagttcatccagtgcatgatggacatggctgccaaaacaaaggtcactgatgacatgaaaatggtggctctaacatcaggactaacaactggatctttactacggggagatctccaacgcaaaagggcagataccttgagtgaattcttaacaagagcccaaggattcataaatctgaaaatgcttatgcccaggcatatggagtactcctcgcaccttccaccgaagtaacaaacacccaaccttgacagatgacaactccatctattaaccctctgccaactacttttactactcccacggtatatggaccaagtgttagcccaagatatgttt

SEQ ID NO: 165260 - DNA, 1860 bp, Cannabis sativa
atggtatttaccctttattttataattgttagtgatttatgatgcatatgtgatcatgttgcacatgctattagccgggactgtgtataaagtagaaaattaaattgaacatatatgtatggatcgaaatagtttcaatggacttttttctataataggtattttaggtctaaattttatatttttagcttggtaagagaaattaaacaaaaaaaaaaattaaaacttttttttttcaaaaaaactgactgagcaccttcttcctccctctccatttccagtcgcttctctcctctattttccttctcaaataagacactatttcagctccaaaaaaaaatcatccaaattatgtagtatcaagaccgcaatgtagatctcaacaacaaaacaatctaatctcgacaaatccaaaattaaaaggtaaactagaaaaatcattaaaaagttaatctaatctcgacaaatccaaaatcaaaaggtaaactaaaaaaatcattaaaaagttaatcattttgttgtgtgtttgaatttaagctttgaattctaatgattataggctaatagataatactatcgaacaaagtatttacacacaactgcacttggaggaccatcgtcatttatcaacaacaacaacatctaaaattttcccatctaacaaacaaaaatacccacaagacattcccacaaaattaactattttccttctgctacaaatttccactaacatggggattaatgtcctccactcctcctaaccatgctttagttgattccacaaattaggaattcgatctccgtcgatgaaattttgtgacaattcttttttcgaatatctagttttggatcatcttttttaatattcattttcttgtttttatatattgtttttatggattaaaataattgtttagaaatattgataccaaatattctgaataagtacaaaaattttagaatatggatctaaaaatattggtacaaagcaattatcatttggatgacaacaaacattatatgttgattacaaatcaagtggagaactaaaatctagagattgaatttatgttgaactggtgtagataatgttgcaggaactacactgcaaccttgaaacaactcaaatacaactgaagaaatattgccaaccactccaaagcaaggatgacaagagtctactattttacataaagctactaaccaaggaaaccgtcacacgatatccattgtatgtaaacacattcaacaacacagaaacaatgttaacacaatcctttttagcaactacccaagtaatgatgtttaacaatatgacagtggttggaagtgaacatcactcatgacactcaactatgcagcaacccaacaacataagaacaacaacaaaacaattgtcatatgctccaaggtgtggattagtttcaatacaaaaaaaatgttgatttaacattgtttttaagttttgtttacgttgtttaatcttcctgaaaataaaagtaaaatatacaggtgacacaataacaacagaaatataacgatgtatatgacaataagatattgaaaatataaagaaaagttacatatcctgacacaataacaacttcagtagttgattttgagttattttgtgtgtttgctatatttatttgttcatcaattgatattgttttggttgaaaaagtaacaaaaataaaaactacacaatatcgacaaaagaataattgagttatttgcatgttattgtgaagtttttttgtgttgtttttgcaacatcttatttcaactttaaaatattatataaaatcaagttgtttttatgttgttctaaagttattatgaattgttatacactacact

SEQ ID NO: 165261 - DNA, 1127 bp, Cannabis sativa
ctttttgtgaatatatcagctgctaccaaattagagctccaactatttctattatagatctgtcgaaaataaatgttaagattcttcagttaatatatatatatatatatatatttagagagagagagagagaaatagaaatcttgagctacttccttgagtgatattagaattataaaaatgatggtgctatttatgtggaggacaatgtaagtcgccaaaactgaccgacaacacactttatttgacttcttcgcaactccagtaatgtgaggggtaatatagtaattatatatactaaattgacagatatatatagcttactttgttttattattaagaataaataggatttatctcctcaactataatttattgtagagttttgcattctgaactttttttttggttgccgaaaacttcctcgtgaactataaaagtcgttagaaatactcccattttgttgatttatttaaacaatttacttatatagcactaacatgatgttaatctaatttagtaaagagttcaaataaaaataaatacataaataatcatctaatgataaattatgagtgtatatatatacatttgtaggaaatttagctctaatacataggaattaaactctgtaattctaacttcaagatcacacttaaacaaacaaaagttaaatcaaaacaaacaaatcaagaacaaaaaactagcaaacacattaaaccagaaaaatataacaacagatgaatctagatggctattaaacaccatagcacaagagatttatattggtttcgatcctaagttcatgctaaaaaaatgcaattcccgtcggtttctaagtgtcatttaaagaatttgcgtaacattggttcttttattaatttcttgaagattacaagatactgttattacactagaatgacaatggcaagaaaagctacaacaagaattatatgccctagaagttgtggtaagatgacaatgatagcagtacttgatgtatctccaagctggtataaaccatatttagtaggggtgttcatctgattcaatctgcatttttttggtcaaaaaacatccaatccgcactaagtgcggatttcatattttggatcaaatccgatccg

SEQ ID NO: 165262 - DNA, 4028 bp, Cannabis sativa
tcaacactcactttttagatttgaaatcataaatcgcatgcataagatggtcaatctaacacatgtaataggcataaatattaataaatcacacgtcaatacaagaaagaaatcaaacaccgaccatttaaacccaaaccccgaatgttttgggcattctcctcttccaatgatggcaaagccacagtggactagtgacgtcgtacccttcctcctctcccagcgactgcacacgtcgagggttcactctctagcccctcctcctcccagaggctatcacgattttcttttcttctttatgtagtgggttctcttgacttcggcttcaactatttcggtgaatatctaatatgtttttttttttttttgaatttgttgatatatatattttattgtgcatattttagatttgactcgaagtaatattcatggttaaagtatttgaaagtttttttttttatggtgtcagtttaaaatcaagacttatggtggaaaaataaattttgcactcgcaagcgtcattttaaaaccaacatctatgcttgagaaatgttgattctaaatcgatatcaaagaatatattttatctggtaggtatcagtttaaccaactcctatagtagattttgtaatagtattagaaaattttcaaaaacatgtgttgtaaaaaaaatatcatgtacaatttgatgaaaaataaaatttcaattatcataaaagaaatgttaaatagtaagtattaagtattatgattattattagtataattataatatcaagctctctcatatttttattcaataattattataaaaaattaataaacatttacaagacacaatctctcaatagagtttgaaattggtatctaaaaatataataaaaaataagaattaaagcttctgtcttttttttttttttttgaaagagattagagcttatgttaaatgttgtataaagtatacatacattatgggcctgtctgcaaagattgaagcaaacacgatacagggatgaaattgcaaataatggataatgtaaggactgtttaggagattagatcttctggtcccttttgccacgtgcctatcaattagcaatcgagatcgattaagactagtggccaaaaaggattaaaaaatatagtttttaaattacgaaaatacccttttcataccaataataggttgttgttgtattattttacagttagaaaaaaatatatatttgattaaataataataaattcaataaaaaatcagcttcagtttattggtacttttcccaaagaaataatgtcggtggctgtgaaaataaaattagtaaattaccatattagtcttaaaaaaaaaaacttattatactattaaaatgaagttaaaaaatttgacaatcttctattgaaataattatcattaattaaaaattaatagataaaaatacttgtcaacagttattattatttttttatatcaatttattattatttttttaataaaaaagagtactttaaattaatcctataaattaattaaaactttgggttttgatctagagctttgtgtcaattcacacgccacacccaaccttaacataataataaataaataaataaataaaagcccaataataataatactaattaaaaaaaataaaacccactaataataataataataataataataattaataaataaaacccactcacttgtatattttgtgtcggtcatacaaaaatatgtatttattttttttattcatttaatagattcaaaaacatatattgcaagtaaaatagaatccataggacacatcatatgatatatagtgcaaatttatttatttatttattgaacaaattcataataaattcagtaaaactaaatacactgcatttcagtaaacttgtatgcaataattttttttattataaattagagtgacagcccgtcacttagtttttatttttttacaatatatagtgtaattttttttttttttgagataacatataatgtgtgtcaagagtaaatataaaaatgaaatcaaatacttaaagtgattaattttaatgataaaagtttgtattaagtgaagaccatacatatataaatataaaatgatttatattgactgcattgattataaacaagagggtttaatttatttttcgttgacaaataactcatgataatatatatatatataaatattttttttgagataaataaataaaaatatatatgactatattcattaattaaattgacttagatttaagaaatcattttttatttttttacatctttatcgtaaaatatcttttaaaaaatatggtattaattaaatttatgaaaatgtatttctattttgtttctttattaaataaagatacagtttaaagtgtatacaacaaaatatatccctaaaataaattaagcctttttttggaacatagattttaagaggaaaaaaaatccaaatgatttcattaatttaaatgcaatattaattaacaatttattaatgaaaaaaaatatataaaatgtcaaaaatggtattaatgcttaatttgtatataataaaacttaaaaaattatatttaattatgtaatataatggtatggtcgacgtaagtaggaaacagtattggtaatacaattaatattgtagattatttttatagatctaattgtaatttttcaaaaaaaattgaaatatttttacaatgttagaaaataagttttaaattgttacttaccacacgtataagaaaaattagtcgctcgtgtaacaaaatatttataccttattttcgatattataaattactcaaaaatttctgaaaatttatcggtagtcctaaataactataacgtatccattcatgaaaaaaattagactaaaaaattcttttaaatactgaaatagataagaaatctaccgaaacaactcttaatatactatagacacacccaatattatattgttaacacagaatttcattaacaataatgagactctttaaaataaaattaaatgagatccaaggaactatcttttatagaataaataataataataaataagataaaataattatgattttgtagttaaaactacatagtttacgagttcatattatttttgagttctcaatctttattgaatataagatattcaataataaatataagaaatattgggtttcttcatttattctaatttcagattgatcttttagaaaaaaaaattggcccccttctatattgtagcttttttttatttatttatttatatgatttttaggaaggacatgcaattattctttttgagttttatctgaattactatgtaccaaatgtgaacaattctatatgttttatatttacaacatgtaggataaataaataattaaattggtcacacattcttcaataattttggaaatgattaggcgtattttgcgagatactagttgatgtattttctttgtttttgtggcataacacaagtcttaagatagttcttaggattgtatatttttttgctccttatggccaatcatctcacatcgtttatgagcatttcgagatgaatcgtctttcattcataccccttagtcgtttatgatgccgttatctcattaattattatatttataattttatcgcttttatttgacagtcatattataatatagcgcgagacaaatacattattaattgtaacatatcccaatgtaagaaaactattatattcctcacatttataggttctcttattttctaaagcttatgtctatatttaatactcgaaatatgtacatattatatatacgtaatcattctcacaagtatagaaatgttttgtaaaatattttattttattttaatttttttaatatttattttgcttaacccgtatctggatggttgtaaattttttaagggaaatttataaaaatactgaaatttgggttaatttttacaaaaatactgtcacacggaatttttttcaaaaata

SEQ ID NO: 165263 - DNA, 626 bp, Cannabis sativa
ctcctctcttgctctcttcaccatcactcttacttcttcctttagtttctcaactcttttgacatatgcttcatcctacacacacaaaaacatatatatatatatatatatataaataaataaatcattgttggtatttttaatttttacatttgtagagtttataggtatatattcatatagtcactactacaaaaaagaaaaatgtcagttttgtaaatgtacttttttttttctatatgcatgggagatataatttatttttcatacaataaattattcaaaatctacaccttttatgtaaaaaagaaaaaaaaaaagaattatatatgacttctataagtacatcaaaacaaagaaaatgcacatatgttcacaacaacaacaacaccaataataattaatcaaaaaaagaaaaacaacaccaataataataataataataataataataagatatttgttaccttgaaaggagaagaaagtgattgtacataatcaaattgccaaagtgggggttgatagtttgctgatcttcgagaactattcttctgattattattattattattattattggtggacattaatgcagttttattatcaataatattattattattatt

SEQ ID NO: 165264 - DNA, 1650 bp, Cannabis sativa
cacatattatactaactcctttataaaatccaaaaacttctttatttatccgttctatagaaaattagtaaataacccgcaccatatttaaatttttttaaagtatataaataaattgtttcttttatttaataactaaataataaaattatgttatcaaatactgttgctcaaacacttcctaattatgttatgaacgtgtttctacttcctattaatacttgtaaagaaatggaaagacttatgtctaaattttggtggcaaacgggttcagcacaaaaaagaaatactagttggatgagctgggagcgtatgtgtaggcataaggttgaaggtgatttgggttttcggagtcttcgtgattttaacttagcttttttggggaaacaagaatggtgtcttcttacacaaccgtcatccctcgtggctcgaatttataaggctcggtattattcacgtgggtctttccttacggctactgttggggagtacccgagcttcatatggagaagcataatggaggctcaaccgttagttttgagtggaattcagcgaagcattggggctggttctacagtgagtattcttcatgatccttggcttaattgtgtggagaatccgtatgttatcacttctcaccttgcactggaaggaagaacagttaatgctttgtttgaagttaataaccaatgttgggatgtggagttgattcgagacattttcaaacctagagatcaacaacttattctctcaattcagttgagttctaactctaaggatgatttttgggcttggaagtttgatacatatggtgtgtacacggtcaagagtgcttgcaaaaggctgggggaattgaaagggtacaataatcatcatatatacaaattagaatcaccaccatctctaccataaccagaagaacgaaaggttgtggtcccaccaacactcagagtccctcggggctcctaaagaaattccactgggccctcagctcttagagcctttctaatcatctcaacataagttgttgcttcatttgttgtaataaccagatcatgtctaatcttggcatttaaaaccgtcaagtatttctccttcttactgaagtctgtgggtactattcttgaggccaatttggctaattgatcaaattttatggtatactctgttattgagatattattaccctgaaccaggttagtaaattattttctctttgcaccgtggactacctcattattgtattaagaattgaacatatcctgaaaactcttcccaggtcattgtagtgacgtcttgggtgagggataccaactcccaccacacgagagcgtcctcttggaactgaaacgtggcacaagtcacttgatcattttcggtgacacccataaagtctaagattctctcgatcactgccagccactgctcgaccttcataacatttggacctcccagaaaagttggaggcgcttgtttttgacatctctcatacaaaggctccatacagttgccagcaacaagttgttatactggcaccgtcgaaaccaaagcggttagcacttgctgtggaggcactataggaggaccctgattaggaccggcaaaacgggtcagacacgatgacacgactcgaaacccgcacgagagtta

SEQ ID NO: 165265 - DNA, 1413 bp, Cannabis sativa
atagcgatactttatatttttttaaaaaaatatgacatatttaaatttcaaaattataaggatgagaactgtttgataggataatgaaattgattcaatattgacccaaaggcggcaatcaattatcaaagagttttatcgtgatataacttaaacattattttatgtgttttacatgtatgcgctcatgcatcatgtttacaatctttccaaaatgatatttattattcaagtataatcattatgttatctttatttatttcagtcatgtctactatgctaaatccactcactgctttactaggacttgaaaaactgaatggttaaaatttcatgaaatggaaatctaatttgaaattgacgatggattgtgaaaatcacaaatttgtcctaagtgaggagcttcctgaggagcctgctgccaatacccgaaaaaatattcaggacaaatatgactctggattcaatccaatatataacaaggctaaatacttcatgcctatcagcatggacgatgttttgtgtaaggtgaataaaaaaatggagaatgcatatgaaataaagaattttttatgccatctctgggcagcagtctaattaaacaagacatgatgatactcatagctacatgaattgtaataggaagaagagggtcccagtaaggactcatgtattgcatatggttgagctaatgcatgaggcagagacacacatggctatcatttgcaaaaggactctagtgagtatgattcttgagtcattatctccttgcttcaaagctttcacaactaaatatgtgatgaacaagctttcaaccatgacgactcaattgttgaacgagttgacaatgattgagaactttaacaaggataaatccaaggaagtaaattacacaatgttgaagaaaaatccatcacttcttttttctctgataagaaaaaggaaatgggacagtaaggacaacatcagtggcaagcccaaacgcaaagacaagaaggcacgtaaatccaagaagaataaggccaagtccaaggataagagggaaaaatgcaagttttccattgtggagtaatggtacacatgaagagaaactataacaattatttcttcgagcttaagaaaggtaaatttgatttatttgttcttgaagctaaattagtggaagatgataaatttttatagaatattgactatggagccactaatcatatttgtacttctatacagatacttgattcatcaagggagctggttgaaggagaggtgaccatgcaggttgggaacagagcacaagtatcgaaaaaatgtgttggccaagtcaggttgaactttaaaagtaaatttttattattgaataatgtttataatattatttcttatagtgtatctatatcgtggtatatatagagcgtt

SEQ ID NO: 165266 - DNA, 1921 bp, Cannabis sativa
tagaggatcaatttccacaatttcccttcaatcaaagctgcccttttgactcaacgtgcatctggtattacatctgctcacacacatgtgcctgcaaatacatattctatgaatatgtattaatattatttagtatttaccaaataaaataataataagttagataattggtcaataaatattctataagatataatgagtttattgatacatgtattagaggtgttgtttatttgtaagagttagtggtatcaggtataatgtgagtactggcccattttctagtgttagtacgtagtggattaataaccctatataaagagcataagcttgtatgaatttgtgtgtgaataataaaacaataaaaatcttttctaatttactttgtcctgtacctattaatataatgtatatgtattaataaactagtaacacattattcttgtttgatagaacttgatataacttaaactagctaattagattgtctaacccacaattaattaaacatactttttattcactgtatggatactagctagaccacgtatttgtgtttgtttaataaaaagaagatatttcatatacattgataagaaatatccaaagtctacctcttttctaataatgtgttgaaaaaaagaaaaaaataaatggatcataatccaaaatgttggtaagatatttatacgaaaaagaagaaataatatccaggtcttttctaatcatggggttcgaacccctattttagctagctagcaaaagttattacgatcacacgaattttccaaggatcaaaatcaattagtagtagccctcatgaaaatgttgttgtatatagtttagttagagaaatcagtggaccaaaaaaataaaaatgaatgtttagaaaacgacacattttaattttatatagcacaaagacgacatggctgcgtgaaaagctcgtgagagccatggctgctgcctttcctatactaaacatataacaatatataaccaatatttttggcactgtgttcttgtttgtgggagcctcttgtctacatgttctcttaattcatatataataataaatatacatataattatattatatacatacatacgttttaaagttaatatcaatatttatatgtataaatattattgcattatgcatggaattggatgatcatcacatctttgtcttgaattaatcaaagattgtgttttgtccgtatattatactccaactttgtacggttcattgtattaagatgtggccaattgataagcggatcttccatccaatgatgattatgataaatcccaattaggatttgtgttttctctaattaattatattaaatcaataattaatactctctgcatatggacgtacgtacgggttttgcaagagatttttatcatgatgtgtatgaatttggttcactaatattaattaagaggttttttttaaaaaaaaagatatgttattattcattttttaaggtgattaacaagagagaagcaaaagagaaaaaagtgtttttaaaattttttaaaatcatcaaaaatctatttttaaaatttactctattttaattattattttaaaatgtacagaaaataaaatggagttatcaaacacaatttttgtttgtattttcaaatttttgattaaaaaaatcaaaaactatttttaaaatagttaccgaaaaagcctagattaatgttgagttttttttgggcatgagaagttgtacatgaatgtacatcaattcaattttcaaaaaagagaaacgaatgtatcagttcaaacttcaaaagtccctcttaattatctttttcttgatgctacactacaaaaaactgttacttttagtgacaattttttagtcacaacataattttttgagtaattagcggctaaaccctc

SEQ ID NO: 165267 - DNA, 1585 bp, Cannabis sativa
  modified_base (1547)..(1552): a, c, t, g, unknown or other
actcatcatagtgagaggaagactactatagttcaattttctttagaaagagaatccaagttcagatcttgattatactttgtaacaggaagaatcaagaattagagatctaaacggaataagtcatgttattctgctgcaacacagtaaggattttttaatcccttatgtatttatttattgttttagaatttttttatttaggatttagattattgtcatataatccacatacatattagtaaatccaaatcttagtaaaataattttacaataactatttctccaagaaatactaattgattggagcaagaacacgtgaggaaaaccctttcgaatttggattggagcaagcaactgatacgaaattgtgtagtaattaagctaaaatctctcatagtctctttatctaccttctaatttttttttttttctaatatatttacccaaataggatcaaaaatcttttttctcatttttaaaagtaagatcaaaatataaattcttatcgtaaatatatattaaaagaatcactataaaccatatacataaaaaaagcaaaaatatttttccatcatattatttaaaaaaatgtttagatagttaaacaaacaaacaaatcatcatatccatacacataataatttatataattgtacttaatacataaaattgcaccataaatatttatttattttttattgttctttctccattccacttgaaaaaaattgatatagcaaaacaataaaaataattcaatattaaaagcattataatttattaagcatataatcactttacaataattttatttgaaataaaatcctttattaaacttatatttaaattttataaatatacataataaatatactaattaatttgttattaaatctatatgaatgtgtataattttaaaatatttatagtaaaatttttatctaagaatactaatttagtcaagaataatctctaatttattataaaaaaaattaagttacaattaattatatattttttaactaacactctttcaccatttactgacactttttctcggtgcctcttcatctcaccattataaccatacatatatatattttatatttatttccatcatcttattattttttttttctttcatgtaaaatttttcttttaaggatcatcaaataattatatccattcactcatactctctcttcatctttatttcattattataactatgcactatatacatagggagaaaacttattgagaatgatagtgataattataagtgaaatataataataacacaataactttgaatataatgataactacatgtgaaatacagtaatgacaataattttaaaatcaaaagatgaattttttatagatttaaatattatcttatatatatatatatctatctatgtgtgagaatatattcttttctaatattttctttgttataacgtttgaagatgtcacttagagtaaatgattataagaaattaaaaaagttcaaaacatatcatttgaatttaaatctaatnnnnnntttgaatttaaatctaattagatataactttat

SEQ ID NO: 165268 - DNA, 1354 bp, Cannabis sativa
tttttttttcatattaattacggcaatcaattttctttttttactttattattgatatgattataattagttaccaccacattaatttgtaaaataattaattcaattaaaagtattttagtggcctactttttatctatatttataagaactaataattcaatttttccatattttttgaaattttccaatattatattttttttttagaatataaaaattctaccccaaataagatagaaagaagagaacatttctatgtctccaaacacacaaaaaaaacatcattgttttcagtgtagatattagataatgacatgtacaaaaaaagcatacatatatggaatagtatgtattactattattttatcttgtttcttctaaaccataaaaatggaattcctatataagaatattcaattccaaatattgcccatttggaactttgtaaatacaaaagactatgctatactatgtggaactaattgtgcttccaatttttgttattattttagattttgtattttgtaaaaattattaattgaattttttattttactaaatcataaattagactatattttttaaaatattattaaatagtatcatgaattgtttttttgtcaaaataaaacttaataataacttaaacatgtgtgctatgacaaaacttgttagggtttctgcatttatttgtgttaataattatttttaagttggctatattaaaaaaattatcgaaaattgagcctagggtcttatatatattattttagaaaatacatgatttattttgttatttaacaaaatagaatgtccaatcaataatttttacgaaatacaaaatttaaaatagtattaaattttataagaagtaaagagttaatcaatactaatttaaactatttgttttgactatttgttttgtaaaaattataatacttttgtttttacattttttaatcacaaaaataaagtaaatttttttgtttttaaaattttaattttgaaaaataaaaatgcgatctataactacttttcttttttaattttaaaaatagaaaataaaaatgtgttctgtaattttctttttatttttatttattgattttatttaagttgggttcgggtccgaatctgggatcggggccaggtccaggtctggggtcgaagtccgggatcgtccaagttctaaggtctaggttagagtcaaagttcaaaatattaattaagaaaaaaaattgtttaaaaaaaatttaagatgtaaatttttttcaaaattttttaaaattttaattcttaattagaaaattaaaaagtgaaaataattttataaaattaaaatatattttta

SEQ ID NO: 165269 - DNA, 2026 bp, Cannabis sativa
  modified_base (650)..(652): a, c, t, g, unknown or other
  modified_base (753)..(757): a, c, t, g, unknown or other
gtgggagtgggagtgggaggaggagtagtaggagagtttaagaggaatgtttgatgagatgaatatatgtatttattagagtaaaaataatacaagtaaaagatacttcatatggggtatgtgagttggtattggtgcaaacttcttaatctcaaaagtgttttcattccaaacacaattttggatgctataaaaaggagaagatttcaggttaataagctttagaactcttttcttaccctttatgctaaagttgataattataaaataatttagtgcaaattatccatacaaaaatataaatttattctctgccaaagattacctggtagcaataccataatttctattagctttctagtttgtgaggttggtgatgattgtcataaccattttttcttttattgttcttttttcaagcatctcatgcgtattactatttggcctgagtcttacctgaattggtttttttgttgttgaatactaatcgagattgcagtctacttcatagagttgttgcagcttcttgtgcgacaacaatttattttatttgatggaatcataatgcttgtatctttgagcaaaaggttttcttagtttctcatgtgaataatttgattagaatcacacttaggtggcatttggttggnnntaatgaaatagaatggaatggaaaggaaacaattttcattccattcctttatttggttgtattttaaagtattggaatggcattccaatggaatgctcttnnnnncattttggtggaatggctattcaattttaaaaagaaaggaatgaccattcaaatgtaacaagaaaaaaaatttaattatttttttatcaattttttttatgtattttaaattttattccattacattcctattcctattcccattcccattcctatttctatattttcattcctcccaaccaaacgcctccttaaagcaagattactacttgttaataggaggaatctctctaagagggaccaacaaatttttgattttgtttgtaatatgtaagtctgtcttttattagtttgtggatgttggtttttaaggcatttgctctgttttgattaatctatttttctcttttaataaaaaaaaaaagatacttaataggggtgttcatcaaaccgtccacatcgcacaaaccgttgcaccacatcacactgcataaaaaaatatagtttgaaatcttttgcggtgcgattgtgatttgtatttttgccaaatcgtgcaatgtagtgcggtttgcggttttgaatttaataattgcggttcagactactctgcactatatattacaaaatttttaattttttcagtaataattttattttttttttaatataagaactaatatatgtaatgaatgtgtatattatatcattatttaaagataatctaatataataatttaatgattagtatatatatgttaggacgttaaaatttaataattttttttgtattgttaaaactttattagatcatcatttttaaatttttattatgatgtttgataatgatgatagtgttaaccgctcaaatggcactacaccatactacctttttcgcagtgtgattttcacagttttaagatctcgtagtgcgattgtagtttgaaaaattacaaaaattgtatgtggtttggtttgaaaaaattgatataacaagcatattatataaaataaaagaataaaggtaaataagaatgtacatataagacctaaaagtacctttgatgcaagaacgattttcgtaaattacaatacagccagagataaaaacaaataaaaacatatctttcaaaattcatgaatatctaattttgctcaattatgcggtagtcacacaattaatgattatatttatcaatttaaataaagtaaaatgaaagaatattataagttagtatgaggttcaggataaacataggaaaattctacaatacaccctttaaaatagatatattgatgcacccttatctgttttagcatccgaaataattt

SEQ ID NO: 165270 - DNA, 2008 bp, Cannabis sativa
tttttctccttcttcatctcaagtttgaaattaaatttctaagagaaatcaaagcaggttcttggtatttatggtgtgaagcttgaggaaaggtagttgaggtagttctcacctttaaacttgttgtaatttctggtttttcttttgttttttttttaactgaaaattggatttctttaggaagtttcatgttttctttgttaatggttggatgggatatataaaatggaaaactaggctttaattgagttttgtacctcttgatttaaaatcaggttgttaagctaagtattggtctttttactctgtaaattatgtgaatttcgagcatgagctttagttgattttcttggaactttgagttttcatttatttgtaatttcaaagctaggattgtatgatttgtgaagctttgagtatgtttaagcatgattggttgttatgatttcatatttggagtgatttagtttgtgtgatggcttgtattatttaaagtgttaagcatgttaattgttgtatgagattcttagaaaatattttaatttggcttagaaagcaattactaaaccaaaagtttggaattggtttggttaagttcggctttgggtaaaaacctatttttttggttttaagcccagtcgtcgcgaccaaattttgggtcgttgcgactaggctcaaacctagaacatggatagcctctacctaggctctggttgcgacgagctttaatttggtcgtgataataattggtagcgactagatggcgacgacagtgtaatctttattattttattttatgcataacttttgactccaaactttgtttggatgttctttatattgttggaaagctatcatttcaagctctattatttggtccagtgttagagtcttatatgtagatatttatgaatgtgattttgagattaactttattgtgtaaaaatccaagtattgtgactagaaatactgacgcttggtcagaatcacctatgaattgggatttctccatatacattaaaaattaggtaagacattgaaataagcacatagagtatagcacggtggcgcaattatataaggtgtgattattttatgaaaccgagggttattaccctaagtatatgttgtcatgaatatgcaatagtatcttatgtgaataattgagtaaagttatgcgagtaagacataactaggttagaatcgataactagaacaaagataaaccctagtaaggccttaaatggaaaagagacgtgtgagcgtaacacgtaggtctatgctatatagacattagttatactgatattattatatatgaaataatgtaatatttagtgtggtggcacagttatatacgcagaggcgtaatgtatgaattatattattacaattgttcatattgtattattttatgtcttgttaggccttggctcacaggttctctatggtgcaggcaagtttaaagcagtgtcgggtcaaccatgagtttgatagcttcaaggatgacttgtacatgttctggccaagctagaccatgagagttgggtccaacttagaattaaattcttttttatgctttactgctcatgtaaatgaaacgtattgcctaacaattatgtctgctttttataatagacatttattttcaatgatcttgaattactattagaagatttgacaagtttgtaatctaaatttttaagggtatccttaattcatgttcatcggacgatcaatgtagctgtacatggatgtgcatgcttttaaaaaaacagtatattatttatctatagtattatatgagtttttttaaaaattagtataatattatttataattattataaataatatattatagaataatgtgtgggatcatagtaacaatcttgaataatatttactattgaattaattttagacgtaatagtgccaaaagtgatatggaagagataaaatattatattttaagatgatgtgtaaatttttaggctaattagtaattt

SEQ ID NO: 165271 - DNA, 1577 bp, Cannabis sativa
tcaccccacaacaaagaataggaatcgaaaccacaatgttttgtgtttggatgattgcagggtttgtgaagggaaggtgaggtcactacattggcagaggcttagaggtagcagtgtgaatcaaatttaacttcacgaatgtagacaaatcagactttttgacccgtcagactaggtcctcacaagaaaaaggcttgtctagttgagcattgtctactgaattggtctcgctaccctcaccatctacctcatgctccaccttggggttaggtagtttgaagtcctcacccatctctttgacctccgtgtttggggtgattcgcagatgagcgagatagccttgggcagataccatggattcactgtcacgcacctctaaggtaaccagttctactaattcttgaaccatcctgtctatctcatccacagatagcgagcccctcgagcccttgctatgggggtctcatccttggacagcgaggttggtataaagttgtcgctctttttagactcatccgcgaaggccccctctccagagtcgtacctctggctgtctgacagatcactcatctgaaagataaaagatcttttcagtgtggtgcaagtacggttttaacaaattaagtgctctcacccgagttataaaattcaaagtaaaaaatcatggaactagtcgtgaatctctagaagtggctaggcgtttcccagtattttaagggtcatgttgttacatgaacattgagtcacggggagacacccaccacatcgagaatctagtcaattctgacaaatgaataaaatgcgagaaaaaagaaaactaaccacatgtctcaagaaatggctgggtgtgtcacagtatcccaaggggcatgcgatggttgcatgaacattaagttaatgtgacactcccaccatacgtgaatattccagaacttcatatgaaaacttgtgaatattcattgagttctttctaaaactcacgaataattaaggagttcttccttaaactcgcgagtatttaagtttcaagcgcgtattttctagaaaaataccacattttgcctaaactatagaaaataatctataagttctctaatttcatgcattttctactcctaaaaacatagaaggcatacgaatactcaagggaaagacaacgatggtagtaaaagtaaattgctaacctcaaaatatagttcatcttgggtaatcttgcaagtgatgaaaccttcagaatcgatcttcgtaggaaagaattcgaaaaaatttcagaagaattttgaaggtttgaaattctaagtaaagagaggagaaagatggatttgggagggaaatgattaagaatcatttcgtatcagggggtttaaatagcggtatcgctcatttattgggatgaagacacgtggcaaaggaatgcctaaggtcttctaatccaacggtcttgagggaacacggcggcacgtacctcaaaaggttttgatgacatggcatctcggagaaataaagtaataattacagtcatcttttcgaaatcctggacaagaaaacaaagagtcaccatctcgtgacaaccactc

SEQ ID NO: 165272 - DNA, 1130 bp, Cannabis sativa
aagaagaagaaagaagactagacaatgaaaatgtctggtttttttttgccatggtagaaaatttgtagtctttccaaatatggaaaacatatatatatatatatatatatatataaaagcacagttgtattataatcaagaatggtgggaaggttagaatatttgtaaagataatagtgacaacttggtattgaagaagaaaaagaaagaaaaaaaaaattatattgttgtttttttttttttttggggggaataaataaatgattttagcatgttgttgagctttgctatttttgaccaacaaataaatttgaaaaaaagaaaaaagaaattaaaagatgataaggttattctcttttctatcattgaaactcaaatatatattttatatggtacctaaccttatttgattgtgttttgtctaatttgggactaaagcttttttttttaattaatatttatatatatttttagcaaataatattttacatatatataaaaatatttttaactaaatttttaaatatttaacttagtcccttagacaaaacatatgtaaattttgtctgttagatttaattaaaattaagtttctagaacatctgcaatgaatggtatagattttggatcaaaaaatgagtcgatgttatatttgacccaaattttataattgtactttaatacactaatggtaaaataaactttattttaatagaaaaatgttaaaaggttagcaaaaatattgaattttattgaaaatatataaaaatcatattaaatatataaataaaaatataaaaggttattaattgcattaatgagtgacaaaaaaataaataaaaatgtgatatttattgtgatttaatatttgactcatgcaagttcaattttataatcattggctaaaaaatgcatatgcactatatttatagcatttcatagagatagtaaacaattaatgaagttatttggatggaagaaatccctcctcatagtaatataaaaaaaataatacttgacaaagcgtgttcattggataacatccgatggattttgattcaaccgatccaatccaattatttattggatgttgaattttgtcatccgatccaatccaatcgaattaagtc

SEQ ID NO: 165273 - DNA, 554 bp, Cannabis sativa
tgcaatgcacgcatacttagttatattttagatatcatgtttcaaatcttttttaccaatataatttatacaaattaacttacaataaaaagaaataaacattacgagaaattatcaactattcattttaaaaaaaagtcttacaaagtaaagagtacaaaactttataattagagaaagtataaatgctatttattattatattcattctaaccattaataaaccagttcaaaattaatgagacaagaggaagaaaaaaattaaacatccaattaaatttcacatcatttttttttccttttccaattcttttttggaatgaaatggtaaaaacatgattatataatacatgcgttcaatgtcattgtaaactaaataaatcaaaattacctaaagcatgtgttatctcctgctcaaatcactttatgaactcacagaaggaattcgtaatctacatataactcgtaggggtgtgcaaaaagtcatccaatccaattataaacgaccgatccaatccaaccgatctaatagaatcggatatccaatcataatt

SEQ ID NO: 165274 - DNA, 945 bp, Cannabis sativa
ttatggcttagggcacaacttagtcatcttcttagtctatgttgacgaaattttggtaacttagaccgaatgccaagttaattactaagcttgttgttgacctgaacaaaagcttttctctcaaagatcttggtcaagttcactattttcttggagttgagatatacacagacaattcagggatgtacttaagccaaacaaagtacatcattgatttactgctagaagttcagatggagggggcaacgtcgtgttcgaatcctgtaagtgccaacacgaaattgtcattaaaagagggtgccattccaggattttactatgtatcgaagcaccataggggcattgcaatacctatctcttactcaactgtatgtttcctttattgtcaataaactaagtcagtttttgcaagcacctactactctgcactgggaagcctgcaaacggttgcttagatacctcaaaggctctattaaaaaagggttatgtctcaagcctgttgctgctccaacacatcatgcctactctgatgcagattgagcaagctgtgtagatgatcgaagatcaactgggggttacttggtgtttctaggaggaaatctaataagccggtctgtcaaaaagcaacaagttgttgcaaggtcaagcactgaaagtgagttttgtgctttggcaaatgttgtagaaaaacttaagtggattcattctcgtcttgctgaacttcaagttcctttagcccattgtcttattatttgggtagacaatcaaagtgccactgcactagctgccaatcctatcatccatggcaggtcaaaacatacactacaccaaaaaccccaatcaataatattttaaaatgccactattactaatatttagtgacattttatattttagtggcatttgtataaattgtaagctataccaatgtgactaaaaatacaa

SEQ ID NO: 165275 - DNA, 563 bp, Cannabis sativa
ttggaaccagcgacgatcatgtctcggaagcaacttcagacgaattcctccagtaacatcataatgcatgtgataacattaagcatatcacaagtatcaccaacgtgaagcaagggagagaagaaagtctgcgaagctacatccagcgcttccacacagaggttaccaaagtagggaaaatgtctaaggatgagctcacgtttgccatagctgcaggagtacatcctggaggcgagttgtggagaaatatgctgaaaagagagttggatggcttagacgacttctacgaaagagcggagaaatacatccgtaggaggaaggaaacagagtcccgaaaggaggcactagtgaatgttcatcagggagctcatcaaatccctacatggtttgttaggcaatactccccatgctgacacattcaagtgagacctcctatctactatccatggaaatcaaacaactgagatactcctcaaagtgaagttctacttgttggattttatgccctaaataaaactcaattaatgtaatctttattatttaaatattaataaagaaacaaa

SEQ ID NO: 165276 - DNA, 2728 bp, Cannabis sativa
  modified_base (2678)..(2703): a, c, t, g, unknown or other
gagagtgaatccttgtatacctgaatcaaagcctcaaaatcaaacaaatggaggttaaaaggacagggatttaggaagcttttggtctcaaagagaggtgaatgatataaataatgggtcattttgatggtttgagagaaataaatgtttgaatatgagatttggaggtttaattttatcacgagaattttcggcgattcaaaatcgtgcggtatactatacttgatgggttaaaactgttgggtatactctatgattttgagcccatgtagattcatattgatatgtactattttaattttatttctatagctattttaaattgatgtgtatgtttaaaactgataagaattctcaattataggtgttagttttaaacactcactcaattttattagtgacatttcttaaaaaaaaattaatttagtagtacaagaaaataatattttaaaggggaaaaaatgggctcttcatataaattcactaggctactaattaaatattattgtaaaattcttaatttgctaatttggattaaatgacaaaattaaatatatttattctcgctcgaatttaatgtgataatttggtgtatttttttggtttgtatatgtaattaattttgagaagattgtattttatcaactatatattaatagttataaataatttttatgtggatgtgcaaatcttccaattaattatcagcattctttttcttagctttctattttgtggctcacatttttgtataattaaggaatcactcattaaaataacgtatttaggaaattctctttcattgtttcttcttctcttcatcttatttcttattctttattttatgggtaaatattattttaaactatgtgttttacaaaaattatcaattagaccttctattttgttaaatgacaaaatggaccctatatttttcaaaataataaaaataagaccctaaactcaatttttaactattttattttttaatataactaactttaagacaatttttaacacgaacatatacattaaatgtaaccaattttatcataatatctctacatcatattattattaagttttattatgataaaaaatcggcttagggttctatttgtacaattttaaaaaatacagggtctattttgtcatttaacaaaacagaaggtccgataacttttacaaaacacagagtccaaaattgtatttacccttattttatattattcataatatattatcagcacaagtctcttgccaaagtaaatagtttttattaaagttcttgagttgttttgagatgatgatgcagtaaatatatatattaatactcatctgactgaaatcatttgaagaataattttatttctctcttttttgttatctatatattatatatgtatatatgttcttattctcatatattatagattttgaaatttcgtactttataattaccaacttattatttaattcatcaattaataaatttggtacataaattggtaatctgtagctacaaaatatgattgtgtaacagtagaatgaataactagtaaagaataaaagtacaaaaacataaaaatacacaagatttttatacgaggtatcaaaatttcatgcaaattgttactagtctacgggaccacgtccagagataagattcttcagatagatctcaaaaatataaagtaattgacttatgcataaatagaatccctcttattatatgacgccagctcgatatattccatcttctcaaatgaatcttactcaaacttcaagtactcgaactgccttcaatttgctttaagagtgtttgtttcctcccaaggtaagacttgaaacattttctttcaaaaatttgaagaaccttctcctgaaggcttgcccttttgttcttattgtttgttgggtttattacagacttaaaatagtaacaaagaaatatacacagagatggagtcgaactcactctcgctctacaaaataaagacactctttcttacaaaataagaatgaaaatacaaagagatgaaagaggtattaaacctagaagccaatatgagtatttatagatgatatactcattgtggatagcacatacacgaactacacacgtccacagcccaaagaaaatttttctaaaagaaatcttcaatcagggaagaaatttttttcttcggtacctatataatcatgagcaataagtaaaagtttcattttatagaaaaggaaacttcccatttgaatttctccattaaatatctaatcaaataacttagaatatcaatataagatcagaataatgtatgaatcttggctggaaagaaatggctctaaaataattaaacttaccatatttgtcttactttttcaaactataaaagttagacactaaatatttcttaaatgaataaattcaattatatatatatgtggaaagtaatatacaactcattcgagatatatgtaattattataaaatatttttatcaattaaatatgtcaaaaatagaattatcactcttcccctttggaactttgattagcaaataaaatagagagtataaaaatactaccattgcatgaaaacctcactaacacataaataaataaactttttaaatggaaaaaattcaacaaagtacaaacaaattgttggaattattttnnnnnnnnnnnnnnnnnnnnnnnnnnatgttgtttaacatcctaatatgaa

SEQ ID NO: 165277 - DNA, 525 bp, Cannabis sativa
attctgatatattaaattagaatgacataaattagtatcaaagctataacaaaagaaatcttgtataaaataaataaagtgaaaatgtgttaaatcttgatatatttattttggtatttaacttttaaaagaatattttaatttattttttttatgatctgcatcttataattatttaggatttttttttttttttgtaaatttacataaaattatatatattttagagagctaaaactcaaatacccaacaaaatatttaaattttatttttagtaatataaatgattagaagttttaagaaacataattataattttaaataactataatatacaaattcataaaaataaactaaaaaatattctaaacataaaacagataaaaaattctactgaaatatttttttaagagtacatcaagtcttattattacaagagcattcttattcagttagtaatattttttaatttttttttttaattatataaaatttagggtaaataccattttggactctctgttt

SEQ ID NO: 165278 - DNA, 2437 bp, Cannabis sativa
aggatttcgtcggagaaaaggagggtacggtcgagttcagagaagttggggactaaagttttggttttggggtttttgggggaagagagggagtggagtttcatggcggagactacatgtttgagtggattggagtttctgagccagaggtctgaccatcttggtggtctctttctaaaaggtgaggatggagtgtttggtttctctttctccgccgtatacgacatcgtttcaggcaatgatgctgtttcttcatcatcttcttctgcaggagctactactctgcaacccattttccaagagtttcttcttctctgcattttcacatggcgatggttaaggttaacacgtggttttttcttcttcttctctctctctctatggtatctgaagattaattctctaagaatatacagtgactttgtggcttaacggcatttggatatgagttctgagaatttgaacattttctaatcagtaaaagaagccgttgagtcgctttttgttttctttctaagcttttttttttttttttttttttgaattcggaccttttttcagccgttagagaggttaaaaacgataatttacttttgtttctttaatttagttttaattatagttttgcctctaaattatactattttctcacattacccctttaatttgaatttactcttaaaaaaaaatatcattttggccattccagtttaggttcattaaagttgaaaataatttttggaaatactacggagtgctgatgcacctttttctacgtttgatatctaaataattttaatttaatattttatatgatgtacacatttttttaataacatttcataaatttttaaaaaatttaaaataatatatacttcaaacaatatatttttatttttattgtaaattaaacaaaaaaatttcaacttcacaaaatgttttaaatttttacaatatatatcatcaaaaataattattattttaaattttatagctatttaaatattaaaaatacaaaaaagtacacaataacttagtaaaagctcattttctgtattaaatcttattgtattctattatattaaatttaattatatatcatagttttatataaaactatattttaatttcttatatatatatttttcaataacatttcataaattttttaaaaaatttaaaataatatatctcaaaataaagttcaaacaatttattactttcttttttatatatgcttatgaaattatacaaaaaaaaaattctaaattttacaaaatatcttaaataattataatatgttattattataaaaaaaaaaacaactattattttaaattttataactatttaaatattaaaaatacaaaaaaaaaattacaccataactcattaaagatttatttgtcgtattgtattatattgatttgatatatatatttatatcatatttttatataaaattatattaaatttatatctaaatgccataaaagtcaatatcacatattgcataaattacaattcaatataatattatacaatataataaagtgtaatatgacgcatcaaacgaactctaagagcatctctaaagagcacaacaactttggtgtcacgctattactaaatttggtgtcaaagttatttctactccaaccacactacaaaaaataaaactaaaaatattacttattattatattaattttgttattaaataaaaataattatagtatttacatttaaatttacacacaataatttaaaaggtatttttacaatacaccccttcaaataaaagagtcactcgtacaaaagactgtttgaattttaattcggcttgttaaatttttttgaattttttcaaaattttgcaagatatcttaaataactataatgtacatgactataaaaaaaaaataaactaaaattctacaatatattacgagtcgactgatgcacccctatctatttcaacatatgagataattttttagtgaatttttttcaagatcgtctacgttgtaattatttaagacatcctgtaaaattttaagaaattaaaaaaaaaaattaacacgccaaaaataggatggaaacaatctatttcacgctcgtataaaataaaagaattttgtgtgcaacaaactgtttgacccctattttcagcgtgttaaattttttaaatttctcaaaattttattaaatgtcttaaatagctataacataaacgaccatacaaaaattaagctaaaaaatcttctcaaatgcaacaaataaaagtgcatcgatggatctattttaagggaatacattgtaaaaataacatttttaatcttataaatacaaataataatattatcaatatccataaatataaattaaataataataataattacaaattgaaaataaaacaataataataaaaaaaa

SEQ ID NO: 165279 - DNA, 664 bp, Cannabis sativa
gacaatgatccgacgaaaaaacctcaagattaagtagttttgaaaaagaaaaaatacttaaccaagagttgctaaccatagctctatccaaccgtgcttcgatccaattagcagagtccctactcttttcccatgtaaacggatggccacacaactccaaatcaatcaaaccacattgttgaaccacctcttggaagccttctataagccacgttgggtatggtaatctcccaagtttctcaccttgagaaagcacattgttaaaatcccccattaaacaccaaggggcagtagaccgcccatgaagagtacgtagaagatcccatgtgttcttctgtaggcttctattaggctccccataaagcccagtgaaccgaaactccctctgcccttcaaaagatattatactatcaatatggttcgtggaaaaagattccaccttaacctcttcttgatgtttccataataaagctaaccctccactccttccttgagcttcaaccacaaaacatccctcaaatcccaaactcctacaaactcgatccaccttcacattattactaagagtctcacacaaaaaaacaacattaggccttttttgaaccacaagttcttttaggaactgaacattccgtggcggcccaagcccacggcagttccaaga

SEQ ID NO: 165280 - DNA, 683 bp, Cannabis sativa
aattagaaaagagtgaaaattttcaacaacaaagagacgatgtagcgccgatatctgggacagaagcaaagagaaagaagtcagagggtttgcattgcatggggttgattatctccaaatgggggttgatctaagagttgtttttgctatatgcaatgttttcgtcattttttttttatgtaattttatcaacattgttatttatatttggcaacagttatttttgtttttaaaaaaattattttatagtatttactaaaattattttgttatttatatttggcaacagtggctaacctaagatttaaattgagtggcgactttaaccattacaccacagattatattatgtttataaatatcattttttttaagagtgactctctctacgtgagtctgcttctattagtggaattgttaattattaaagtaatttttatatgaaaaattcttgtgtggagaagaaagaaaacaaaaataatatgtggcttttaaagtcttgctgatcccaaagatgctcagacttcaatttttgctttagtcagtgtccttttttcaatagtaatttattttttttactggatccatctgaattcatagtaataactttttatttgtatattattttgtctgtactttcacgatgtacggcagccgtcagataagggagttatttgatctga

SEQ ID NO: 165281 - DNA, 1424 bp, Cannabis sativa
tttttaaaaaaataataattatgacggtatatccattgtagtgacaataggtctttggtaaatttttgaaacatttcaaaaaaatttattgtgcccaaattagaaattcaaaataatcactcttttgtattggaaaagataaatatttgtgtaacaaactaattaaattttgattatgacactataagctaataggatattctcaaaattttgtaaggaacatgctactatattacaataagcatattgttatagaaaaaagtgaaaaaaaaaaaattaaatatacttcaattaggggttttcctcttgattagtacttaataatatgtataagtataattatctaaatattaattgttaatgtttgtaaattgtatgatgtatatgtttttatttgttatttatgtgaactcccctaggtagaggataagatgatcatgatttgtgcaaggaataaattgtactatataggtcaaaaatgtactccaaacatggagaaaaaattataatcaaaatttcactttttaaaggacaaagaacattcaaaagagaagaagaaaaataaaggcaaagctttaaaaaggaagttaatggtatatttaccaataattaataatttggcatgatatgtattatatataaatatatggattttgggatgagtgactaaagatgctagcataaatttagattatatattgactgaaaatgcatatattatgtggttaataacaaggtcatgaggtgcgtgtatctataaatttacataaatgactttatataatatatatataaatgagaaagagaattgttattgattattactggtgcactttaaaatgtgcgctaagatcgattagtaattaaattatataggattcgatacttatagtagtagtataataacaattaagaaggcgctagacaccaataatattttcaatatttttctataagataataaagaattttaatcatttttatatttttgatgtccagataattgtattttaaattttttatacgatagtatatattgtataatattgtagttattaattaagatattttgtaaaattttgataatttaaaataatttaacatattaaaaataagattcaaacatctattattcacatacctcttttgtgttataggcatacaaatagggtattacttgaatcatattttttttaattgtaaactattataaatttctcaaaaattatgcaaaatatttaaataattacaatttacatcataatataaaaaaaattaaaattataacaatatatttgaatatcataaccatcctatatatatttacttttcataacaaaatattattaattcgaaattgtttcttttttcttaaaaaaatctctaaattatatattggatagcttgatttcaataaatattat

SEQ ID NO: 165282 - DNA, 1472 bp, Cannabis sativa
ggtgatgtggacattaatgtttgaaacgtgagaagaaggaaaacatttacggaggagttgattgagtgagtagtcctgagtcatatcagtcgacctgggaggggtccctagccctgcgcctaggttgactctgaaacgtccgaagtgggtgtttggatcctgccatgttatttttaactcaccatcccttagtattatatccaagaaaacaagaagaatccatgtttgaggcttggaaactggaaagagatgaaattaaatgccaaagtcaactcgggcaactagggttttcacacagcgcacacgttaacactcccaactagggtttcagttattgggtctgtcttagtaaaaatggctcaaaatttgtacttatagatgaataagaccaatcatgaacatgttaaaggcaccataataagaatcaaaatacttcccttttgaaacactaggttcccgggccacctagtgtgcacccagcgcctaggttgaagcactcactacctcggttgacatatggttcggtacgctgggttctgcttatccaattttggtaacgtcttgagcaaatgattatttttttctatattaaacgagagctatgatatgacttatgacaattcaaatttacactttgatagttaataattttggcaaagtgtaatatcagcaaattagtaataatgggaaagttttgagaatgcccaattttgtggaaaatcgacatctttgagaactagctaacaacttcactaaaactaagtaattaactaagtgatgtcaacatatcaattaagcatcaaaaaatacaactccaagatgtttttcaactcacactgcatccaagttgacgtcagtatttcaacctgggcgttgggtgctaaacaacattcagtaaaattgccataactccgtcaatattgatctgactgatatgattcaacttgatttagaaagtcctttcaatgattcttcaagtcatgtgtcacacccatatcttaattctgaagatttcaggtccaaaatttgtcccaagacttattcaattttttctacaaaaacccaaaaatgatccaacggacagatttgagctcttgaaattgaaaatcatcatcccaagtcattttcaccattagatcattttcattggccaagattaacacaaaaatatttttccatatttgattattagtttaattgaactctttcatattcattttctacaatggatcctaattgtatgttaatgtatggactatgagtttggtattctgtgatcaaaatctacttgaactattctaagaattctttgttgtaactagacctaactcatcaaaccacaacaatatatctattgtatttgcatcttgctcatagtggttttgacaagatcagtctttgaaaagagaaaatatgtcagtatccacttgaaagtaggatcatctgtattcgaacatatggatgtacattca

SEQ ID NO: 165283 - DNA, 1135 bp, Cannabis sativa
atataggaaactataacttacccaaagggcccacagactcctgcataagtttcaaaagagtgccaagtttaagactcaggataagtagcactaaaggagaatcgaactctagaaggcaactaaatgagaaactttatgcatgcaaagcatcctaactattacatcacacactcagtagtagtagcatgtttgttgttgttgtactctccctaaataagtattagatttatataattttgtcattaattttacaattaagagtacaatttgtatgttctcatacattgatacatatataaatcgaatagttccttgtgtgggagggacctcaactggaaaccatcttagggactacctaacttactcctcagtaattttcgagattgatattacaccaaagaaattagaaatataatgtacaccacctgattccattttcacataaaagggcccacacacatgcacctgcataactctcaaaagagcgcgacgagattagtagcatcatagggaatcaaatttcagaagacaactaaatgagagactttatgcaaagcattccaatcactacactacacacttatggtagtggcatgtttgttgttgttgttattatactctttcgtaaataagtattagatattgacaattttgtccattaattttataattaagagtacaatttgtatattctcatacatatataaacccaatgaaaatggcccctttttagtatggctcatatagttagtatgaaagtttaaaggccctcttaatgccgtttcaaggtggtaaggagttgcttaatttccaaaatatattccctaaataatgctatgtattattaagtcattttcttataaaaaattattctattacttcacatgtatccttacctattagattgtggaaaagtttattatttatttatttttctttttttaaaaaaaagaaaaaatataccattgcattactttatttgtagcctaatatttatatattattttattttaatagggattcaattaatattagtaatataattaataagtgaagttgggtttctctaaatttagcaacatataaaatcaatcaaatgaggtttagttactcatatttaaagcaagaaaacaat

SEQ ID NO: 165284 - DNA, 601 bp, Cannabis sativa
acagctataagaaattaacatgtactagaataatattaaagcttatgtatacaaagttttaaattttactgcttatatactttattagcttcaacctattttaattttattttcaatccttatttaattttatattttaccttatagatttgaataattaatattttcatttccaaatttttaacactacttgatcttgtcctttaaaatatacgttttctttttccttaaaatataacacttatataatcatgcccattctgttagatttctttactttaaccgttaaaaattagtaattttacccatgaactttgatcaatattaaattttgtctccttttataaaaaacaattaatttaaaaagtataaaaacaaaaaaaaaacaattatagacatgactcgagtgcacatcttcatctactgagtaagaagaaccgcgaatggaagatatttttgaaaaaaaatgtagctatttagaaaatatgttgaagagatgtgatcaaattgaatgagaagtgtaagattgtatagggaaggaaaatacactgcaaaagtttagatcgtggtcaaataatttcagcggctaagattaaaccac

SEQ ID NO: 165285 - DNA, 1553 bp, Cannabis sativa
  modified_base (1522)..(1528): a, c, t, g, unknown or other
ggatgactgttgattcacgcacctcagctggtctataaaaacccttcatttttattctttgaggtttttacctttagatctcttaggatattcaaagcaagtcaaaatttcaggcaacccagattttcttctactctttcttcattgttgacaagctcgattatacaggtgtttcgcatcagagtccccggctgctccattttcttctatttgtaagttaccaactttaaagactttttctttcccttgcattattttcataactctacttggggatatgttggcatggttgtgttgttggtactttatgtgtggttaggggaactttcccaagtcgtccttagtttttatttttgaggcaacatattccttattaggactagtagattcttcccatttcctcttcttccccacttctgtaccattgttgcttgttatggtgaggtttgcacctgatgcatagcatgtaaaatttctttatttttggatatgcttgctaacggatggggcctcagcgattaggggaccctcattccattttcacttagggtatgatatggggtctaactgctgggataactcttatcttttcagatgagtgacgtcttgagggatcttcataagtagggctttcacgcttacgattaagaaatctttaaacttcactcatcaactagaatgtcaaatcctgaagttgctgcttcttctacttctcaggtagtggtcccacggtaccccgtcgtgccccttaacatggtgatgtagggtcccatcctagtcacagactatgtacaccctgcaattggttgggaagctgaagaattacactcatccatgagttgtgttcaccacttgtcaaccattgtaactggaaatgagatcaagccccaggaccttggagttttccaccatttggcccaggagactaaaacccccaattataactacagagggtttgaggcatggagccaagcacattttatggtcggcgtgatgctcccgcttcaagattactttataaacttcctagtttttgtaggacttgctctatacaaattgatacctcaaggatatcgcctgttgttaggattatttatttttttatgcttcacgtggttgggctgctcccaaccctgttgaaattttaatttttacgaattattttctgtccctaagaagggggaaaatgcaaggatggcttttactccctctaagctcatcttgccaatgagactcctgtcttatttaactttcaaaagaatatcaaggattgtcgtcacagatttttcttctcttccggtttcaaagctttttagcgtcctgaccttttgattgagtggactcagattcctccactgctttggacagctccgactcagctctttctgaaccacactgtcatttctgtaactcttactaaggaggagcttaacgtgggggacttggtcgcgactgccaactactggagggccaaactcattcaaggccactagttagttaataacagaaaataacatggttnnnnnnnaattcatacacaattcagaaattat

SEQ ID NO: 165286 - DNA, 828 bp, Cannabis sativa
agacttggatgaaccttctcgcgaaggttattcttcccttcaaaatttacttcatgtaaaagtaatcgcaaagacacgcaaattcaccaaggaatatgagaacaactatcttttacaaaagaaatactctcttctaaaaatataagaaaataagaagtgaaagagttcaatcttttattgctagtgtaggtgatatttataagaataaatgacacccaaaactgaactcaaacagcctgagtataaagagaaaatattaattagctttcttgcaaaaactcattaaatgacgaaattctgactgaatagatatggaaagtatgcagacgaaatcctaatctatctaataagcattgtgaatctagactccctcaaagtcaagtttatcctcacaaacttttattggacatcatgaatcttagttgcagagattaaagtaaatcatatcagaaaaagaataaaatatatcaaaaacaaagaaataccatatatcgatatagtatttatttcacaataaatcattttattattttcatataaaattacaacctgagtaaggatatacatactcaattaatacaccttaagtcgtactttacaagcaaggaaataatgaagcaataaatgaaaaatattcctaaaaagaaaagttggatttttttcaatgtcaatccgtttaaacagttttagtgcacggttctttagcgaaaaaagaattagatcaattaaaataaaatgaatattaatactttccttaaacatacaaattcaagataaaatattctaaataaaaaaactactgttataaatattaataattatgtggat

SEQ ID NO: 165287 - DNA, 927 bp, Cannabis sativa
tggaatgttgttacgttttgtgactatagaataatctttcataatcatttatcagctgccgtaactgctatttttccatgtataacgtttggccaagtcgcggagatcatagacaatggtgccacttgtaagtgaaaagttaaataataatatatatatatatttatatatatttgaagttgagttagaaatagattttttctttccttttttttttattttgtttttttttttgaatttttatgaaactgtttttctatccttttctatatgtgttcatcttcggttttattgatattcttgtagcaagttaaaaaagaaaaaaaaaggctattttttaaaaataaaaaaataactctctattgtttgtgtttcttctatttattattatgttattgtaaaagcactctttaagaacctatgatataatgtcatttattttttaaaataaaaaagtcttatttttttaatcacaaagtgtgttgaaaaaatgttaaaaatacatttccaacactacatgtgatatattttacgaatagttgtatgcagtagtactatttatttctcttattatttatttgtttatataattttttaattttatttatttatatttttttaaattaatattatgtatttaaactaagtaaaatatataatgaaaaaataaaaaattaatatatgatgtaatgtaataatttaatatgaaatagagaatcagactttcgattatttatttttaagagtgctctaagcttaaattaatatatttatgataagtaatgttcaaagcaactgagatatatttttcttattaacatgatagaaactatgaataaattaaaaaattgtcagattattaatcacaagattataaccgttattagaaatatatatatatatatatatttactcaatttatgtatt

SEQ ID NO: 165288 - DNA, 1056 bp, Cannabis sativa
taacacttcacgttgaaagcacatttatatctacttctacatatagtttaatatacttcatttataacataataaatattggtagacttatattatagtaattataaatttaatatcattatattttcaacaaatataaaaaatacattaattaaatattaaattttatagagaaatgttaagggcaaatccaaaccctagctaccttaactatatatgttggtggaacctattttttaattttttaattattttacttttaaccccattgataaccacgatcactattagtggtggttagtactgaaaattataatacttaatcataccggccaataacaatataacacacaaaaaaaaaaaaaagtgttaaacactaggagctttttcagcatttctcaaaaactaaaacaaatattaggcatgaatcttaattacataatattaaagtcaatgttatatataagacagaattaatatgtttaccggtttcaatatatattttattattggaatgtgaatgtgtcaatgcatgtagtaagtttataaatatgtgccaagagaagtacccaaaaaagctgaaaccaaaacaattaattaaaaagaaataactaatacattttctataagtaattaattaatgggaaccgaaaccagtcttaggcttcccattattaatttttcagttgaacatgtagaattgaaaccgggtacaccggagtggaacacagtaaggagccaagtccgcaaagcagtggaagaatttggttgtttcgaggcacagtttgataaaattccaacaaacattcgaaaggccttatttgatgcagtacaacagctttttgatcttcctttacaaaccaaacaacgaaacgtttcaaagatgtcgtttcatggctatgtgggtcaactcccagctctgcctttgtacgaaagcatgggaattgatgatgccaatattcctcaaaatgttcaaaattttactagtgttttatggcccattaatggaaacccaactttttggtacgtaaatatttaattaattaaattttgtta

SEQ ID NO: 165289 - DNA, 2401 bp, Cannabis sativa
aacaggtgtagatgactgggaagtaacagaatttggtgtattatgtacaggtaaaactggaggatgagcagtagggaaagacacagaaggaacagcagtagatgtaacaacagcagagatggattaaaaaggaaaaacatgttcattgaacaacacatccctagacatgtaaatgcgaccatcattagcaaggcacttgtagcctttttgagtgagactataaccaagaaatgtgcaaggggtagatctatatgccattttatttctattgtatggtctcaggtttggaaaacattgacagccgaaagtcttaagagctgagtaatcaggtttggtatgaaacaaggtttcatgtggggtaaagttgttaagaactttggttggcattctattgatgagatagacagatgttctataggcctcatcccaatatttgagaggcatagatgcatgagctaacaaagttagacccaattcaactatatgcctatgtttgcgttctaccacaccattttgttcatgggaatgaggacatgaaactctatagataataccacaggactcaacaagtgtagtgaaggctctaaattcccctccccaatccgattgtaaggattttatttgtaaattgagttgcaactcaatttgagttttaaacttgataaaggttggtaaagcctcatctttagttctaagcaagtagatccaggtgtacctagaataagcatccacaaagcttatataatatctatatccattggaagagaccatgggagcagggccccataggtctgtgtgtagcatttgtaatggtgctgtgtaaacagtttgggagttgggatatggtaatttgtgatgtttaccaagacagcaggcagtgcaaaaatcaaatgcatttttattaatggaagagatgttacaattggtcataacagattgaacaacattcttagaaggatgccctaacctattatgccaaagattgaaaagagaaaaaggtacattggaattagattgctgacattgtaatgcagcttttgaagatgaggcaccagaatgaatgttggagttggaactgggagaagatgaagattggagaggctggtcaaacttgtaaagtcctttgtcaaccttcccaaccaataaaatcttcatagtagcctgatctttcacaacacaaaaggaagggtgaaactcaaaaaacacagcattatcttttgcaaattgagaaacactcatcagattttttgttatgtcaggtacatgtagaaggttttgtaaaacaagaggttgagaagtgaaaggagaagtaaaggtattatgaccagtatgatgaatgtgcaaacctgagccattccccatgtggatttgatctgaacctggaaaatctaagggagccatcagattggtcagatcaggtgttaggtggttcgtggcacctgaatcgggataccacgactgatcgttaacagtttctggtgtggcaacagatacttgcatctcagctgttgcagcagtgccatggaacgattgaaaagattcaggtcctgtgaacgatttatcaaatcgatagaaacattgtttgacagtgtggccgagtttgtggcacaactgacattgaattttaggagtggacactcctcttccagtacctgtaaatccaccacgaaaaccacctctgggaggacgatgaggattagaaaaagatggatagtgttgtggatagaagttaccatagcctgcttgagaaaaattgccatttccagtagaggaggatggaaaattaggacgataggagccacgaccacctgtaaatgtaccaaactgaagaggagaaaattgttgatagccacctcgagaagcaggaggtcgattttgagcagcaagatttgcctctggttttgatatatcaagatcagcatcagaagtgtcatttcgaatctcttgagccatgagtagagattcaacctcagcaaccgaatactcatcttttcttgttgacaaggatgtaacaaacacagaataatcacgggtgagaccattgaaaatagcttcgatgtggtcctgtgttgaaagattatgaccaatggaggcaagagagtcaacaacatgcttgatcttgagaaggtaatcgttcagattcccagtgagtttcgttcgacgaagttgagttcgaaactgactgactttagctcgattttgagctgagaaatactcctcgagagtggaccaaatttgagcagcactgttgcatcctaccattcgagtgaggattttctccgtcattgatgagagtagccaggatactaacagactgtcttgaacgtcccattccagaaattcttcagagattcgattctctgcttcatcttctgctgttgcaaatttctgaggtgttgct

SEQ ID NO: 165290 - DNA, 1942 bp, Cannabis sativa
  modified_base (372)..(376): a, c, t, g, unknown or other
acatctccaagtagctttccagtgttatgatccacactttgtctgtaccaagtattattattattagtcttggatgatgaagaagaattggagtgcaatgcaaatgtttcattgttgagttggtccttgccataggagaaaatgagttgaccttccaatcctacgtatgagatttgactcaagtgtggggtcatcactagtgtttgaaacaaaattggagccacctgtatatatacacatatatatataaacacaaaaatcttacatagcaaaataaaatggaactattgtaatcaaggttggctctgagttaatttgagttttagaaaaaacaattttttgggccttttttataaaaataaatagtatttnnnnnaattattaaaaaatatatgtatatttaataaataaaaatttatttggacccctaataggagtgggtcctaaacgcgggtctaacacgccttagcttaggtcaattctgtttgtaattgagtacttaattaaatatttatatattttgtaaaagaaattatgaatcgataaattataatgatatgtgcattcaaaatatgtatcgaaatattatattcgatgtaacaattattttaaccaattatatttatttaaattgaaactgttgttttaaaaatagtgtcatatcactagattaagttttgatgcatattttaagtgtatatatcactattcttaataaaataagtatgaattagatgaaaatttatatataaatactaaccttattctcaatgtccgaaaatgagatattagacttaatgagtgtgttattgagaaatgtagccaaattaggtgtagaagaagttgtttgactaaaaatccttgtaatcctctcaatttgggatttgagtcttgaatgtaaattgttggaacttgaatttatatcatcttttaaaccttcaaccatctcataccaacatggtaatagtaaacccacaagtaccaacaatacacttgcctgcatttatttatttatttatttgacaatacattaattataattctctaaactaaaataaataagaaaaaaaatacaataaatataatattatcttgataattaagtttagaaataaatataccaatagtgtgaccacaaaaagtctccgcactactatgggtgatagcttcatcatggggatcttcaagttattgcaattgagaaacaaagatactaataattattaaaaatattattattagcattaaaaatattgaaggtcataagctaaattcagtaattcatgccattgaaaagtgatatacacacaccacactatatataccaaagaaaaaaaaaatgtgtataaacattttaaatagtgttttaattaattatacttcaatgcataataatatattgagatttgaattgatattaaaaaagaaaagaaaaaagattaattaatatcaaaggtactaattttatatattaacctatgaaatgaacatcaaaacgaaaaggaaaaaaaaaaataaacttcttctttcacttattataccaaaacactatataggtgatattcttcttttaaaaaaatatattctttttattgatttttttaaattttttttttttaaaaaaaaaaaaatagcttcttagttcatagacaaaacaatctacagaaataaaaacaaagtaccttcattatcaatcatcatcatcgacccaatatattaaaaacacctaaatcatttaattactaaaataaaattagaaccaagaaagaaagaagtcaatgataatgttgttattatttttacaaaactagcaatatacataacaaaaattcagatccctcgttcacaagaaaaaacaaaaacataaaagagcacaatccaactaattgaagttttaatagaaaagagaaagaaagaattaaactaatataaaaataaaata

SEQ ID NO: 165291 - DNA, 950 bp, Cannabis sativa
actttatacatgatacttatctacatgataatgttatttgagttgtttcttaaagcaatagtttgatcgtattatcgatgtgcacgtaaaaagtgaaagaaattccgcaagagattgcatttaaaatagagaaacgagcactatataacgccaatctatttcatgattcagaatattttaacataatcgatcgaatcaagtaatgtgctttaaatataggcatgctaatatttgttctcctacgtaatattcgtaatttccccgttcgtaatgcatggttcgagtaatatataatcttttttttttttttttgaggataagtagtattcttgattccttgctttattgacattaatgccttattactatcacgaaaaagaaattaaagcattttattgatctgtattgactgaatgaattgtgacagagagattacaggactatatatatagtatatagacaactaacacttacaactaaccaaacactaaaccagcaaagttagttagagagactaaccgactctactgacataaaacagaaaaggaaagaaacaagttacagtattagtggtattaactaacagacagataacaagaatataaatcctaatacccctcaagatggagcatatgtatatcatagatggacatcttggagatatgacttgtgagaatgttggaggacaaaggctttgtaaaagcgtctgctaattgaagagatcccgaaataggaactagtcgaatggttgaatttttgatcttctctcgaacaaaatggcagtccaattcgatatgtttggttcgttcgtgaaatgttgggttgttagcgatgtggattgcctactgattgtcgcaataattgaatgctggatgaggctgtggaatttggaagtcatttaaaagatattgtaaccaggtgacttcacttgtggtagcagctaaagcacg

SEQ ID NO: 165292 - DNA, 649 bp, Cannabis sativa
gttccattgctcattggttttaagaaagcatatcagctaacttcgaattttccttcattgtatcagcgtgggcaaacagaccggacacaaaacaatggaaaaaaagacaaagggcagatgcatataccaaaagaggacatcatgaacatcagtggttgatcttcacataacagccaatgttttttcctaagctccattctcaaccagaccaaataagaagccttttgccacttatagcagcttcgccaatggctaccacacacatcattatcattcaaaatggtgtaactattcaattttgtagatttaaaatatttgttcattttgcttcaaagtataattatagatgagtgtagttaaatttcaattctgcatatttttattataagtataactattatagtttgtatcatgccaaaccaaacttgttagtatcaatgccataatgagaaaggtcctcatcattaaattaattcaatgcggtttactttccatttgtaattatgctcatgaaataatacatgatctgcacgtgaactactcacaaaaaaaaaattataacatacaatatttttatagtatacattttataaataattatattattaagctatgtattataaagaattatatctttatatattaaaag

SEQ ID NO: 165293 - DNA, 1838 bp, Cannabis sativa
caggcaacttttgcaaacacacactcaaccagtgcgtgatgcactatttcagcagcagaattacacaaggggtagatggcgtttacaaggacatgtcgtctttgaagttgggcacatgtaggaagtatacccgaagtagctctccataaaagattactaatctttggaggaattttcaacgaccatagggtcctccaaaaaccagtattgtcatccataatccaagcacctttagcttcctgcagaaacttataggcacttctaactgaatactacccataagtctcaagattccaactccaactatcacttgcacgagcttccacttgaagcagacaactaacagacttgttctcaagagcaagatgcctcgagacaacaaagctattagttttgtgtggaagccaaagatcatcaaggattgaaacattcacaccagttgcaattgttcttaaagcaccatcatggatcagttcttttgcttcaaggatgctttgccaaatgaagctcgaattttctcccaactcagctgaaaacaagttactatgtgcataatacttcgacttataaaccctgctaaccaaagagttatcgttcaccaacagacgccaaaattgcttccccagaagcgccaaattaaaatctctcaagctcttgaaactcaatcctcctgcatgtttatgtcgacacaaccgatcccagctcatccaatttattcctttactatgactagaattcgaatgccaccaaaacttagccataagtctttctaactccttgcaagtatccaaagaaagtagaaaaacattcatggcataattcgacaacgattgtgctattgatttcagtaatacctcctttcccccacgagacaagatacgaccttcccatccttgtattctctttcgaagcttgtctttaagaaaaccaaagatagcattcttattcttcccaaccgaataaggaagacccacataatagccatgttcatcagcctcataaatttccaacatagcacaaatagcatccctcaactcactattagtattattgctataaaacatagaggacttagaaaagtttattctttgacccgaagccacctcataagtgtgcaaaagctcctttatattatgcaaaagcaccataagactgaaacagaccaagaaaaacacgactaggatagccaacaaaacgagagaaaaactacacaaccatgtcaaaggacaagaccaatttagtgtaagtaaataatatgaaaatttcacacgaattcggtccaataatgcacccttagaaatgctttgaaagacccataaacaagagtgtatcgatgcactcttataagacctacgagtattagtaaggtacgtctccaaaaagagtatatcgatgcaccttgtatttgtacgttacatctccaaaaaagagtgcatcaatgcacctttttcgtattttcgatatctagataatttcaattctttttttcgttgtataacacgtatattgtaattatttaatacatcttgtaaaattttgaaaaatttaaaataatttataatataaaaaatatgattcatattgtttattttacacccatatataataaaagagataagtatgcaattgattgtttaaatatttttattggtgcattaaattattttgaatttcttgaaaatttatcgaaagtcttagatctttgatttacactgtcatatacaaatattaagaataaaacaaggaaaatttgaaaaaatatgcacgaaataccttaatatcttattcctaaactaatacatatcaaaattgaaaacctatgaccactttatctaaaa

SEQ ID NO: 165294 - DNA, 2527 bp, Cannabis sativa
cactccctccccgaagggagcgagtcacttaaagatcaattttcaaccagtaaggaccgagagcgggtggaaacacccaaacaacaatttgagaagtgaatttaatcacttctgatagttggatccaccaaactttagcaattggtatgatttaccccatgtcaacgcacaaactccaccagctaggcagagaagagtgggcgacaaggccctgcgtaacttagggctggccatccatggagaagtaccaaactcagggctggccgactattagtgtaccctctcccagggtatagccggataggctctggctaatttgaggttgtaactcaatcaaagaaggctaatcaaccatgcccctacaacaatagatccttctgtgcaagcatagttggattaaatacgagacatgttcaagggcctagctggtccaaaaccatcagaacttgatttagacaggtcaaggggatcagcattctcgacatacatcaatgccttgcccttgcccaaattcaagatggcaacttggaagatgtagaaggagaaagaagatcctgtggtacacctaaagtactttgagatccaaacagatctccaacaatctagatatgtgcgatgtcaaatcttcctagaacatctaggtgaaatagcccaacaatggtatttcaagctagccccaggaaaacttaactcttgggaagaattctctcaagaattttgtattcaattctctactttaagaccaatacctgcccgactggaggatcttgtcaaaataaagcaaagacaagatgaacctttgaaggactacattcaatggttcatggttgaggctgccaaggtcaaaggcctgacagaagaaggccgatatacgaccataattagaggcatcgtaccgctgagtgacttctagaaagatatcaggaggatctcaatgaacaatatggaggagttccttaagtgagttgattgcttcatatagttagaacaagttttttggcaagcccagacaagagggtaggacattaatgaacaaacacaaggccttcatagcgccccaagtattgtccaacatgcgtaccagcacaaaaaatctctgtctattctcaatcaatgagaatgatggaggtaagcacaacaacgacgactctaaccaacataatggccaaagagggaaattcaacgattcccttattccatgaagcctaagtgagaggcatgagaaggatgcatgcttcactcttctaccaaaacttccaaagaaaataatgcccaaatgtcccattaggggaagtcagcaatctgagggcaagccaccatctccgaaggctggcctccatctccaaatgctggcctccatctttgaaggttggccaccatctccgaaggctagcctccatctttgaaggctgccctccatctttgaaggttgtcctcattatacaaaggctggcctccatctcatgtcaagcaccaggtgccagtaatctgcccaaacctttggtggcaggacagttaggggttgtcattggcgaaccccatattataggtgagaccaaaaaagttagggagcgctatgctcgaacactccatcatgagcctaaaagtgactttttggcgagcaaagaaccagactctaagcaaacaaagcttggagagcccacaatctctttctcaaaaggagatcctacccaagtcagttcccacgcaacgtctctctggtcgttactgcataaatggggaatatgactgtggcaagatacatggtggacaataaagcttcttcaacattcttttcaaatcaatatattaaaagatgaggcttcacatcgctgacttggtaccctacatttaagtgataaagggcctccttggccatggcatcgcactcatcagttatatcagatcccttcactgttggagaaaatccaaccaccaaaactctgatggcacagtttgtcataattgacattccctcgacttctaacaccatgataggctgaccagccttatacaacttgaagtcagtaacatcaatttactacccctgcctaaaattccaaacaatgcaggggttaggatgttgagagaaaacaaacaatctacccatcactgttataacttgcccttgtccaaagccaagaaaaagaagatgaacccactagatcaggagcctacaaccatcatgacagacttaggcctgtactgctacaaagtcacgccccttagggctaaagaatgccagggccatacatcagaggcttgtgaacgaactgttcaatgatcttatctgccgcaacatggaggtgtgtgtggatgacatacttgtcaagtccaaaaaggctaggggcatatggagaacctagacaaatgctttaaagtcttctatagttacaacatgaatctcaaacccagacaggatcaaagccctttcggatatgaagttgccgaaaacaatcaaggaagtacaaagccaaacagaatgcattgctgcactaagaaaatttgtgtccaagtctacaaacaa

SEQ ID NO: 165295 - DNA, 807 bp, Cannabis sativa
ggcgttaataattcttagactacgagtcagttgtaatggctccttaggcaaatattttgatgatatagtatgtgtttacatataaatttttgtagaagttcagctagtagaaatttttttcaccctttgtacataaaaaatgagagtatttatagacttaagtgtgggtaagtacattccctttacccacctaggattttgtactacaatccattgtaagggtaggaaaatacgtcttcaaatctgattgtctggtcttgaagaaccttcttgatcatgcagtgtgcagggatggtgagtagtgtcgtttgggttagggacatgtgtcgcccaaaggtttctcctttatgaattaccctctagaagagccattaggaaaaaaggtgtgtccagaggtttgtacgcgcattaccacggcctgacacagggaaaaagatttgattttatgtcagaaaaagtgtatttccatgtaaatctgaggtggccatctgcatttgagtaggagtcgtcgtctacgattcaaagagtccttatctggatgtcaggtagtcaaattgttgttccaggacttctcggagtcgggggacgagtattatcctttcgcgtccaggagacgctaattgggtcagccacagctcttcgcatcaagcttttattaatcccctcccaaattaacgggacatttccgcgaggaattgtgatgatcatcattgttaattcgagaggttaacaaatttttgcttctaattgtgccacatgtctcctatttaaaaacatggataacatttacccccaagcttttgttgg

SEQ ID NO: 165296 - DNA, 770 bp, Cannabis sativa
gtcattcaaaatgccctcccagtcgccacggctttgcacaaacagaaagtcattgattcagccttatgtacacggtgtaaatctgcatggaagtcgattggacatgctttattctcttgtaaatttgccaagtctgtttggaagaacactaagtttcaaattgatacacaccatgctatgggtatgtttaatggggattacctaatacacttggcttcaacaatggataaggagaattttgaagcactaatttgtgtaatgtggagcatttggaatgatagaaacaagtttctccatggtggaaaacaaagagattcctttacacttgcatcttataccttgaattacatagagcaatatcgaagtgcaaagcgaatttcctgcacaaaattgcagcagccacactagaagatcaatcacattgctactcctacaagtcggtctacacaccagcagggttttcaaggacaatgccccactacagatcatccacatgggagccaagttcctgctcaccagacccgactaaatgctatcaccagctccagcaacctgatcttaacatgcggcaccagtcgaccatctccactgccaatgacaatgttccttttcaacaggctggagatgatatagtatggaagccccctcctatgaacaagcttaaaatgaatgtggatgctgcaacaaattccaacactcggacattaggaattggtgcagtggtacgcaattccaaaggagaagtcatggctgcactttccaaaaaagtt

SEQ ID NO: 165297 - DNA, 1530 bp, Cannabis sativa
gttccataatgtagtcatccttttaatttcatattttctacactaatatattgtctcttctcatattgtcaagtattcctaaatgtaacatattaatggtcgataataccgaaataagtaatggaacaaattttcagaataagttctctaagttgactcgctgaacaagtctcgttttttaaaaagttttgctgtagtgccaaagtgtgcacaataaattatcaaccaagctatccccgagataaaacaattcaactatcaaaacccttctgcatcgaaaggagtccttcacttacaccccacatttgctcttagaaaaatatttttgggaagagagatgtgggaaaattacaatttatgtgcagaatcaaatcaattaaaacttaattaacaaataattaacaatgacaagattaacaatccacaaacaataattgaagataaaaacaaggatgagcaaagcaatcaaaccagaaacgattaaaacaataaaattaacaccaaaatatatattagttcaagtcctctagatcgatgtgatcaatgaatttacttcagttctgaaacatcaccaaaatcttctttattgattgagcaagaacaaggtacaatatagtcgagatagattctcttttggattctctcgaagtgtttttctctcacactcttacccaagaatcttcttcatctgcagaagatttttcatacaaatctcaaacacaatctctctattttctctctacctctctctctctctctacctctcaatctctctcttcgatctcaatcttcaactatgaagtcaccttaaaaacacgtcacacctccaaaatgataagtgttggtgttatttatagatagggatattaatcccaaagtcggtggctgaaaacgataagttgttaagttagttacgacataacgaacttaacaaactccttgtagaaatatctccacgtcatctcaagttaaagcgctttcggataagttgtatgcttcttggaggatagaccgaagcgtactctaaagggacaacctggataggattagtgacagttggagtcgactattcgagactccctttcaggagggaacaactagccatccggaactcctttccaaaggaaaactagctttccctataggctccttccggatggacaagttagatttctaagaatgcccttctggatgtcatctaactttctataaacgaataacttccgaagtagataggctagacttccggaacttctttccgaacgatatctagctttccacgagacttctttcgtagatcttctaatttgaaggaactataacactaatttcacctagtttcttcaaatcaaaatatgatggcaatgaagaaagaatgcagccgtatctcagtatactaacttctgacaagtaatattgcttcaacttgtttgctgtttagaccttagtcccaacatcagtaggattatcttctgatctcaccttctctatataatcaatccttcttctatcttttctctaatctagtag

SEQ ID NO: 165298 - DNA, 896 bp, Cannabis sativa
tttgtttggaattaacaatactaaataaggaaaagaagaaagaaatgtaatgtaatgtcactggtagaataaggcatgtctccaaagctctatcgtagtcctcattggacaatgaggaaccaaggcagcttactaactagtaactacaacattgataacgttttctttagcaagtttttctccaaatgatataatgtatatggccaatcttttggaaaattgccaagctttttaaccgttttagccttggctttaataagtacagtttattgatatgattaattatttttaataaataagccattaataatatgaaacgtcatgaatgcataaatattcacttatatttcacatgaaacaatactagttatcttcaatcttgtgtacacttctttaaaactgttaaaattaatagaaaattcaaaagttttgttaaatgcacaacaaaattcaaaggttccgttaattgctcaacaatttcgtcttatagacatttattataagggtataagacacgtgatgacaataacaaatgtaggagcacaattttcataacatgcttagagcaatctcaacaacctctaaaaaaacatataaaatacagatcaggttgttgaaaagctcggtaaacatctaaaaacatgaaccacctaaaatctcttatttgttatttaactatttactctattattatttttttaaaactctaaaaatatttagttgtcgaaaaactcgataaacaagcggatttaagaatacaattcttttcgatgtcattgttataattaacatttaatgctagctgaaaaaaaaaaaactaacaatgttatattaatataaaaataaaatattatagtgaaagtgaaatagaggtgtgattcttaccctatgttcca

SEQ ID NO: 165299 - DNA, 1305 bp, Cannabis sativa
tcaccctagcaataagattgtctctcaattagcttttattttacctggttgtactaaaatttctaaatcaaataaagctgaatttttgctaacagaatgttggttttgggggttttaccgccaaaatttgagttttagggattaattacaagtaaaataaaattattagtggttttgccgcaattaacccataaaaatataaaaatgacaaaaaatggacatttttataaaattccctaataattaatattaataataacaacaaactaacttaagtaattaacatgaggagattatttgtcaattacattgagttcacaatactcttcgagttgaatgccctagtagcactagtactctagtacctctaaaagtttggaaccaaaattttaccttttattttaaatgagaattgctaaaggacaccagtaattggtgtctaatattttttttagtgttatgccgctattagtataattaagttgtgggtcttatataacttaaaaaaataacttttaaagaatattattaaccaatcatagagtaccacttatagtgctccataacaatgctcattttaaattaatgattcttaagtttttaaaagaaaaatatgcatttggtctcttcaaatatatatatatattttttaaattctttaccccattgtatttaacttagaatctaccatcaatcttctactatttcaactttttgtattatcatcgcacctcaaaatatatgtcataatatttttttattattttatttttgttatatatattgaaacaaggaagaaaaaataaaaattttaacaaccactaaacaacacacattactaaacagcaacccgaacgaatcaaagactattatttaaaatagccattacattttttccctgtagatgtaaacttcgacaaagttacaaaattgaactctagccttgaaacaaagtttaatctacttacttagcaacatgctccttcaaaaatacaattattgcaggtgcaccatatgaaatagacaacaaattaatacaataactgtcgatgataacgaagcagcttgtaagtgtcatgtttttgtgtagcaaattaggtaaatactcttgttcagtttttctgcttcaagatttgtttttctaacatcttttctgtggttagttgcatctgatctcgctaaatctatcttagtgccatgtcagctttctcgtgtttgttagaatatgccagttgtacttagctggttggttagttagtcagtttttattatcttcaggatatatattctgttgtgtctgttttg

SEQ ID NO: 165300 - DNA, 1359 bp, Cannabis sativa
cgaccttatgtgactcacaccaatcgacgttgggacggcctgtaacgccggcggcgttcaaaacatgagtgggtttaacggaaccgatatcagcttcgatcgcagctcggtcctcgaggcggccagaaccgtactcgaatgtgatcccttgctctttacagatcttaccgaggaggccaccaatccagccggtacggccgtagatcaagaacttgattggcttatcttgaccgtccacagctggaaaccccatcgatcgccgagggtgagtgaggttcagacagttcgagcaagagaagtggaaaatgtgggcgagatttgagatttggatctgaatttatttatcacttatttataactgaggaggacaaaatctgatacatgtggattcattccaactgccctgggtttctcatcattatgccacgtgtcatttcatttcattgattatgttcttacgtaaaataccataaacattttcaccttaattctcatttattaagaaatatttatgtaatgcatatatacattcttttgtaaccttttttatgatttattatgttactgtctgaaacaagaaattataatattgattatttacgtatgtcggtgatggcgttttgaattttgagttaagctgtaaatatgattttttttattttgacacgaaatcggcatgaaagaatgattacataaggagggaagatttatatgggagggtaaattataaagaaaaaaaaaattataggaggcaaattaatgataatcataaatacttttgtttttcacacataataaatacatatcaaaacataacaaaaataaaattatatgtgattttttttatatattaaattaagcatataagttataaacttataacagcataatctataggaattattacattgaaaatataaattgacactttatttacaaaaatatttccataaggtgtggacaatatttataccttttatttgattttaattaccaaaatactaccttacactatcacttacacaattagacgatagttggagagtggttgttgcgtagttgcgcagtaattgcatcaaacaaagttttaatcagacgaaataactattagcaaaatatttatgcaactgttgtgaaacattaaaaatcagaacagtatttctacgtacgtaactctatctacatgtctttttatgatttaatatgaacaaattcaacattagaaatttgggaaaataaaaaaacaaaaatacaccacaataaacattttactatagtattgatgtaattttttttggataatacttgagttggattgtttgggaactccagttcaactttttgagatctgcctttcat

SEQ ID NO: 165301 - DNA, 1895 bp, Cannabis sativa
aaagaaagatgaaatagtaagtatgatacgaaggatatatacattttaaatattttattgaaattttcttttaaaaaattgaaagttgtaatttatatatttttaaagagtagtgtgtaatataccttgaaactcaaaatccaacctccaaataatgttcccctattccacataggagagtcattcctccaaaaatattgtctgcattattctacagcaaaaattaataaaatattatttgtatatctttcaaatttatgcattcataaaataaaataagaaagaaaatagtttataccatttcataaagtacataacctgctttaggtccccaaaatgaataggcacctaatacaaaagtataaaatataagtcctgaaaaaaaatatatttaactatattagattgagtaattaatttaataatttaatactaaataatttcaaaataaaatacttacccaaattatttaatagaaagttcttattaaatatcaatttcatatcttgaaaaattctaacaactttcaatctctcaaaaaatgatatagtaaattaatgatagagttataatgcataaattaaataatatatagttaaaataataataatatattgaatcaaaaaatatatcttagaaagtaatcatacataatttgagcaatgaaatttttattttctttcttgtgtgtcgtcctcgtaatagcaaatattcatatctcttggaccttataagtctataagcaaattaggttagtcaaaaaatacaatacatgataaaagacactaagtagtgttcaaacactatgtcgtgttattattaatataattaagttaagttcacgttatttcatttaataattattgtatacattataattaaattatatgacactaaaaaaaagtttataaacaaattattataatgatacattaaagattatataatgaaaaccattagaaccaaacatatatatagtgaaacattataatttacaaacataaattaataataagaaataaaaaaaaatacatttatcagtagacttaaaatgaatagaggaaatataaaaagttataatattagaaatgcatatccccacttcaaatactttccaacctaaatatattacacacagaatatgaaatattacatttataataataatatgagaaaacaaaatcaatttttatataccaaaaataattaaattatccaaaataatagaaataatgttactcacaagtcctccgtaaatataaccaaatgtaaagcctggtgttgtacaacaataatatattaaaatccatattgctttctgatatatttaaacattaaaaattaatatgtaaatatatataaatgaaatatgagagatttaaaaaaaattgagataagaaaccttcaaatgttgtgcgatatcggtaattatgggagctccaagaattatgagtggaccttgtccaacaccagtcaatctatttcgtagaaagctatttagtgaaacttaatttaaaattaaatatgcatacaaaattattacaattacaaatatttatatatttgtatgtatacatatgaaatttctttaataatatcattttcactctttgtaagagagttttctattatggctataatagacaacttagttactttcagtacgttctatcaaaaaaagctttaattatttttagaaaattatgaataattcgtgttattaataaaatttaaaatatatagtcatttgctcacatatataaaaatatatagaaaaaaaatatatataaatatttaaattttactttggatattttatatctttattctaaatattggaacatcaatttttagtttatttttggattaacttaagaacatatttaaatcattaa

SEQ ID NO: 165302 - DNA, 869 bp, Cannabis sativa
attattaccttcaaaggtacaggaagtggcaaattagctccttggcatagactgttggcccactgtatttgtaaaatgagaaaaaatatatgaaattaaaaaattaaaaaatcgctagaagaaggggtcgaacctccgaccttgtggttaacagccacacgctctaaccatctgagctattccagcttcttatttgtgttattcattttaataataaatagtctactcaataataattatgtatttttaattttaatttaattttattttattaaatgcaagtaaataagtgacgacccacctgaaagagcagaagttcaaacctctggaaatcggtgtcggtgggcaatttcatggttcccaaagagactccatcttcagggtcgttgttttgagtcgatgaagccttggggaccatcttcttcgttaggttgtaggttcggcgggactgttcgctgagcttcaagaacgaatttttgttttcccaattgaagaataccaatggctgaggaagaggacgagagagctgaggatgagaatccacacgtgcagagtacagcagtgacttcacggctgcaatggccatggctacactgcttcactacgtacgcagattgggatttaggcttcaaaattatttatttctcttaatggaaaatggctggctacaaaacgaagctcataatttaaacggataggatagactttctctctctctctctctctctctctctctctctctatttaaaataaataaattaatttaaatttagattaattttttttttaggtaattactcctgttgactgaggttttcggcaaccaataaaatattataagattagagagctgtaagaaaattagagaa

SEQ ID NO: 165303 - DNA, 675 bp, Cannabis sativa
cctgccagcccgacgacaaccaaatctccttgtccaaaccaaagaaacgaaacaagcacaaaacaactcagaaaataatagaatcacaccatgtcacaagacaagacaatcagacgaacgcggctgtcgaacgaacaccaacgagcagaagacgaagatctcctggaaccatagaagacggcggcctcctggaaccctaggagacggcgccctccttgaacctagcagacgcgtacagtggaaccctaccagacgttgaacttatgtagataaaatcttaaaaactataataatgtttaaaattcgtatttttttaattattagtattattaattatattatttgaatatacatcataataataataataattttaaacaataattaataatattttttttaattatttattgtattatttttaaataaaatataaaatcataaaactacacgtaactttttgctagtgaatatatatggacaaggcacgtatgtacatagacattgaagaagtgcactatctttgggtatggtttaactttgttgcctgaatgccttaaattaatttatcactgttgtttacccaaattttgacgacgatgacgtgtcaagaatagcaccacgtggcacaaaaatactgggactaaattaatgaagaaggagtaaagtcatgac

SEQ ID NO: 165304 - DNA, 1152 bp, Cannabis sativa
agccatttaggatgtttaagagcagttgctgcagttctaggctcagaaggaaggagtgttgttgtcaagggatatcttgtggccaaatgagcatatggcttcacaattccattaagaggccttattctcatggcatgaatcctggtggtagtgttggtacctatactttttggggcaacagtaggtgtaatgggaggttgtggagggggtatagggagttgttgattttgaggttgagtagatattgaagggtttatgataggttgaggtgtaggatcatgttcagtgttggtttgacttgtcaatgaactagaggtgtgttgtttgtcggaactggaacattgggtttaggtgagtgtggttgttggtcatgtggtgggggaggttgatttatgacaggggatggagaaggaacatgttcaggttgttgtctatatggttcagtacgttgtttggtgagagtggttgtttatttagggttcaggttgtgattgagtggatatattcctgtttattggcatttccacgatccaatgcacgaccataggaacaagaattcccatttcttgattgttggaatgcaaaattagcttgcagcttcaaggaaagatctgtaatagaattgtgatgctcgagacgtgttttgtgtgagagaagaagagcttgcacttcttcaaatgataacagatcactacaggatgtgattcttaagacaactgagtcaaactctggacccaaaccattgagaagttgcaagactatatcttgattggtaactggtgaaccaacaattgataatgcattaacgatcgcttgagttttatcaacatatagtcagagatcgaggggttggatttttgaagatgagaaaattggcctttcagctgaaggagtcaagcttttgtttggctggaaaacctctgttcaagtgcatgtgtaataccctgataagccttatggtgaataattagagttttatatatattatgggctaattaagtaatgagtgggattatgatcttactaatctattgcagcataaattttaattttattataaggagataaataagcataatttattaattacagagatttatatagtgtatgtgaatataatatgagttgtttgtgaaataataatattttaag

SEQ ID NO: 165305 - DNA, 1475 bp, Cannabis sativa
attaatattgagtgtaatatggcacaaagggttttatttatgaggtaaaagacttgacgtgcaattaaaatcttatttaattaatgtttaaagtctagcaaatggtaaatagcaatagtataactttatctaatttcattatgattcctcaaattaattgcattatgcaatcacgcaaggtttatacaggccaagcatagcatttgtataaaaaaacttatttttcttttttacggtttttgtttttcacgtattttttttagagaaacgttgttttaaacacattattttgttcctagtagcaacgtaaaaataaaattaattttttaaaaaataacacattgtatttttataaaaaaaaattaatatccgtaaaaaggtaaatattataaatccgtaaaaatataaattttttattattttttggaaatttatgaagtaatctctaaaaaaaaattgtagtttctcaaagtgttattatcttcatatacatattttctataaaaattgactgatgtttatatatgaaatttaaaaaagagttttggtatgaagacactgtatcgacttctgacataagctttggagcttggagcttgaaggtgccgccgaaaatagctaacgtgctgtggcgtgcttgctctgagtgtctccccacattggtacaacttcgtgttaagagagtggttatttgtaccctatgcccgttatgccgtgaatcagaggaaataactctgcattgcttggtcacttgcagggcggttcaagtctattggaactgtgtaggaattggcacaactccaacacctggtgcatcactacttttcaagcagtaagttcggagcataaaggtattgtggctgctgtttgttaggctatatatggggagcccgaaataatctcgtttggaaaaataaacaatttaacctaggtaacattgttgtgttttctaagaagtctcttgatcaatggaagaatgctagaaaatccaacatggatgcatcatggtctgaatatcagacaggtgatgggagagagcattggacaccaccaaatgtcaatagtatcaagattaacgtggacgcgacattgttcgagggcagtcaaagttatggcattggcctcgtggcgcgagattctaatgggatgcttattgagggcaaaacttcattttcccatagcatggttgaaccatctcttgctaaagttataggcatcaaagaggttctcagctgaatcaaagaaaggcaatggcaaaatgtttgtctggagtctgattgtccatgcgtggttcaagctctacggagttcagtgaaaataatttctttgtccggtttagttattcatactgtagatctttgtttgattctattggtactgtttctgtcttttttgttaaacgatttgttaatttaatagtccatatataattttgcaaaagctgttattttattttctgatcgtcgttttagttt

SEQ ID NO: 165306 - DNA, 1146 bp, Cannabis sativa
aaccccctttttgtctttctagttagtttaataagttttggattcacaatcacaattctcaaaaagttcattaataaactctatcttcttgccacgtgttccacaaaacaagagtattgtatgatgtagtagtagagattggttttattgatatcctttcttgcttgggtcgggtttaaaatccacctacaacctcttctttaaagggatttgcttgaccattaaggttaaaacttactatggtgacacctttattgcgaattcttgaagggatatcataactaacacataatctttgaaattatcaaaaagatcaaaagaatagtgaaagaatctccacgctatcccctttaatttgttaattaaagagaaaggagcatagactatagacgcatgttagagagcctcattaattataattagccccctattaattaatgaacattgctataacaatattctatcaaaacgttattattttaaaaagagaggaaatgagatgagatgagaagagaagaagagtccaaaagaaggagcggcggcagcatgaccatgtgccttatttattcttactgatttataaccgtttttgtccgtttttttcgaatctgggtctgctctaatcaatacgacaaacttcaatggaaactccactgtttttgagctatgccattggctagtctctttcacttttcacattacatctctccataaccaatacaaactcatctcatgtggctcaaccaacccaactatccaatttttattaatttttaaatgaaattttcaaatttagcaaactcttttaattataaataattaaaagaagcacttagttggataaagaggcataacaagtcaaatgtcattttagaaacaaattgcattttagttgtttaagatattcttagttcggcatttctatttttagtctatttgttcaagtttgtcaatttattttatcttctttaagtaatatttttattggtcatgttaaacgatctgctaacaaagccgcgcactgtatggcacgtggtgcttgttattggtcaagtcgtcgttttactgagagcgatgctcccgttgctcttcaggcatttgtattagcggatgtttctatctaataaaaattattttcattcaaaa

SEQ ID NO: 165307 - DNA, 562 bp, Cannabis sativa
atgtttggtaggagtataatttttcgtttcaccagtgtctattttatatgatgttgttcattttaattatagaatgcattccataagtttttttaaaaaattgaataatctattttacttctatttttttttaaaaaaaaaatattaaataatttatactgtaaaaaaagttgaatttgtttaagtatggtctgaggactatgctgaaaagcgatagtctgagtgactgaagttgaggaatggtttatggttgttgtttgaattattagctacgagaggtttttttgggaccgttaaggatattgtgaacatgactgacgagtaggctgggagtagatccaatggatgaatgaaaggaaaatgatgaggttgctactaacttttgtcaaaaattactggtaagaaggcttaattcacgacgcgagataatgaaaagttatttataataatatttggaaggatgtggaaggggatcatagggtggagtgcatatagttgaagagaaaggtgagccatcatatgtgggggtgcattttagattttactacttgaatggatgcta

SEQ ID NO: 165308 - DNA, 3007 bp, Cannabis sativa
ggaggtcacccaacgaggacggtcgtcacccccctcaagttggatccagggggtcacctaacgaggatagttgttacccccctcaagttggatcccggggggtcacctaagttggatcccgggaggtcacccaacgaggacgattgtcaccccctcaagttgggtcccgggaggtcacccaacgaggatagttgtcacccccctcaagttgggtcccgggaggtcacccaacgaggagggttgtcacccccctcaagttggctaccaagggggtcacccaacgatgatggttgtcacccccctcaacgagggtcccaggggtatttcccccaagtatgggctccatccccaaaggtggttgacgaccatgtcacacccataagggaccctcgtcgtcagtagctccttcaaatgttcaaatcccacgaaaaaggctcaaaaaaggctcaaagatagttgtcaacccatgggatattatcataaaaattagactttaactacctcaaaaatttaaggggacggttgaagtggctctgcgttggttgcgtctcttgaagcgagaagcaccaaccccctcccttatataaggggtcatccatgacctaggagggggtccgcattcttgaacacttagaaaaataaacacttttatcattctttgcaatcaagagcctgttcttgacttttacaactcagatcaataaaacacaagaaaagtaggctattaccgacatcaggggtcgaacctctttaaattcttgtgtcttttatttacatttattgcaatttctggtgttattaacagcatttattattgtaattttggtttaaatctcatttattacaactcgcgtcaattggctaaaaatccaatcaacacaatcattttctcgaaaaatgttctaggcattttttccgtcataaaaaataacgaagatactagaaaactcaggaggaaaaccaaaaatccaagggcttggaaactgagcccaacacccaaattgacaatcaacctggtgcattggttttgatcactcaaatgtcaattctgctctaggcattctctctggaatggtcatgaacagggtagaagacctcaccctcaagttctacaaccttagaagtatcaaaatgacatcatgaaagctttgaaataagaacccaacacccaggttgacaaatggcctagtgctgggttctgcttatcctattctgattccgtcttgtccgtccatctactttgtcacaataattgagtcatgaagtcaaaaaaggaaaattcataactttgcatttcttatttccaacatggtaaactacttagaaatgggcagttttgagtctcccatattcgtagaacaacaacatctccaagatttggtaaccaactttgccataacataaaaatggactaagtgatgtcaaaatgtcactttggcatcaaaaaatacatcgacgttttgtgtcaacttgggcagtgggcccagaataaccttcagtaaaatggccataactcactaaatattaatctgattgatgtgattgaactcgtgtgtcaaagttatttaatgatatatcaagtcatgtctaacactttaattgtatttctgaagttatcgactctaaatttcacacataagggagttataaatataaggcacaacttacctaaagcatgtcccgccgtcgcgactcagtctctaaaaattgacgatcaatctcagaagttaatttttaccatttgattataatctatgatcaaaaatagccaatttgtatgtttttttcttcatatttttggattattttattcctattaggggtccacatctgatgggtgttctgggtttttgggttcgagtttttcgagtttgggttttcaaatcttggaactgaacccacctgtatgaagaccagattttttgagttttaggttcaggttggtcgggttccgggtgggttggggtcaagtttcaggttaggcttggtttttttttttttttttgttgaaaaacatcacttttttaacatttttgcataaaagtacataaaattttaacaaagaaatactcctattcctattccttattaactacttataaacttattacattttctaagaaaagttcatagtcaaaactcaaagtctaaaaaataaagtccatacatataacatagttcaaagtccaaacaaaacacaattcataccatagtccataataggttagggcaaaaaaatatatatataaaaattagtaatcgagttttaagtgggtttcgggttttgagttttaaaaattcttaaacccaaacccagcccggtgccgaaccgagttacacccgaatctgaccccttattttttaaacccattttttagggttttccaagtttcgggctgggtgggttttttgagtttttaggtataaatgtgatgccctaattcctattttcaaggacctccttcacctataaaaggagagctcctctagtttatttttcatattcagaaaagtacctgtaaggttagagcatctctctctctttaaaaatagccattttcctataattccatctcgtgagaataaagacttgaaatagacgtagctccattaccatcacgatacacggagtgagctactataaattgtcatgtctctctatttatacttaacatatatttcattcttgtcaatccagtgagcaagtgtggcttggaaatctttgtccaaatttttgagtcaacacttataatttaataaattgaaataatgaaattcataattttaaattagatatagttaaattatcattttattaataaataaaatgacaaacaaacaataaatttcgaaaattatgtaacttaattagaaatatctcgaattataagcattttttaaatcgagtgagttggcaaaataggctttatgaaaacttttattaggaaaatgacttttcaaatattttaattagcaaaatagccttcttttaaaattaatataataa

SEQ ID NO: 165309 - DNA, 527 bp, Cannabis sativa
tcctgaaagacttcaacatcaacaacaagatgccttcaacccttttttgtgataataatgcagccatacatatttcagagaatcccgtctaccatgacagaaccaaacacgtagaaatcgattgtgacatcgtccaagaaaagatcaacaatggttccgtaaaaatgaaccatgttctttccaaagccaaccttgcagatatactaacgaaaccactctttcctgcttcatttagagacattttgtccacgatgggtgttcgagatctctaaactccatcttgaaggagcctcttagatcagttaggaaatagttagttgttagttatttttctgttttttctgttattactgtagcttggctttttacactataaatacctgtaacatttcttcattcaatttaatatatcaataatacaattcatttcctctgtttttactcctaataaagtcagtaaatatttttttttatcttacaaattaaattttacaccaatttagtagtttttaggcaccctccattaa

SEQ ID NO: 165310 - DNA, 775 bp, Cannabis sativa
atgtacatttttctaatagatagaatatagatagtgtaactataaataaatatatattttagtttatgagatacaatactttaaattagagtatttatacaaatttattgaaattgaatattgctttctcattgatgctatggactaatgcataacatttaattaatttgactttgttgcctcaacacttaaaatatattatcaaaattagttaacattcacatacacataaatatataagtatataaacttataaatatataattcttggattttggaggaagattcaaattgaatatatataactaaatagtttagttgactaggatagtaatttagaatgacaaagtaaaataaaaatgaaaagaagatataatgtcaaaatatacatgagatggggttgaatttaagaatagaaatactttctacattgaacaatgtattaaagttccatataaatagttaaattattgaaattgacaaaatgtaaatgagttctcaataagaaaatataatttattgacttttgtatttggtgtaaaatttataggaaacaaaataatttaagggaatttttaaaatggaatacaaattcaatctcaataaattagtagaaaattttaacacctatattactctaactctactttccacactctattcaattcaatgaacacaacaacaaaaacaacaaaatcaaattcaactcaaaattaggtaaaaactaaacaaaaaaataaaagtaaaaactatttagttaaaagaactaaccaaa

SEQ ID NO: 165311 - DNA, 1153 bp, Cannabis sativa
gaaaccacctcccaatgaaatttagcaaccgaattagaaacttcatccacccaatcttcattagagaaagcatgatcaatactagagtagaccctatcaccaccatcttgtttattgcaccaagtgaacttagagccaacactcttgagcatagccacctaggattaagcaatccaagctgtgaaatcatcaatctcaagcgaattaacagccttgcctcttaacctgtcatcatagttgtagatagcattaaagtctccaactataagctaaggtttgataggcatttgcaacttggacagcccaacccaaagctccttcctctcctttatggtgttgagaccatacccaaatgttataagaaacgagcgttgaacactcaggattttcacaaggtagtgcacaaactgcttgtgttcatgtaacacagtcactgaacaaagtttttaagccagataaccactatacatttttcagtaacattactcatatgaaaatcccagccaatgaataccttatccatcatgtcatcaactttagaggtcttcattttattctccagtaaagctcccactcccactttattcactttcaagagactcaggacatcatgttgcttgtcccttttattcaaccctctgacattccagctaatgatgttgttgcgatccattagaaacggattggaaagcttccccatttatagcacacttcccttgtttttgtagcacattaaagccattatgcaccttggtaagatcagttaacaccgctttgcctttaatcttagaattcccaaccttcctaggaacctcccattcattacttttgccctgctttggagtgatgacagattgtgaattttccttttcagcatcgacctcagccccatcaaagactccttcatgcaaagttatctctgctgtggttgagggagcctttgtctggtttggcttatcagtttcaacacctacagccttatgctcactcttcttgacccattcctttggccctattttcctacaatccaccatactatgcccataacctttacaattaccacatatttagcaatgtttgtattattgtatatgagataatttttagagcattttttatttttacacctcaaaacagttttttttttttgtat

SEQ ID NO: 165312 - DNA, 1802 bp, Cannabis sativa
tgttgctattttttcttttgtgcgataagcccatagtactttgggtagttctttggccaatttcctttagcttgctccaggcgtttctttagcgtatccttaagagtttggttgactgcttctacttgcccatttccttgtggattggcgactactgaaaaactcttaatgattccataactgatgcaaaaatcaataaagagatcactgtcaaacaaaattccgttatttggcacaatcttctgtgggagtccaaagcggcaaatgatgttcttcaccacaaaatcaagaactttctctgacgtgatagtggctaatggctctactcaacccattttgtgaaataatctactgccactactgcatattgaactttgcctttccccttaggtagtgaacatacgaggtcgattacatagacagtaaatggtcaaggtgtttgcatactatggagttcgtttggggtagatctaggtatttttaaaactctctagcacttgtcacattttttgacatagtccgtccaatcttctatcattgttggccaaaagtacccttgtctcaagatcttctttgagagtctttcccctggcatggttgccataaaagccctcatgtacctcgaccatgagaactttggcttcttctttcgtgacacaccttagaagtggcattgaaaagcttctttagtatattacttcgtccatgatgatgaagtgagttgcttttctcatcaatctgttagcttcatttcgatcagttagaagaataccttattctatgtattgtgcaatcagggtcataattgtcgatcatcaggataggccccacgtcttcatgaatgctcctgttggttaggtatttgacgggaactacactgatagtatcaaaatttgttgtactagccagtttagctaatgagtttgtatgtgcgttctattcacacaacacttgttggatggagtagtgcttgagttgggctaatagatctttagctttgcttaagtatgcgatcatgtttgaccctcgggctagatactcgtcaagaatctaattaacaactagttgtgaatcattgtagatcttgagtgactcagctttgattgctagtgctaatcgcagtcctgtgggttcgtaatccctctagacctggccctgtttctagggtctcaggaatgtggttttctccccaattttgctcgaatcttcattatttcttatgacagaaaaaatgccctgaacacattttcgagaacttgattggaaacagcctaggttgacaatatgtcaacctgggcggtgggtcccccttttggcccttccaaaattctatttggtccccaaaattagttgaatcttaatctttgttgaaaacgaagatgatgtttggaagagttctcgaaaaatatcatcgaaatcggcccaggttgacaaaatgtcaacctgggcgctgggctttgattttggcacccaggaggtgcagtttcttcctcgaaagtacatatttccctatttttgatgaagacgaagaagatgcaaaagttgaattgtcgatttgatacttggaaggcgcccaaattgacaaattgtcaacctgggcgctgggtgcctgtgcaccgagtgctacgggtgctcaaatataaacttgctctgaatctgattctgatgcctcaaatacatccggtgtcatgtctagttgatgttccaatgtaaagtttgacccatttgcactaagaaagtcctagaaagtgaaacgctagttgggaatgtcaacttggacgctaggtgaaaccctaggtgtc

SEQ ID NO: 165313 - DNA, 1350 bp, Cannabis sativa
attattattattattattaagactaataaactaaattaaattgtttgacatttattttttgttttagaagttgtgttttcaagtcctttgaaaaaaaaaaatattgtgttctcaagtataataagagtagaaaatatttttttgcttttttatttttttaaacaagattataactaatttatttttattaaaaacaaaatttagtgaaaaataatttgaaaagcttaatcaataaatatatggttgtactatatgtgtttctgaaatagctttaaacttgctcaatcaatgaaaagtacaagaccatggccaaaaatgggttgtcatctttaaaggcccaaccatatttactttctcttactttagaggtatgaaattcatcttaatttattttattaaaataaacaaaacaatatatatttatttattttcaagatttataatttatgacttaaaaatgtataatatcaatataggtataaattaatttacaagtgaattatacaatataacaaaaaaaaaatattaatgatcctcatactagtatttagtcttcaacccaatacaatttgcctaaactagaactcatgaagggaagaagtgtagaacctcaataaagtagggagacaagaacaactaataccaccattttaggagaccatccctaccattatgaggcacaaatacatgtatagacacatttgttattagcgaccactttgaactggcatcttgccatttgttagcgatattccataaaagttattacattaaattatatagacctcttaactcagaatttcgttaataataaatgagatattttttatgaattatttactaaatgataaataatagaataattgacacaaaatatttatgtaattctgtagttaaatctacataattcacaagactttatcatttatgggcgatttgtttactgagtacaaaattcaataaatacaaaaaatgatgaatttctctcaaagtgatcacttgataattttgtcgtcgtttgcacgatggtctcctctactagttgtaatatttctaatatgacagttattttttttgaacttatcttaataattgctcataaactgtggacaattctcacgattcatataattactttacaacgtgtgataaaatgcataattgcctaataattgtcatttgattttatcgaataaataattatttcactgagaagtcttcttacactgtgctactcacaataagtttagcagtccttcataggggtgggcatcatccaatccaatccaattgaaccgaaccgatccaatccaatccaattacaaaaagttggatatccaattacaattg

SEQ ID NO: 165314 - DNA, 804 bp, Cannabis sativa
agtagaaaagaaaattgagaaaatgacctgtggggaaagctttgaggaattaaataatattatttgattatctgtattcttggaatcattttatatctataacacttaagccaccattaccaaagtcaacaaattgcctattttctttcatctctgtcctatgccatgccaatttgtataaatcttagtagacagacttaaaaatagaaactgggaattaatgcaatatttatgtgacagaaaacgattttttggtagacgatttacacgaaatgacctgtttggataataatgaaaaaaaaaacaattaattgattaatttaatacaaaaattaacagatttgattataaattgcatgatacaacttattttcaaccatacgcaccagctagctacgatgaagataagatagatgacttttgtgtttgaccaaaacgccctcatcttactattctataatacaaatcaacatccatgcttatccaagatttttttcttttaatatatttccaacttggtctacttttaccattaattcattttcacacttctatttatttaatttatatttgttgtattactgtatgtgaatgggagttttcaagaacagaaagtttgtttctgtatgtatctatatataaaaacagttgttgtgttgtgtaagaagataattaagttttgttttggggattatttttatacactctcaaactgcagactatttctgtatgtctcgttattttatccattacgtaatacatggacaattttaattgggaaatttacagaaattattatttttt

SEQ ID NO: 165315 - DNA, 1227 bp, Cannabis sativa
ggtttaactattttggatcatatcatgcattaatttcaaatccatgacctttatggaatgggagccatgtgagacccaaaattattaattttattatttttcagctccaagtcaagaatactataaggtcaatggttgttagtactatgtagcacatatatataatttctgttttggggacacaaattcaaacaggatttggtaattctagaaccataaataacaaaaaccattaaagttgaatttacacctttcataagaaccttccatatacacttaacacacatatatgtatatatataaaagagataaatgatcaactttattcatcaactcagccatgtatttaagggtatgtttaaattttggtatatagagaaagaaaaatatatgaaaatattggaagaaaaaaatggaatataaaaaaataaataaattctatgtttggtatgaaaaaaaaaatgtataaaaaaaattaattcgataaaaattttcatgtcaaatacaaaataaaagagtcgaataagataaagaaacaacagagaaagaacataatttagtattgagctgctcaatttgttttgagattgaagccttaaattcaaacaagaaacaagtcaaacatcatgactataaaaaacagaaagttaaaatataaatacataaattaaatacaataaaaaatgatatcaaaagaaaaaaaaaaaaataaaacaaaatggtagccaagaagaagattgaaaagaaaatagtttgcaaaaatgagcaataagccgaagctcaagtcaatagagagaatagtaaataacaaagaatagagtaaagacaactctaaagaacaaagaagagaaaagaagaatggttggttggaaaaagaaacgtatctcttctatattttgattttaaaattaagataaataaaattgtagacaaaaattacaaaacaagaaaactatacaaaataacaaattatatgaaccaaaatttaaaatacatattcacttttatatacatggtatagatataatcatatgctagtaaattttcaacgtacaacaaaaagtgtcgcataattactttctgtttcacacaatttctttcatatatacatcaaattttttttattaaggatataaattatcatttaattataggctaattagtaattttttccctgaactttgacatgtagtaaatcgtgcctcttaaacttttttggccgttaaa

SEQ ID NO: 165316 - DNA, 1065 bp, Cannabis sativa
aagagtttgacaagagacaagtttacactctgtctagacttactcaacattgattctaactaaagtctcatttgagactcattttcattagaatttggattcagttctattagctactttatttttcttgaattactctgttatctaactgtattaaatcaagtagaaattgtgaggtttagctcacttagaaaaactcttaaccaccttaacagttggtagtcaagtcggtaaggcttcgtcctaagttaattgagttctataaaggagtctaatgactcattttggggtgatcaagttttagaaacacaaaggaaactcaacttgtaaatgagatgaattctcttagtttttagttaagtgtgagggttgtgaaagggatttttatgtgtttgattgtgttgcttcaagtgagattaagtttgtcattggtgatcaccacttgtgtatttgtgttcttgatccaagtgtttgtaacattgattcatgccattcaataacaaagatcaacacaaccaataaagctattttttacacagggattaggtccaagttttattcaaaatttgtgattgaacctcgttaatttctatccattaattcatttctgttatttcagtttatgtctcaagcttttgttctttcttgttcttattgttagtgcttaagtgcaccacaaaataaaaaggaaacaatttttattctttcttttgtttggttgcatattaaagtattagaatgtcaatttaatggaagaaatgcatgatgaagaaaaatttaataattttttattaatttttttttatgcattttaaattttattctattttattcctatttcattctaattcttatgttttcaattagagatagaaatttggcggttaatgcatggggaatgcaatccccgcccccatccccggtacctatttatatccccatcctcgccccattctcgtctaataacctacggatttggggtaggggaatacccatcggttatggggaacccatcgggtatccattaaggcaaaatggaataaaaaaaataattaaaataattga

SEQ ID NO: 165317 - DNA, 2931 bp, Cannabis sativa
gtccaataattgaataatatattaatcattaatgaaatagtaatggagcacatcaattgtaatgtatgtaggtgtggctatatgtataaataaattttattatttcacaactttcaatagttacggtgctcatgacaaagtagtacttatactttaatgtattgtccccattattgtatgacattatatataatgtttgaagagctacggtaaagccgaaagctagctttctcttggtcttttggataagattagaagacatctttattttttatttttctcagtcatgcatgactcataacccaactcttttgaaacttgaactttaaaatagaaaattaatgaatttttaaaacggtttttatttggattcaaatagcattaggagaaacttaaatttgtgcagaaattgttagatcgatgacaactcagcaatgagctgtaccgactaaattagttaggctattagaaatcagttagagtttgttgtattctgtttagctctatttagctttagcttgcttgtaatagctatgctataaaaactatgttgtagtctgaactctaattcaattaatcaaagagagctccattcaatccaaatctcactctacattctttacttggtattagatttcagtcatccatggcgactaatgcttccttttcttcaactctagttcttgcctcctacacctcccctggtgattctcgtgtctctgcttctctatttgcctccactctcaattatgtggtatcggtgaagtttaacagaatcaaatatattttcttggagagctcaactgttcctgcgattcggggctgcgatcttgaaggatacgtgtttggtactactcctccacaacctcaaaattttcatatcactaatgaaaatggaagacacgttctcatccctaatccaaagcacatggcgtggcatcatgaggatcaacttcaactcaactggattatctcatcgttgactcctcctatttccagttaggtggttggctatcgtactaatcatgaagtttagagagctcttgtaactcttttctcctctcgtagcatggcacacatcatgcatccgaagaatcaacttcagacacccaagaaaggaggtttgacgattttgaaatactgtgcttgaatgaaaagcatctctgatactctgcttcttgtagattctcgcgtaccagaagacaatctcataatgagcatcctcaatggccttccagttaaatatgatggagtcatcaacagcattctgagttaagaaaaacttgaatgttcaagaagttcaatgacttatgttgagtcaagataatcgactccgtcgatggctcacccctagtgttgtcaaggttcctccctctgacaatcttgctctagatcagtcaccgtggttgtggctccagctcaaatcgaggtcgtggagggaatcgaggtcctagacacacttgtggatctaacaaaggtattggatttaaaattgtgtgtcagatcttcaccaaactaggtcacggtgctactaccttctagtatcgtcatggagaggattctcctccttcctcttagacctccattggagacaacaacactaaggctaccttttttgctacacctgagatcatagctgatccagcatggtctgttgacacttacgctacatatcacattacatctaatttcaacaatcttaataagcaaagtgattatcacgggtttggtaaacatggtagctaatagtgagcttcttcccattataaatattagttttgctttcttacattcaccatctcatgattgatctaatgaattacataatgtgtaatgttttcctaatctatagaaaagcttaatcagtatctccgactcactggagatgatgacatgttttttgaatttcattctaatgtctgttacatcacggactaggcaacaggtcaacccttggtggaaggacatcttaaggatgggccctactccctcttccccagcctagaaagatcttctcccaatgctaggtcttttgtgtctagattgttcaattgtattttagctaactattactagtgtagtccttctagttcttttcagtgtttcggtgtagttcttaccaacttttgtaagtggcacccatgtttgggtcactttagtctaaagattgtgtctcaattagccagtgcgctacactaccatattctctctaattcaggatatagatattatgtggtatttttagatgattatactaggtatgcatgaattttccccttccacactaaatctaaaatcttatgtgtttcaaacttttgagacacaagtccagaaatactttggtcagtacataaagttgtttcaaagtgatttgggtggcgaatataagccattctctatttttctttcctcccgcaacatattgtatattgcaaacaatgccctcacatacactaacaaaatggtagaattaaacataagcacatgcacattgttgaaagtagccttacacttttagctcaagtagccatgcctctctccttttagtgggaagcctcccttactgccacatacttacttaacaaaatgcatattcactagttttaaaaggtaaaagtctctttcaatgtttgtttaattcgaattctaataatactttcttgaaagtatttagttgtgcttgttacccttatttaaggccctataactcacataaacttcaattttgtcctaccaaatgcctatttattgggtacagtcctgaacataaagtctattgttttcttcacccatcatgtcgaacccacatcactcaaaattgtctatacgggtgttcagaaaataaccgatccaatccaattcaatctgcaaagtgtggatatccgcacttgtgcggattggattggattggaaaatttaaaatctgcactt

SEQ ID NO: 165318 - DNA, 1204 bp, Cannabis sativa
ctcgtgatttttttgttcttattttacttgtttaaacttgattgtataaattgggtgattacttactatatttacttagttatataattatgtagttaatagttataaatgtattagttacttgttactattataacttaacttttggtgattttttttataatacatttaatattttgtgattattttgtcttattgagaaggtcctcaacaaaactcttatttctcttcggttcatgttcttggaatttatgaaagtaaaggtagaaatgagtacgtgagggttcctgtcaacccatgccattattcatctaccggcttcacatctacataaattttgaagatgttatacaagtagtcactaaagatgaacttattggttcaactatgttatttgtactaaggtatctctttaactttgactaatatatcacatatattatgttagtaaagtttaaatatcttagatattcatgtgtactatggagatataaaaaaaaaactttatttacgatgtttattgtattactaggtacttatcaaatattggagaatgttatggaaacaaaggaaattctatcctttttttaggacttaatattcgaatattttttttaaacagatgcatttgggaaagtttaaatcaaacacaaaaagagctatataagttttatgatattgaacttcttagttatactaatgaacaagacaaggtaatagccatcaatcacttatcatcgtggttaaacactaggaatcaaaaagaacaatattattttataccatgaaacgaaggataataactacaccattatttgagtttcactataatattttatttttatattaattaacattgttatttttttcagcaaacattgaattttgattatagctatgacattaagaagaatcatattcttaaacttgcttaagcgaccacccctgttaaaaactgtttcaatatgttagaaaggtaaatttagaactttaagctattctttctaatataatgattactaaatgttgataatttataaattttttctttaatagtgcatacaagaatattagttcaaatgctaccgtatgagacacaaagggaccactgatatatagttttccttgtccaaagcaactacacaattatgaatatggttaatatgtactaatttacattcgtgatatgctttaacatcaaact

SEQ ID NO: 165319 - DNA, 1268 bp, Cannabis sativa
attaagtttaatcttcactaatccaaatgggtattcttccacccattttggaaaagtggttcttatcaacgttgaatctgcgtacaaagaacgagttttaagattgtaaacccccgaatctaaaggtccatcatcatcaaacctaccagtagtattcttgtcatggaggaagtatatgcaattactatcgcattctgtagaattagccgatgaaactttaacagataatgattcattatcacccaaaaacaaagcttcgtcttccaattcttccacctcaacccatcttgatcgatcattgttcaatttgaaaactctaaattttatggtcacttgttctctttcagctttattgtatttgacatacttttgaacttgtaaaagttgatctttatatgactccacaagatatttcttataacaaaaagacttcttatctcttggaatagaaggaccaacaagtaattttaagctttgttgggtggttgaatcgtaagtaatgtcaaaagaaacaagcctaccatttttataaagaagggcataaagtgtatccttgtagtataaaacatcctcaaaagtctctatagagggagtaggagacgatgatgatgatgaaaataatgaaggtatacgaatccatttattgtgtttagaaggtctaatataagccaactgtaaaaaactaccatatataactaccatgatgaaatcctttggatttgatattggatttggtttaaatattgtaaacctatagatatgctcagcccaataagggtggctgcttgtatgcattcttggaggaaatagtgggggaaggattattatgatacttttattattattatttgattgtggcttatggagtgttacagcaaatttgttatcaagtgtggctaaccaacctaaggatgagcctgcaaaaggtttattataggaaggaagcaataacaagttagattttttaatgtactttttcttcttaatactgtgttgttctgatgatgatgatgagtttattgtactataaactttccataaattattgtctctttcttttttatagttgggtatcaaaagtttgggtggagccttcaatttgatgaccttatttttattattattattattattcttagctaccacataccaatttaacaaacaaataacaccacatgtcaaaccatctttcaatgtcaaaccatctaattttctataaaccaactcaagaaggttcttgggaattagataagcgcaacctgaaaaaa

SEQ ID NO: 165320 - DNA, 1757 bp, Cannabis sativa
gaatatttgctatttgtttaccaagataacctaaacatgaaaaaggagataatggaacatcaaattaaatatttccaaaagaaaacaatatctatagttatataaattatatacacactaatacaagcaaaactgtagcaataaaatgataagaaagaacaaaacagaaaatttttgcatgtcttgtgtgtcagcaaaagatgtgaaaaaaatagaatgagaatgtataatctgtatgtaatgctgttaatgagaatgctgaccttagaccttattcattagttctgatgagtcactcacattttactatcaatataaatgtctcacattgattaggaggaaaagaaaagtagaatctactaaatctacagaattagcaaatgcatagaagaactagagagaaaatgtttggctgagatttttttattataagaatttctcaacagatctatacagtagtgataaataaaacatgagggccttatgtatcaaaattttgagaagagatagaatttttttttttttggactaaacctgcaaaaataacaataccatcagaagatactagccgattctggaagagtcttgctcatatattttggatcagacacaaactataaacaagagaaaaggactttgttctctatggtagtggaaatttgagatctaacttgaaagagagaaaaaagaaaaaagattacaatgtgtaaaagaatttcttctaaatcagacctatgtctaataaaatccatatctaaactaatttatatacaaaataaataaatgcatgtatattaaactgaatggtaataagcttgcaataataataattttggccaaacaacaaatttgcaaaattttacgtcaaaacccacaaaaatatcctaaattccaaaaattaaattcaaaaaaatcatattgataacctcaaaattctctaagttaaatatgtatactaagtgttagatttagtgtgatgatgaatacaaaacaataagatatgaatcatttaacaacatcaacaccttgcaaatacttatagaatattgaggtacatcaaattcaattggacttttttttttggaaaacaaaatcaattggactttttgattaggattttaccttttggaagatgaatatggagataatatatagttatctgacaagaaaaaataagatgatcttacaattggggtgcatgcatggggacttcctgccaaaacacactctcaaaccctcacactttattcaaaccatatggcagccaacatgtttttgtaataggctttacaagtgtattttatattcacaacgatataaaatacacttgtaaactacccaattatgtacaaaagagttggggtatttcctctttagttaaaatgtacctaacaatacattttgataacgttattcaaataactagatctttttcttttttttggtggtgggggcaaataagtaaaaagaatattatggttcaattagaaaaagaagacctagatttgacacaatgaaaacttcccaatcttgtcctgactcctgagttgttgcttcaatcccattatcccagtccctccttcccattcatgttcaaggaaaacaagcaatacagactaataagatacatagaaatatgagattattgccactggatttacattttacagtgtgatttacccaatagtaatagtaaatacaactaaaaagtgcaaaacacaacatgcccttagtcattcaagccaaagcgcaagttc

SEQ ID NO: 165321 - DNA, 828 bp, Cannabis sativa
catctcacagattaatagtcacacctctggctccattaatataaggagaaggagcaatcaactcctcaccataaggcgccgccgacgacgacatggcattgttattattccacccactgtgtctggtaggatcgtacttttcgccgtcaccccatagagcataagcttcttctccgtggaccgcatcgtctccgatcatcagctcattatccggcattcttagtggtatgaatacccttatggctagaagtatgagggttgtagaaacaaggttccatcctatcacaaaaagggctgctactaattgtttaacgaactgtaatccaccggttccgccgtagaaagcaccccgggagcttgataccggtagtattaaccggcagagctctggctcggcgaataggccggtcagaagaccgcctagtagccccgccaccgcgtgggtgtggaacactgccaaggcatcgtccacctatataaatatatattgaagataatttattagcaaaaatgatcatttagaatgatagtgcgttgatgataataaaagatttataataattattaaattaaaatatatgaaattaaatatttaatgagactaataatattatagggatgattatataaggtattattttttgtaaaaaaattacaattttacatttaagaatttttttttatatttttacggtttttatagaaaaaacatgaaaataacaagaaaactacatacgctaataagaaaataatatccaaataacaacaaaaaataacatacaaatttattaacaaaaaatcaataacaaattaataagagtacaacat

SEQ ID NO: 165322 - DNA, 1372 bp, Cannabis sativa
tatattagtatttatgtaattaagtattagattttataaataataatttttggagaatattaataattattcgtaagataaataatgttacgaattattgatatgtctaatagtaatattttttaattaaatattaaattttatatattttttaatttaataactattattgaaaattgttaactattagcaaatgccaactcgttgtgttattgagtgacactaataccaagagcagctccagttgtacttgtctagaggttactaattaataaagagcattgctagtaggcaccagtagtgcctagtatctttgcgacatatcgcgttgcgattagctagcaatactctctaaaagttattatattaaattatatgcgacccgatacttagttgaatcaatagcaatattaacacataagagggtgctaagcaccattggtgccatttagcattctcattaataaagtgagtctcaatttaactttttgataaaaaattctctaacaaatggtccaagaatatcaacatagctggtttatttttatattattttttattaatttatttatgattggttacttttattaaatataatatttaaaaaatttaggtaatattaaatacgatattattttttaagttatatgaaatataatacttaattataccaatactaacttaacattaaaaaaaaataatacaccgataccttttaacaattctcttctcatattataatgagataaaatataaaaggatgaactatgttaatggataggaatagaagggtaaattgggaataaggcacgtgaaaaggttgaaacaattaaacaatatgtagagatcttgtgttctaaaaagaatgatatttgagaggaggaaaagaaaagcaatgagaaaggtctctactctattctatatctattatctatagttataatgtgagaaaaagttgacattttttaggtgttgattttgataatattgagttggaaaggtacctatatatattagggtttgtctaggctaagatcttggtctacgtggtgattatacttgtttgacaaacatatatatttatagaaataatattttatatatttgttcttctttttctagtgaaatttgttttaggaaaaaaggaaaacatgaaaaggtgagactttttttgtgtgtattaggctagcttgctttatcaacttttctcttcctttttattttaatttcatatgttaagagaaaaaaaaatattatttacataccatacacttgtaactatagcattaatattaggctaattagtaattttttccccgaactttgacatgtactaaatcgtaccccatgaacttttttggccgttaaaaat

SEQ ID NO: 165323 - DNA, 896 bp, Cannabis sativa
  modified_base (688)..(696): a, c, t, g, unknown or other
tggctgacaatgccaaacgtcgagagagtagcttgaagaagattccaactttttctcgaaagaaaactctagattttaaagattattctcacttgtccttcgatgagatgactttaggtattgcttagcttgaggaccaagttagacatttaagagaaaaactaaccagactggaggagaaagtgctgccgatgtcactttttatcatggtttatgttttgatgccatcaactgttcttggtcacccaatggaggagcataggcattcaactgggcggccttcccttagaccaaagtcccattcattataaggcagtgtgagcagcactttaatgatgatgctcttcaaagatttgactttaacttgaatgatgatgagttcatggtcaaagaggctgcaagggttaaaggctacaacctcgagaatcctgacattcctcctcctattgatgcaccagctacaaggagtgaagaacaagctgaagctgttattgacatagaaagcttcttgacttcataggatattgtcttagtccaattttcatttctgtattagtttttagctttagtatgttagttggtcgtcccgagtggcctttcaatgtggctaagccttagtaaaatgttctcagaatagtttgcattaaattagaaattattctaacttagggtgtgtttggaagtaacnnnnnnnnnactaggtagggtaattactagggtagtaattacacagttttgtaattacaatatattttaaaatgcaaggtgtgtttcgatatgaggtggtaattacatatgaattcctgatatcgtgtttggcaaaatagttagtaattatatggaaaaataatattttttaatagctaatgtttaatatggaaagtttttagtaatta

SEQ ID NO: 165324 - DNA, 623 bp, Cannabis sativa
caatttggtatccactttggacaaaatattctccatttttactgtagtgccacgtgattgtatcctccatatcccaatcaccacttggaatttgcaaaattaaagtcgcatcctcttagttaaaaactttcttgataaaagccgcatcccattgcccatttgctaactttaaatcaataacatacagctggttcggaagacttggtttatcatagaattggaaactaattggtcttggcagccatggatcttcaagaactcgaatagaatttccattcccaactcgccatcgatatcctttgtgaagaagcttcttcccccacaacaaactacgccacacaaaagacccattagcaccacactttgcttccaaaatgcttttatatgggaagtagctagctttaagaacccaactggacaaagatgaaggatttcgaatacacctccatatttgtttgcaagaagtgcttgattaaaaaaaaccatatttctaaaccccataccaccttctcctttgatttgcataggtatgctcatttataccagtgtatcttttgatctttatcagatgatccccactagaaccttgctgccattctatgtaagctattaacaaggctctt

SEQ ID NO: 165325 - DNA, 2159 bp, Cannabis sativa
aaacgtgacctgaaaacttttctgtacgagcagagctcgaacaaaaagcaaaatagttatttgtcgtttcatgtttatatttgttttgagttttttttttttagttcattgattacgaaagatagtaggaacttacgtggagaattcccttgaaacgaactaactctagcacttttagctaattcatcggtaaaagaattaaaacaacacttaataacaaaacacttacaaattctaaattggctaagtctaagatagaaatagaaatgccaagggtcttccaatctggagggcactgaagtttaaataaagaatgaaatcacttgccaacaatctaagaggatatgaatttccttctagttgttctcaatggcctaagagagagccaaacatatcgcacataattcggcttccactgcgaagtcagcaattgaaagttgagagttgaaagcccatgtttcatttgttcaattaatcatgacaacagtcaaaccaactgtctttgtgccaggaagcatctatacatagaacatgatcaacaaccataatgtcccaggattgaaggcacttgtatccacacagttattactgaaaatagaatactcgaagtaagcctaccttactttagttcgagccatggcgagattaataaggataactttcaaacagaggtcaatttttttttgaccaaatttgatctaaaagacatcccacataggtaaaaatctccttcctaataagattagagaacaccgagataacattttccataagatgaatcacattgtcccagaggatgttctcaatctttacagggaaaggacttgagaaccataaagctagagcaaaactacaatctcgaaagagatgtaggctgctttcaactatagaatcacaaagtgagcaatccttattttccagaaagtgtagctttttctttgttgggacattgatgaggaatctccacactaggatctaaagtttggggtgtaaatctgattgctacaaccaatttcaaacttttttttgtgattcaaatttgaaactttgatcaacacagtaggcactttttacaaaataaaattatgtcatgtttatgcttccaaacaagcatgtctttatgaggagcaggtgattttgggatctctataatgcgattacccaaaacttctctaaagatatgtaacaccacttctttgttccaagagttactaagagataaatgatatctgctaggttctggcagtatatctcctgcttctgaggttgtccatgagattcttgaatttatcaaatttcatccatagaatccaaggttgattccatatattaatggagctaccttaaacagctaaataaatagagcccttagctaggatgtttcgaacctccaaaatatacttccacatgtatgaatcattgctcttcttcctgacttcccaaaaaatttcatgcttacaatatttggtgagtagacattaagcccatggcttgtcttcggatcttgcaacgctccaagcaagttttgcaagagggatcgattcatgtcttcaaatcttttgatccccaatcaaccagagagcaaaggttgacagattttatcccaagattttagagctaagtgtctctccttgtctaactttccttgccaccaatactttctaagcaaagaatctaattctcgacaagtagaagttggaactttgttagtagacatcatgtaaactagcattgatgatgccactgacttaagagtaagtcttccagcatttgacagtaacttcatcttccacccctcaagccttttcatcaaactttccttagcttcttgtaatttttattttcacgtcttttgaaaacaaaagggttacctaggtagctttcatcaccttgggattacttgtgtaataaggaatcggattagtaaactctaactagttaaatgtccattaatgtgaaattatactattatataatttgatatatatgaattatactgataaatgacataatattaagacactgttggtgagccaagggcatttttgtaattttcacccgaggaaggtaaaaccataattttaatgttatatcgtgcttatggacaatattattatatagtatatttgctctgtctttctgtagtttttttttttttt

SEQ ID NO: 165326 - DNA, 2513 bp, Cannabis sativa
acgtgatagatttttcaacatccttcactgaaaattctgcagaaggaatagactctacaacagcttcagcattgctacaagccacattcccagcataaccgtcggctggaagctgagctccctgaatagcatcaacaaggtagcatattatttaaaataatcaggttgttagttcaagaaaataatcaattccacaaatttcatacctttgcaacaacctgaacaaggtcacctgaaagaattacaagtgtatctatcacttccccatttactacatttgaatttcctttcccctttttagtcattctcgctttcttcaaaacaatgcctatggaaagatcatcatatcaataaacttccctaagaaactccaaagaacaaaagcaaaagaatatcataattacagcaaatacatgcaaacacgaccaaattttctatattagtggaaagagctttcattaatgttaaactaataatgaatcttctttatctcaaaaaaaaaaaaaaggttcatagagaacaaagatctgattctttagccaaaagaagaatcattcccaactttcaaacattaatctttctcctcttactatctttttctcaactacaaaaatctgaaagagaaaaaaatgaataagcagaaggaaatcaacaagcataatatacaaaacccggatcagaatacaataagatcaagcaattttcccacttaaacaaaaaggaaaagaaagaaagaaaggactcacatcctcaaattataacaacaatccagaaaatatttcaacaattctattgcatttgattccgaacaaacaatttgtaccgtattcattttcgacagaggcagtgtgaaagattccagaataaacagagccatctttgacatgaacatcgacgtggagaccaatgatgcacatagtggcgaaaagcaaggcttcgttcagtgatgaagaacccggagaagaagtagaaggattgtcattgggtgggaactctctgtttctgcaacccatatcttggtttttcttcctggtccaaatcgaattgctattactactttctctctctaaggtactgaaatcacggtatcaccacagagagagagagggagagaaagaagtgggactggcaaagcacgaacaatgaggaacgaagtgtactcgatcgaccctttcagatcagttttcttcgccgattttcgctactccaaacggtatcggtgtcgcttttacttttagagtgtcgtttttattttattttattattatttttaaaaaaaaaaatagctattttttttttgaagaagaagaagagatgtatccattaattgctagagagtctcacattgctaatgtgtagaaagataatagaatatataagaggaatgggctacttgtctcattgccaattggttttgaaatagaacctcattcatcttatctaaaattctaacatgttattagagcaaaaaacaaagaaaaaaatctctagagaatattcgactcaaaaaaaaaatcaatcgaagtagagcaaaaaaaaaaagagccaccaaaaatccaaaaaaactgatccaagagccaaaagtcaaaaaatgtcacttgtgattcgggaatagtaagcgaaaaaaagagagctaccgaaaataccgatccaaaaagtagagcaaaaagagcgtgggggatgttaaagagtcccacattgctaatgtgtggaaagataataaaatatataagaggaatgagctactcctctcattgccaattgattttgagatgaaacccattcaccatatccaaaattttaatattaataaagataaccaaagtccaaaatacaacattatatagaaaaaccaaaactttaaaggtgatgagcgatttcatttgtccctcgaggtattagctaacgaaagcattaggaaaagaagacaacaagctttgaatcttcattgcaaatctgttaaggtggagatgatgagtaatattgatacaaatatagtcaacaagaattttacaatctgactaaatgttgtgactcgacaccatgtgagagaatgctagaaggcatgagcttccattatcaaaggtgcatggagtccccgcaatggagttgccaaagtcaaaagtatttcactgcgattattgtaaatagccataccaaaatctattttattggttttttcaatttcagcagcatccacggtgagctttgatcggtaggatggatttttttgctcacggtatgatgcttgtagcgatgagacactagtaacaaatttatgttgacgattgttgtgctgatactgttccaagtagtctgcagtcaactgtattactttggtgggtaccaaaactgagttgtgatgtgagtattcattccttcaatgccataacttccaaagcaaacaaacaaaaaactgaaagttgttagctgtgaaggtgctagcatccaagtgaagtaaatccatacaagttagtgaggcatgattagatataaatgtaaaaaaaaaaaaa

SEQ ID NO: 165327 - DNA, 597 bp, Cannabis sativa
atttatttatttttcgaatgctgcttctctcaaaggatcactgatttgatcttcaaatggctgggctcaagagtttggccaattgatttccagagttggaagtcttggttagtgctgaacaaaaacaacaggaagcaaagagtcgtgatttacaacttgtggatcaattggaataactgcattttcaacagcttctaaaattgtacaggaaattcagaaagttgtttattatagattactaattgctaaaaatagaagcctaaataggcatgagaggagagaaaatatattgtaagtagtgtggagtctcggctgagctggttggtttgctttaggtgtaattgtttgtgattaatgaagctatttcttcttgataaaaaaaagtgtaaagcaatggacccattaattgctgtattattattattaataatcactctttgtgtggcactaaagatttgaaccatattcaacataaagaaaaagttaaaagatattctcaagataactctacttgacaaaaagaaagattcccatgaattatggctttgatgaatgatgatatatattaattacaagcaatgaattgttttgctttta

SEQ ID NO: 165328 - DNA, 801 bp, Cannabis sativa
cgcacgcgaagcgcggcctgtttcttagtatttttaataatattatataatttataatttatgtttgtatttttttagtatattaatatttttttatgaattttaagttgtgttttggataattattaatttattgaataataattaatgtgtaatattttaatttttgtgtagtttaatatttttgtatattaaaaattttattataaactttatttttttattaaccgccccgtccttgcccccattaggggattcctcgccccatctcctatgggaaataaacggggatggaaattaaaattcttaacgggaatgtagacggcggagcactctccgtctacgccaatttcccgtcccgtgtacatcgtacaattataatataattagtgggttgaaaataaatactccatcataattaaaaaacaaaattattgtcatttgatcaaaaatcaaaagctgtaaacttgtaagagcaaactggtgttcgtaaatttttttcaaaaagaaaaaaaaatgttgctcgtaaagtccacaatcaaaatatctagacaaacaatggtaagtaacacaaatcattcctttaaaaaaaaaataacacaaatcaaaattaaaattcttacaaaaaaaaagaaaaagaaaaagaaaaatagaaacagaaattagggtaaaatgtgaaaacacaacaaattattgacgagtcacgacacgacctctctctctctctttattccaccatcgcagtccaatatcctcccttttcttcttactcttacttctcacaacacttcaaccttccta

SEQ ID NO: 165329 - DNA, 2666 bp, Cannabis sativa
aggggttgcgaggctgatgctctggagacgggtgaacgacgatcggtgtggtagaaactcttatttcaactttgatagaggctgtcggaagttgtgatacgccgatgatcgtggaacaaggagagggcagttactagaaggacgaaggagatgggaatatggggagtttaaatcggagtggtggggttggtgttgtcagtgaggtggcacggaatgggcctactgttgagcccaaagttaattctactatttctgaactgggccagctaaatgatggatcaaatattgctgagaaggagggaatggggccgaatagtattggggttgggctttctaatactaatcgtttacataatgctttccttgggtcttcttctttgttggggtcaactcaaagtaataaagaagtagggacagatagaagtgataggttcgatggagatgttgatctgaagaagaggaaatgtggagctcaggggggtagttcacagttaagggagcacaatgaatatgggggtgtgagattggaaggaaaggggaaggaggtgattcaggagcttgatgcggctattgtgggaggttcttttgtgcaggccacgggtgcgaggtcatcacattcttctggcatcaatcaacaccgacgggtctctatcaaaaataaggcccgtgcttttggaaaggggaaggaaataattgatgttggagactcgcgagacaacgatgtgggaagtcacggtggccttttgaatcgcactgatgtcttggataacagtattaatgttgaagttgctatttcttctacttttgatttatctcctcatgtgttcactactgaaacggcgagccctctggatcaagaccgccgagcataatgtattcgcaaagttggaatgcccaaggaattgggaacccttggacattgcttgcactgcaatcccatgttcgggaatttaacccgagtataatttttttgatggagagtaagttagtgcggcatcaagctcagatattatgtgcagagttacaatttacaaaattctgggtggtggatcgagtggggttgagtgggggtttgttgctcatgtggaaggatgaattggatataagagttcattctagttcgcctggaaatattgcatctgtggttactgggatgggattggttatgtggtatttaacgtgtttctatgggaatccagataaacaacaaaggatgttttcatgggaacttctaaaacatattgcgggtgagaataaaggacaatggctgtgtattggggattttagggaagcgattgatgtgtgtcaattgattgattttggcagttgtaaaaccgcgctcacttggtgtaatgggcatagggatacgggggtgatcgagagactagatcgggggttgtgcaatgaggagtggttaaaactatttgagggggcaaatgtgagggttttagattggtgggaatcggaccatcgagctttggtggtgaattaacctattagtgatcaagtagagaccggtgtcaaagagggtagaagaagtcggtttcactttgaggaagcttggtgtgaggaggatgaatgcaaggcaattattcatcgtaattggggaagtgagggggagataaatttagccagtgggtttaaaagaaagtcaattaagtgtggtggcgaattgaaaagatggaatataaggaagaaaaaagcagttaaatgaggagctgagtaaggcgaaaaagatgttcaatcacctttctactgctcaacaacctgaaaattggcttgaaattaagcaacaggaaaaaagattaaatgtattgttggaaaaagatgaaacgtattggcgccagcgaagtcgggctctttggctaaaatgtggagatcaaaataccaaatacttccatcacaaagcgtcgggtaggaagaagaaaaatacaattaatggtctttttgaccatttgggggtttggagggatggaaatgtggctgttgcggagcttgttgcagagggcccagttttgtaagatattcaggttgcaaccctgatgtaagaatttacagaagatgaaattaaaaatgctatgtttagcatccctggaatcaaaagccctagaccatatggttttggtagcttcttctttctggaaaattgggatcttattggcagggatgtttgtgaagcaatgtcatcattccttcaatcaggtaacttgttaaaggaaatcaattctacagttataacgttaattcctaaaatcgaatgccctaacaaggtgagtaattttaggcttatatcttgttgtaatgtgctttataaagtggctaccaagctgatttgctctaggcttaaaaacactcttcctgatctagtagctctaaatcaggaaggattcattaagtgggaggaggtatattgcacataacatcatgatatgttaggatttgattaggaattatggaaggaaggtttcaaagcctaattacatgatcaagattgatctacaaaaggcttatgataccttggattgggatttctttgaagagatgttgattactctaaaattcccatggaagtttactaatttcgttctgacttgtgtttagatattcattgtaaagaccgcatatggttaatgctttgaatcattaaataattaaggtttgtgtat

SEQ ID NO: 165330 - DNA, 827 bp, Cannabis sativa
ggaggttgtgttgatggggttgtggttggggattgtgcattgtttattcttaataccaaacaacagttactatcatctctccttccattctaaattctccaaacaattcttattttatagaagacttcaagtacaataagtttttttaaaatggttcacatgaaatcctttaattacttctatgatgaccaagtggggtattaggatgattgggatgaccttggcgtgaactgggtcaataagttttagggttatcatggcccaaaagttcacgtttcagacaatcattcttttataataactttgttttattttttggtaaatcatttttgaaaaatactaaaagttgaaaggagagataaagagatagatagagagatggaaaggggagtgtgggggagcttcttctcttgggcgtactagtaaggagggagcaatgagagagaactctccccttaagtatttacactgtaaattataatcctggtttgatttaaaaaaattaaaatgtaaaaaaaattccataaaattataatttgtttacaaaaaaaaaaaaaaaaaaattgatgctttgtgtaattctccctataatgattatatgtatagagtacattgtacaagcaacaatagacaatcatttttttttaaacccagtcaaattatcccacatggggaaagtaattaaatttatagtagtatatataggatttgagattagtgatgatacagttgggtctagtaacgtgggcttgtgaccaagtggaccattaaaatggtagggccacacttggtggtgtggaagtgtttttataaaacaccagtaaaac

SEQ ID NO: 165331 - DNA, 1007 bp, Cannabis sativa
agcctaaatggagcagctttacataaaagtaagagagtagttaccttaggaaccggaggaggtttggtactacacgctgtagtgaggtccttgcagagaaaattaaccaatgtatcaatcttagggtgggacttgtatagatactcagcaacatcagtatccgaatatcccatgacctgcaaaaattcccatagattttcaattacaacctatctaaactatcttaaaaagtcaggctttggagaattgatttggaagacgaagtattatgcataataaaatcaatgaattaaattacttaagccctccttatgtgccaaaaactgacctcctgacaagttctttcaatcgtcttgcattttgagttgcattgtccttcagtattttgttcaaccaactggaacaacaaaacaaaaccgaaaaaaactttatatggtgaagcagatcaatgtatcagcatacaaagtatgaccaattataattgtgtgcatattaggtgttgtagaaattcattaccaaaaaactatacaagctgttccaaaataggatttggtgcataagtcataagatccctaacaatcactaataaaaccaaagtctgtttttcttttacattataggatttttcttccaaatgcattcaatttaaaaccaaactcaaattgaaacaatcttaccttcaatttatcaccttgttcaactatatcaatctgcaaaatccaatctgcttctgccttcttcaaattacaaacattctcagcaatctcaattatctggtactccgagatctacaaacaatacaagacagaagacccacaacccattattcaaattcacaaaaggagagaactgatcgctttccaaacacgaagatcaaatccaacaaaggcaaatcgagatgattcaaaaataccttcttgggagagatctcagcttgcttcttctgaacttgtcggtggagctgggcagcgagcttctcacaaacctggcatttgatgtagggaatg

SEQ ID NO: 165332 - DNA, 4352 bp, Cannabis sativa
ccaattttagcaacctactggaggactccgacttctgaagcacctagcggggggaaggattcgttagtacttttatgacgtgggcttggaagtatggtcttagcttttgagccccagttagtaagcaaaatgtcattttctcgatcataggacacccaacaatcttttgcttatgtagtagacgagaactagaccttttcatcctctcgcacaagtgtagcactaataacatgatcagacactgccaagtacaaatacaaatctttgcctttcatgggcttcgataaaatgggagcttgagtcaaatgctccttcaatttttagaaagcaactttgcactcttcagtctattcaaacttcttgttgcctcgcaacacattgaagaacagtatgtacttatccataaactttgaaataaacctactgagtgcaacaatttgaccagtaacgctttgaacatccttgtgtttcttgggagaaggcatgtcaatgaaggttttaatcttttcagggttcgcctcgattccgcgagagcaacaatgaaccccaggtactttctagaggaaactccaaaggtacacttcttggggttcagcttcatctcatacttcttgattactgggaaagcttactcaagatcttggccatgttcttcagaggtcttgaatttaaccaacatttcatatacatacacctccatgtttcctcctaattggtttttgaatattcagttgaccatccgttgatatgtggttttggcattattaacccaaatggcatcaccttatagcaataaacgcccttgtcagtttggaagttagtgtattcctcatccgcggcgtgcattttaatttgattatacctagagtaggcatctatgaagttgagcaatttgtacctgaatgtggcatctaccatctgatctatctgcaggagtggaaaataatctttaggataggccttattcaggtcgataaagtcaatgcacattctccacgagccattgggttttggaaccaaaactgggttcatgagccataccagatacaatgcttcccgaaggaaattgttggcagtcaacttatctacttccatcttcatagcttctgcccttaccagatctagtggtcttctcttctggtgaactggcgtcgtatcttctctaatgttcaaagcatgatagatgttgttatggtcaatctcggtcatatcagaatggctccatgccagcacatcctggttctttttgaccgtgtttatgatattctctcttatggataggggtaggtttcttcccactttaatagtccttgtgaggtcttcatcactaatgcttacctcctctacctcctccattggttgtaagttcctttcagtcccaaccctggaatataattcatcttgaaaatcttcccaagcagcttcagtatccatctgatcatctattccggagccatgaatgtctattcctagaccgtgaacacagatcgtattgagacattatagtaatttcttgcactcttctgatcgcctttgattgtgtcgatacatccgttatcacatgggaacttcatgcataaatgcttgatagaagttaccgccccaaagtccaccagggtcgcccgccctagtataacgttgtacgcagttgggcaatcaaccacaacaaaggttgagtgcttaaaagcactcgcatgattctcctctttaagggtgataggtaactgaattttatccatcggcattagagcatccccgttgaagccttgcaattggataggatggggagttaggtccgcttcagtaagccttattgcctggaatgcgaaattgaacaggatgttgactaagcttccattgtccacaaggaccttggaaacttgtttgttagcgatctatgcatcgttcactagaggatcattatgggagaagcgtaagtttttggcatcatcctcggtaaaggtgatgggaaaattcatcgttctagggcgttgtgcgggagactacgccagcgcgcatacttccccttcctctacctctctcaggtaccttttttgcgagtttcgagtacttctagcatgatgggatccacctaagattgtagctacgtgtccgtccaccagaggtggagcgagttcaggaggacatggggttcccggtcctagttcaccccaactgaggctcatagagtaatgagtgcatgtaatgatgttcctggagcttgagaacagcttaccccttgcggaggatttacagtgttctgctgtctgggaacgatcatgtgtccgtgcacgaccctctattcgagatagatgatcggaatctagacccactgtcctagatgtcccgctcagaccaacattctcatctttcaattaattacactcattaatggtgtgacccttctcccgatgatactcacattctttgttttgaacacgtctattccttcctccatgtgacatctgtggaggtttcctataatggatcatgttataggttgctttatagatattttctcgagtgtctattagacttgtattgtaatgccctaacccgtaaaggcaccacgtgtgtgcttttattgattagttaatttataataaaaaaactaacaatttaagaaaatgtagtttaattaaaaattttataaaataactaaatttcataattaagacttttcttacaaaataccactactttcgggaatccccttatttataaatttttacaacatgtagcaaaacaacagttatagaataaagttacattttcaaaatacaaccaaaagatggatcctgtccactgagagccaagacacgacgactgatatgtacattaccgagagacctctgactcatggctggtccagctttcctttacccttaactgcactacagagcacccgtgagtcacaaagactcaacaagaaaagcaaataaaacatgatcaacatgataagcataatctcaaaataatgcatcctaaagactaaataaccattcaaacataatgcaataaagataaacaattagttgtcttataagacaagcgaccttgatgctttataaatcatccttaccactcgttaccaacaagcttcatatgtcactatcattgcttaatgaaacaaccgataagtaaggaacctatcagcggtttctaaaagtgggtaataactcatttctacaatggtaactattgtatctttaccttgattataatcgactcacaaacgataataattgtattacatttgacatgataagcagtgcaattggattttcttaccttgaatccataatcaggtgtgcaggccgacctgagtggaataatgctcgacgattcggggtcctatgtcacgacaatgaaacttcgtgaacaacttaaccaaatcctaaaataagccctaatttcacaaccagacaaaaaccctaattcctgctggcttagaaaaaggttaaacatcaataaaataccctaaactaggttctggaaaaacaccctaagcaaaaaccaattttgaagaaaaactagtgtttccccggctggtcaaccggttgaccggttcctgcagaaagggaaaacccctggtttttcacatcaaaacttaaccaaagctttttcaaacctgctcaaactttccaaaataattctataatataaaaacaacatactcaagcattcaaaactcagtaacacatcaaaatatcaaattcaccataaattggtgaaattttagttcttgaactcaactcccccaactcaagacttaacagcctaagaatcacccaatacacacacaaacaatcttaatttaaacttagaaacaatcttagaacccaattaacatcacttacctgaaaccatataaaaaatcaacaaaacctaacctaaaacttaagaaaacaatgagaaaaggagggaaaacttatctcaaagcttgaatagcacctagggttagctagttcagctagaaaatggtggttttgatgaagaaaactcctttgcttcagctggtttctagggcttgaaggggaaagagagagaaaaaaaggttttgtgattgaaattttctttactctttgaataataatccttaacttataatctaacctaatattataaatctattaactaaaccttaattcaacccaaaaagttactagaaaccacaaaagacaaaattaaaataaatcttggttaaagacttcaaatacttaagttatttattaatctaggggtattttggtcaaactaactatcctaattaaaccaacaactcaacattctaaactagtccagtacaattccaatataactcatcatttattgttgtgacatttctgacc

SEQ ID NO: 165333 - DNA, 1463 bp, Cannabis sativa
catgctgatcaaagaagaaaaaaaatacccaacatttggtctactatgttagacaaaggttaattgatggtgaaagttgatatcctctgatcgtgaaactaacttattgcttactcctaacatcaaagaagttacgattatacttccaagctcaccccatcatagtacataccgactaacctttgttctaagtcttggaaaagccagacgcctcttgtcggctactcaaatggaaattgagctaggatagtatgaaattacctatcagccctaaacaataataaagggtcaagccttggcagatttcgtagccgagtgcacggataaacaaaggacaagttaagaaaagaatattgagccaaaaaatggaacaagaaaaagagtccccagtagaaaatgttgatgataagcaaattttgaaatcgcattttgacgggtcatccacctaccaactgtcaggtgcaagaataaccctcattacacccggggttagcctctacacggggaaataaaatttggcttaatggtagccaataatgaagcaaaatatgaaacagtcatcgctagaattaaacttgcttgggaagtgcatagtgagaatctagaaatttatagggattctcagttggccatcaatcacatcttggggaatatatggctcaagaagaaaaaatgatgggacatttgaataaaatttaggatttgctcacataattcaaaagatataccatcaaacagattcctagagaagagaatgtaattgcagatgctttggcacggttggcctacaacattgtgactgacaaggaaaacttagtcccaattaagtttctaaaagagcctagcatcaatttcatagaagaaattgaattattggatgacacacctaactggatggcatcaattgtagcctatcttattattagaacacttccaagggacaaaaatgaagcttgaaaaatgatgagaaaagttgtacagtacttaattgtgaatagtgtgatgtacagatgaggtttctctatgcctttgttaaagtgtgttacacataaagaagctataggacttatgattgacgttcacgagggatacaatggcgatcatgctaaaaagaaagtgtaacaccctaattaatagggacgccacgtgtatgattttataaactagtttagtactaattgattaattaatcattaaaatctgtgataatattaaaactttactagaataaaatactaaaaatggacatcataacgacactaaaaatgtgttctggggatctctgttatataagttttaaaaaaaaaaactatatacaacgataattcaaaataaaaaattaagatacgcaacagatacagcccaaaacaactcctaacaacttggcacacagggcggtggggtcaatatgtacattgctggagaagattgtcacctcttggctactctaacttttccttgcc

SEQ ID NO: 165334 - DNA, 598 bp, Cannabis sativa
atattagtttcgagccgggcgcacaatgatagtcgaccgacacaaatacagagcccattgttggatcttggtaagtggaccctggcccaattcgttcacggccctatttctctaggattactaattactaacttggttttagtgggttgtgtgcattgcagctactccgccacattaggcaacattttcagcctttctttggaccatatttttggctattacaatatccacaaaagaagtaccagacaaataaggtgaaattacacaaaataatgaaaagaaaaagtagaaattatatggaatattattagaatttatatttttatggtataaataaataatattatagattatgcattttttttttacatttatctgggatcttttatgctatatttttgtaaaaaaagatagaaatctcatatttataaaacaataacaagttttgctagaaaagtcactgttgctagaaaagtcaccggtactagaaaagtcactgtcgccaaaaaagtcaccgtcgccagaaaaattaactagaaaagtcaccagaagtagatgtctcagatataaacaaaaatagaacttgttctataacata

SEQ ID NO: 165335 - DNA, 837 bp, Cannabis sativa
cttaagctctgatttctattactaaatcttactattttccattgttgatgggtgcagagctttagcaaccagagagtatctttgctaagattcccaaaagtgattgatggctcattttgttactaatcatcacaacacctcataatagtgacacaagttatggttttggtaataagtagtgtcataactcagctttcagcaaaagggtttttacctattctttttggctttgtatatataattggaagatgaaatgttcccatctgttgtatagatacatcatcattcatacaaaaatggattatggagaagattcatgggaactttggccatcgaccctttacggctggtgtcattattggatcagagtagttgtttcatatatcaactgtcatatatacttacatgggattctctcagttttcagtttgttgttgttgttgttatttcatatatcaactgtcatatgttaatgacagtaagattttgtttaacacaatgtattgatattacagttttgttttttgcacacttgtattttgtatttaggggtgttaataaaatactcaatccaatccaacttgtacgattcaatttaattcataaagtgcggatattcgcacttgcacggattgaattgaaaaatctaaaattcttactaaaagtaaccgatttaattcaattcacatgtatttatatattacgtgacatataatttaaataaaaacaaaaactactaaaaaaaattattattcgtcctaaaattatcttcggaatgaatgaaaaatctcttaaactatcaaaacatttaaatttaatttaaaataatatttaaaa

SEQ ID NO: 165336 - DNA, 1088 bp, Cannabis sativa
  modified_base (506)..(507): a, c, t, g, unknown or other
tcataccatataaagtaataaataaattgaggcaatcaaaagtagagagtgtgtattaaatgatatgcaaactgaaaataattttttacctgagttgctggaatgttcatccttgaagaattccccagcctaagaatatcctgcatgggtattatagtggtttgggccacagaagataatgctgctctgatgagttcccatgagatatcatcttcattcgtaattgaaagatacttccgcacctaagatcacaaatttgcttacttaataacacgtggaaattaaatgttaaaagggaatgtaagatcaatatcacctacattagatttctctccttccggcaaaacattccaccaaccacagatctgcaatacaagcaagtctcaattagcagggtctctttaacatcttaatataagctgccagctcatgggaatgaaaaaacatttctaccctaaactgcaaaataccaatcttctaacccctagagagagagagagagaganngagagagagagagagagaaatccaactgatccaagtggcagactataactaagaaaagattgaaccttttttattatattgtacagtatgatgtctatatcaactatacctataactcaaaagataaactgataagtgataatgtgattaaacaaaaagcatgaatgaaaggactttactgtgtcattgtcatgagttccagtgtacacaacttgattcctctcatgattatggggtaaatgaggattagcagcatcacttccaaaacctggaccaagaaagtataatgtagtacatgatcaaagtgtgaacattaatgtttgttcaatagcgaacagtatagtaaactggcaatgacttaataccaaattggaggaccgccattccaggtgctccaatggaattcctaagttcaatcacatcctcagttataacaccctgtcaagtaagagcaaatcatgagaaaatgcatccaaccttaagcaaatgagtaaatatcttcaaactcttattcacaagaagaatgagtgtatatatatatatatatatatatatatatataaatcaaaccttgttatttg

SEQ ID NO: 165337 - DNA, 3235 bp, Cannabis sativa
caggaatattgtcttcataattgaccacctctacatttcataattagatatcactactgcaacacaacactgctactctcaatctcaagcacaagcattgttagctacaatttctcttagttattctctcttctgcaattactatttgttggaagatctgatctgatggctgctgaattggttggaggagcgcttctctctgctttcctcgatccgttggtgcaaaagttagcttctgtggtgaaggacttcttcaaaggaaacgatgccattctcaaactggtgacggagctgaaaactttgctgtcctcggctgatctgctgctcattgatgctgaggagaagcttatcaaagaacccagagtcaggaagtggcttgatgatttcaaggacaccatttatcatgtagacgacgtggtttacaagatcgacactgaagcatcgcgaaaaaagctgaaaggtggtggtcctcacgaatctcatagcagccggtataagaaggggctcttgaaactcatcccaactcctttaacttcttttgataaggccataaaacttgagatagaagagacgcttgggaaattgaaacgtcttctagaaaataaagatctcggtttgaaacatgtgaagaatcataagcttccggagagggtatgtgctccatcgctagaagagtctgatatttatggaagggatcatgaaaaagaagagattatcaagtttcttctaccggatgaaacaaccggtgccggtggtgaattgtctgtgatccccattgtggggatgggtggtattggaaagactactcttgctcaacttgtatacatggacgatagagtcaacaatatgttcgatacgaaagtatggattacagtgggggaagacaaagttgactgcacaaaagtgatgaaactaattgtggagaagatcacttctaaaacatgtgaaattcaggatccatatgaccttcaagaagaagtaaagaaggctttgactgggaagaagtttctgtttgttgttgatgatgtttgggatgagaatccttccaagtgggacgttctaaacaattgtttcaaatcgggaaaacatggaagcaagataattgtgacaacacggagcacagatgttgcatcgattatgaaaactgggtcaacttatcaactgggaagaatagatgaggctgctggctggcaattatttgcaaaacatgcttcacttgttgtggactcaaatgattacttggatctcaaacaagttggggaaaaaattgttgacaagtgtaagggtcttccgttggctattaagtcaatgggtcttctcgtacgacggaagcagagaaaggaggaatggatcaacatcctaaacagtgatttatgggagttgtatgatagaaaaaaagttgatattcttccagctttgtggttgagttactttaatctacgcccagaattaaagcaatgttttgcttactgctccttatttccaaaagattatcattttagaaaaggtgagatggtcctgttatggatggccgaaggtcttttacagtctacaaatggaaagagaaaagaagaagttggagaagagtattttgaagatctaatttctatgtcgtttttccaaccatcaaataacgatgagatggagtcgaattttctcatgcatgatcttatacatgatttggcgatatttgtttctggtgagttctgttatatgatgaataatatcagtaaatgttctcacaaggttcgtcatttttcgttcatgcaagattgtgaagaagctgatgaccctaaggaatttgaggagttattcaaagctaagtgtttgcgcaccatattctggcaccagggttcaatcgatgattcgttaaagattgagcagttggacaagttattcccaagcttgagagtactatccataaaggactatcatatcagaaagcttcctgattcaataggcaatttgaagtatttaagatatttgaagttagattgtgaaaatattgaagagatacctaatacaatatgtaagttgtataatttggagacactgttgttggaggaatgtgaaagggttaaaagactaccaaatgatataggaaatttaatcaagttgcgacatcttagtgttcctaagataaacttagtagagatgccattgcaattgggcaaactgcaaaatctgcaaacactgaatacatttgttgtgggaaacaatagagattctgctagcattaagttgctgaaagagtttcaagatctacacgggactctttctattaaaggacttgaaaatgtgagtagcctggaggaagtttcagcagcagcattaaagaatttcaagtttcttagtcatctatctttggaatggtattctagtaaactcgacaagttgcacatagaaagagaggtactgagtgccctccagcctcattcaaacctgaaggaacttacgatttcggactacgaaggcaacagtttcccaaattggatgggagaccatcgctgcttatctaatttagtaaggttggagatttcatgttgttctaattgcagcttcttgccgtcgttgggacagctgccttctctcaaagatcttttgattcaggattgtggtgtggtgagaatagattcagagttttattgtagtactactcttgattcttcttcttcttctgttgcaatacaaacaaagcccttattctttacatctttggagaccttgaaatttcactttatgggtgagctggaagagtggtcatttatcgaagggggagtttttcctcgtcttaagaatcttcaattaatctggtgtgataaactcaaagtgacattgttaggagattatttcccgtcattgacagagcttaaaattgatggttgtggggaaataataccattattgctcccaagagctcaactcaatcaggcccctttgatcactttaaagaagattacacttggttattgttacaacttgaggcacttagacgaggaggcctttcagcacctcacctcccttgaggagttgacaattgatctctttttggaactccaatgcttaccaaaaggactacccacttctctttctgatcttcatatcagtcggtgtccattgctaacaccacgagtgaagagggagacaggggaggactggccaattattgctcacatcccaaatatcactgttaaagacttttaggaaccacttgcttaagttagttagggttgtt

SEQ ID NO: 165338 - DNA, 1721 bp, Cannabis sativa
gggggcggggggagccgtgagtgggagtgggggtcgtgctagccgtgagagggagtaaggggggtgtgcaagccgtgagagggagtaaggggagccgtgcatgcgagtggggagtgtgcgcgaggggtagtgacgagccgtgagtacactttggagggatgcaggtgtagggaaggaagtgagggcatatggataagggtgaagttgagtgagaactctggggatcttgcatccagaggaaggcatacacccacgtcttttgaaacctctggatgtaggggagtacaagtagcgacgacaacggacttgcatggtctgaggacccgaccaaaggtacaccatgactactcacctaaggcttgcaggtggggactcccaaacccgcaactggggaccacgcacttgcaactcaaaaccacacgtctgcaatttagaaccacacacctgctgctcgggatcaccctcctgcagttggggaccacgcatctgcaacccaggagcacatgcctacaatcggggaccacttgacaccagataatattacgaagcgcaaggccactccaggcacctgcaacccacagctcgaaagttatgtgttgataccgtttgaccatgttgtacccttggccactagtgcctataagtaccccaatttagatgtaagtggggttggaagttcattttttgtaactcatagagttaatgcaatagagagcagagcatttattactcatttcacttcttctctttatctcatcttttaatagttacacattttccaacaactaacttggttgacgagttctatccgtcaacatacgacctaccaaacgagcctttaattgttaatttatggttatatgcttactagtacaaaataagacctattgttagaaattagccttagagaaatagtttctcgattactgagattttattaaattctaagtgtattatatatgttatatatgaatttttatgattttcatatttcgtgcctggtaatagtggaatgcgatgatttgacattaaagtcacttagatacggttgagtatcttagaattagcgggcaaaatagttagacatttagaatgtcgagattatttggggttatgatttttaccattttactcctaagttatgagattacttatttgtgaagaaaggacaaagtggtctttttgcccaaggatatttatgactagattttaatagaatatcatagttttatttaagtattatttgctaattatttttaatagataaacctaaatttttttaagattatctctaaaattaaaaacaaagtctctctcctcaccacacacactctctctcgactccatcttaaacccacaaaaacaaaaccctaactcaccatttctataggaattcagctagaatttcaagtgtcattgaagagaaaatttcaaggtaattctagttacttcattctcttaattccttttagaatttctaagaaaagtttggtttaattatgcaattttgtgatttaggttttattcaagtttaggggttgttgggttggttttggagttctatgttggattgtttgtgatgcttttgggagttatttgatcactttagtgttgattagctaaggtggtgtttggtaatacttttgctttttaattttaaaaacagaaaaataaaagtaaattttttgtttttaaaattttgtttttgaaaagcaaaaatg

SEQ ID NO: 165339 - DNA, 2594 bp, Cannabis sativa
aaaaaaaaaaaaaaatagaagaaatagagatattagtgcaaaattattagaattctcttcatcaagtttcatcatcactccaagcgacattgaagcttttcttactttttttttcagagtatttgcacattcagattgaatatgtccaaaaccttcacactccttacactgaattccttttttattattagttactaaaggtttaaaataagtatttccttttgaaaatttggatgaattctttttagtacccatatttttcacatatttatgaaagttcttggttaaaaaagcaatttcatcatcgcattcatcatcagaactttctttttcaacaacttttaatgcaatacttttacctttatcagttgtggatttgagtttgtccttctacttgatttgttgatttaattcaaaagtacgcaaggaacccattaactcctccaccttcatcatgctaaaatcttttgcttcttccatatctaaaagtttagtgtctaacttgtctagaagaactctaataatttttctaacaataactaattcatcaagcttttcaccaagaataaaatgttcattagctatattagacaatctttcataaaacttagacaaggttttattttcagacattctaagatcttcaaatattgtctgaagttaataaacctagaacgcttaacatcagaatttccttcaaattgtgtttgaaggatttgccaagcatccttaacagatttacaagaaagtataagcttaataaaatcttcacctactctatcaaatatatcattaaagttgtactattggaagcaaataactaattattatctttagtagatcattcaagttcaggttttaactttgaattaccttcgaaatctaccacaacaagataagaccatcttgaaagaattattctccatattttttcatcttgggactggatgaatgctcccattctcaccttctagtaagggtagttagagtcattgaaaagtgatagacgagaaatagaacttccttctataaaaaaaaatttcatagaaaatacaagaaaacgttaaaggatcacacaaaaagtttagtatcatgctctaataccaactaaaaaattgtgcttttgtatatgccaataactttctttaataacaatgaagaaaaaagcgactgtaaagatctacagtaacagaatggaagcttgtttttgtagaacacaaatttgcagtaacagaacataaataagagtgcaaaatataaaaacttgacacaagagaaatatacgtggtaccagtgttctttcaaatactcctggttcatggggccacgtctagagaatgaaatcaattagtaaagtctcaaataattacaaatacaattgacttaaacaagtttagactttctcaaaagtttttccacaatcctttataatttactttgccaatttgatttctaaacatcaccaaatagtgaaatccctttgtcttttgatgtgtgagtgtttacttcctctcaaagtaaggtttgacaagtcttctcttgaagacccttctcttatctaatggagttcttcaacctattctaagaacaatataggaacaataaacgaagactaaaacctagttgaacactctaggttttcacaaaagaaactctctcctcacaaagattaaaatatgcaaagtgaaactagaagaggtgaaaatatttagctgctctctaggtcttatttatagaccatagaaatcttagagatagcctcgaacacgtcttcaaagatgtacaaaactttttttagaaaaatccctaatttgcaagatcaaattcgtattctgctgcagcaggaccaaacatgaaactttttaatttgctatatacatagcaagaccgaaattatcatttagagaaagggaatgtcaattttttaaaaaataggcaacttttcataaagagaattccttcttttatatgataagtttcataaacagagagaaacaactgaaaacaaaaggaaaatgacaattaaaggaccgaagttaacaccaaaaaaatattttaattgtacaataaaaatatacattaattaaaaatattttgacaataaattgcagaattggactttacaattataagtacccaaattataaaaacaaattaaaaatggaaaaaataagaaaaaaaagataacatgaattaaagatttcctaattttctaatacaaattaaaaactatatattttaaattttatgtaataataaaaaaaataattaaataaaggtaaaattggatttaagaattaccaaatcttaaattagtgagggatccatatatttccttctctctttttaaaaaataaaaataatgcaaacttatattgtatttaataaaatttagatttactagaaagtctcttatttcaatctcttagggctcgtttggtatgccgtataagggtcgtattgtattaaataataaataacactatgtttggattaagcaatgtattgcattaattattacggctaaaaattttaatacaatgtatgttgtattatttaatacataataaatggtccgtattagcttgtattat

SEQ ID NO: 165340 - DNA, 1239 bp, Cannabis sativa
  modified_base (1208)..(1213): a, c, t, g, unknown or other
tccatagcagcctcggtgtcgaccagcttccttgttcaaccaaggttctttgttttggtcatggtgaattctgaaaaacaaagtaaaaaataaagaagagagaaatagagaagagagagcttgggctaatgaagtatgttatcccgttttttccacctgacgtggcatgtctacgtggctaacatcagtaccaagtggcaatacagctcaccaacaagaaggccaagccatctactcagtactccaaccaaggaggagtccaagtactcaagcaaaacgatgaagtgacaaactatccacctcaaagggtgatttgtgcgcttgatacctttcgaggtgatttgtgttggatacatcccgaagtaagcggtgatgtctctaaaataagggtgtaatggcagcactgcccctgctaaatatggcgctccgaccacgccatcaaattaagggccaactggtgcgctcgtcggtccttcaacggcacctcacattggacgcctctcaccaatccactcttgcgtatcctatcaagaaccctagcagtgataatagaaggaggagagacccaacgatttccctgtgccccagcatcgagagactgaggctccgaagcctgtacaaagacatgttctacaccgattaccgaaggcggaccaagcctgctcaatgtctgactgtcatcatcatatgatccgagagggttgttggagaatacagtacaagtcctgtacgtcctcctcctagcaggcatagcctcctccaccttggactcattgttcagactctcagcaccatggttagccacatgtgcctttgcgtggccgacctctgtatctttaccatcaagaggttgtgtctcctcccccactataccaaccctgcccattgtttccaacctggcaatgtaagggttaagaggtggtgctctacggtaagtcttcttagttttaaccaaaatgtatcaatatcagcccagagatcactcagaaagttgctagggaacagactggatgctagcttacaaaagtaaatctgactcgacttataacaatgtggttgtcaactccccagatcactacttaaaatcacttgcatagaagagacaaggggaggtgagcaacctgacaaagctacaaggtatagacaaaattctggccagttgtaccggccagtcgtacccaagggtacttgttaggttttatgccctnnnnnnaactccatttcaatgtaatctatttt

SEQ ID NO: 165341 - DNA, 658 bp, Cannabis sativa
aaaaaaaattaaatatgtaaaataagttaaaaaaataaacaatatttttagatatgtttagttaaaatttaaattgtaatgtttaaaaaagtaatattttctgtttaatagtgtcacaataattgaggaaaaacaaatgagatgaatgcaataggtaagggaaaatggattaaatccctcgaacatctaaaaaaactcagctagctggtgatacaaggtagactaaatattgtacaaggccattgttttgtagatacaacatactagataagagaataactatgtcaactcagagggatcaatcataagctactagtgaagaaaagacttcttccacctatctcaactcaaccttagaagaaggcttaacgtaaggaataaataattccctatcaagaccataatcatcctattttatacaaaattgatcatgtaagcctaagcaactcaaattctcacatacaaaagcacagtagaaaaacttaaccgaagaataggcaggccgaaaacaggcaaaaaaggcaagtctctgggagcctgtgatttggtttcttctctcccatcctctccacgctacgataattagtcaaaagatttcagcaatccagattttctgaaaagcagcatataaaagatcaaaaaatacatgaaatgtggg

SEQ ID NO: 165342 - DNA, 1503 bp, Cannabis sativa
  modified_base (713)..(717): a, c, t, g, unknown or other
  modified_base (835)..(837): a, c, t, g, unknown or other
agcctcataatccaaaattccacaacaaggaaatatcaaataaaatcagcataatttcatattcaaaactcaacctaagctcttaaacatctaaaacatagctaggattaacaacaacaaaggaatcaaacaagactatcatcatttcatactaattctcaaccatgtattttcaagaatataaacaaaaaattcatgcttttaaatcctcataccagaaacaaatttaacaagtaaagagggtaagaactacctcaaatccaagccttcaaagtacaacaagaaccacttccaaaaccaccaccaaaaccaagtgatttcctcacaacaaaagcttcaaagcaaagagtaaagagagaaagaggaaggttagctcaaaggggctgagaaacactctagaaaattcatctcattactcacaattttctttttgttgaaaaataactgaattaggcaaaattacaataatgcccgtagggccatataacacatatacttcatccatgggaaaaattgtcattatcacaccaccatttaatcaaataacttttagaatattcacatactaataaaatgtcaatacaaaatcccaaaattgtattttggccccgaacccagttctgcgcgaaatatccagttgtgactatactgcgccgacttgtcagaactcacctgaaaaaggacaaagtaagtatactatataataatatagnnnnnaagcacgtaattaaattaaattcacaattttacccttctcgggttataattacgaaaatgcccctggctcaccaatatgatcttagcatgtcatatatcatattaattcacatataannnattatataataatataatttcataataatacacatttaactacttagagtttgctaatctattttcttaatcttaaggtattacactaaacctctccctctctctctctctctctctaactttgttactgattctcttcaagaagtttttgacttgcataaacttcacaagacctgtatatctcacttctccttcctattaaaaaagcttcaagcatcaatgaatattaggaatacaaattttgaacaacatttgcaagtttggtttcccaaaattgagttatattctcttaaccctaatatttggtttattcattgctttaattattactagccctattattcttactgttattaatctttaccaagtatattttcattcaatattagtatcattattttatttgtactttgtttcttgattatcaagattcatattatcccataaatgtaaatctatcatcatagttcttaatttttcaaaggaaatatttctatatcgttataaacttattatataataccataaatttttaacaatcaaaatctctattattctaatcactttctttgtggttttggcgggaggaagaaacctaagagaagacgctcttctcttaggtccttttttttttcagtgcaacacaggaaagcgccctctttttgt

SEQ ID NO: 165343 - DNA, 1382 bp, Cannabis sativa
tatatatatatgtaaattcattatataggaatttcaattatgagataactaaaattttgatagtagtataaataaataaatataaatttaatatatatacatcggtaattatttattttatatttattattcttagagaataaaatgactgatatcaatggcaaattattacacgatcataatattattaaatagaaatttttcctgctcttctctctctttcggtgctttaccggagctatggcaaaaagggcaaaaataaccggaaaagtgaaatcaaagggaaggaaatcaggaccatcatcttcgaagaggatcatcaagaccagatctatggatgcggttcttagacttcaagaattggagataccagatgacaaagaaccaatggagcagtaccaggagccgtactgctcacctgaagaaactaaatcgatttctgaaagacaaagtgaattacaataggagttttctgcttggcttgatgttgctaattagggttgtacaaaaatttttgtaaaccgtccaaaccgaataacccgtccaaaccaaaccgacaaaatcgataaaaaaaacaaaccaaaaaaacccgacaaaattataaaccgctcaatctgttaattgggcaggttgaaaataggtccaacccacccaattaaaccaagcaacccgatcagatccaaattaatgtttttaaaattatatttttattatatgtaatataattatatatggacatataataaaaaaaacttaaaaataaattaaaaaaacccctaaaatcctaaatcgaaccccagacccttccctcttcgtatcgcattgtaaccttaaaaaaattgagttctcttctctcctatcgcgcctccctcttctaagatcaactcaacccttccctctccgtcagacgacttaacccttcctctcgtcatttgactcaaccattccccctccgatgcggttctctttctctgaaatatatagcagcatcgatttcttctcaacagtgactgcatggactagatcacgatagctctcatcaatgattccctctctttgctcgactctgaacttcatcaccgacgtcgatctccaccaccccttgtctctatttatctcttctctgtttcagtgtttcagtaagtagcaagtgaaaaataaaaggtatttctcctctcatgaatctccattgtattgaacatataatctcacttagattaaattttggcaaattcatcaaatgaaacagttaaagtcaattatttcatttacgggtgattgaagttaagaaataaattaatttttgcatatattattagtcgttgtggtagatccaatgtaacgccctaacaattaggcacgctacccaaaatacttatgaa

SEQ ID NO: 165344 - DNA, 1174 bp, Cannabis sativa
tttttgtgcatttgtgaaattaattctattattaaggataatattgtgtatatttacaaaactttatttataataattagtatagtttttaatactatattatttaataattaaaatgtaaagtatttttatttatacttttatgattaattatagcacaaaaatattgaatttgattagatgtaagaatttgtttaacgcttatcatcttgttaaatgtttgactattggccaatgaataaagaaggagtgtttgatcaaatcttagtcaagtactagaaaggatttattttagttggggtcctattattaaatgaatttttttattagaaaaaatagattaagtggtgcaattgcaaatccctttctcattctgaaatcttgaaaaattattgaaaattaaacattacatttatgttcaaggacgaggatagtgaattagataaaactaataatagagaattagaaacttgttcattaaatatgatagcgaacgccggaaacaaagaataataaactaaaaacttggttactcttcaaaaagaaaaacaaaatgttaaaatctcgaaggttgtttggtttcataactcaaaaattatttttaattttgaaaactaaaaaataatttttacaaactaatagggattgtttggcaaaatcttttaaaaaactgaattttaaaaaattagaaaacagaaaacatcaaaatattgttttcaatttttaaaaacaatttttttttgtctaacatattatatttatcattttgcttacatactcggatcttagattcgaaaccaaacttgaatccggatccgaataggttcttgtcatgggatagtgttaaaatattaattttttttaataaaaaattataaaaataattttaaaaaacttgtgtcgaataccattatatttttataatgacaaaaaattattttttgttctcacatttaaaaatacaattttaaaatttgaaaactgaaaacacagcaaacaaactcttgatcattgaatatgatagtaaataggtatacctaacatgggaatcacaaactacatgtgcaaagtcagtggttgagtgtcttgccagctggcatgcgtgagggttttctctcaaggttacgaagggttcgaaagtttttttctggttgactgtttcttgcggcagggg

SEQ ID NO: 165345 - DNA, 2233 bp, Cannabis sativa
ccccggtctccctctgccactctctctgagccccgatctcatagtcgttggataaataaacaacatacgacaatgaatcttcctcaatcaaaagtttccaaagacaaagtatcttctcatcaagctttggcaaaatcacatcaaggacctcaaactgcttcttttgtggtttagcttggggtccttatcgatctttattcacacgatctcatcctggtaaatggagagactgagctcaccattgatgatggtgacatcatgggcaacgagggcacattaaccagggctgcgatgttgagctcgattgcaggatggggtctggttgtggttcttgaactcttccttcttccatgagagaactgggcttagattttaccaccctgagagagatgagagaggctcgacagcgagtgagaaaggggtcagaattggggttttttgcctctaaggatttttgaggatagatgtaacaccctactagtttaggcgtgttatcgtgattttatactaattgtgcaacctgttgctaatcaacgggtttgttgggaaaacatgattaattaaaactttacttaattaacctttaaatgaagataaataatctttgcataaacggagatcctgcatttaaaatatttacaatcgtattacaaaatattagttacaaaagttgccgcctagcgagtaatcaaaatacatcttgttgtcctaaagatcgtatactctagatataaccaccctaatatgtaaaatcttcatctactggcactcactgttgatcaaccttagctttgcctttacttacacatgtaaacaataactgtgagtcgacaaactctgtaagaaaagtataatcataacataatttaaaccagattacaactaggtgcacatacacccaatcataaccctatctcgcgtcccacgtgcattgagcctagaacgttcgtatgatagtactattgaccataatattagtctatactcggtactctagtcgtactgatgtgatagcgttaatcaataattagcccaacatatactgtcgatattcagtgcatctctatgtgtactaatatcgctactataatatgttatctaacaggcattcataaacatgcacgctaaacatgtaatcacatatgcatatcattatactagtcttacctatatcttgaattcaggtgtgccggttaacctaagtggaactactgctcgataatttacaggccccaagagctgctaccttcaatccctaagaatttacccatagaaaaaccttctcaattgttgaggaaatccaagaaaatccaagctcctatggttctaggtgagaccgaccccaagaaagagaaaagagactttgtgtttctaatttattctaaattcaatctcaaaaattatttccttattcagcataacattaattaaattaaaggattaataaaaatccttttgtcactaaaaacaaactagggtaatattactattttaccatttgcttcaccaagaagtaatcttgccacttaagggtattttggtcaaacttataactctaaatatttccgacattctcaatgtctatctaaatcgtcccgctattcctaaaatatcaaactaaaataaagggactttataggacatacgttgcatttcactgttattgggcataaaataagaaaattgcaaaattcataaatagcataattagcatatctaaaattcaaatatatctccttattttcataaataataattaaaagtataaattctgaattaaactcaacacatgggtgggatcagaaacttatttctgtgacataaaaacacgaaatacattatgaactgatgatagtgttggaggcaaggctagacggtaagctaccaatctaacattttcaagaatctcaaaaggccctgtaaatctagggcataactttccctttttcccgaaacgtttaatatcattcattggagatactcttaggaagacatgatctcccacctggaactcaacattcttgtgttttggattagcatagctcttttgcctactctgagaggcaagcattctaaccttgaactcctccattgcctcactgttctactgtactgattctggagttaaatacttccttcctccaatttcatcccagtgaattagagatctacatttcctgccatacaacatctcataaggagtcatccctatagtactctgatagctattatt

SEQ ID NO: 165346 - DNA, 724 bp, Cannabis sativa
ccggtattagtcaaggattctaacaatttttttaattaccggtggaaccctattaataccggcgggtccactcggtaataaaacactgtaaaataccccaccttaactcagaaatcatttttcattttcccccacaaaatccccgccgaccctcctccttctccgcccatttcctccgaccctcctcctcctccgcccatttctcttgtcctcttccacctccgtccattgcatcgccatcaaccgccattccaccgtcattttttttacaggtaatatttttttcactattttttttcatctctctccttctattatgttttttttttctatagttatttattttttgtccatgcttaaaatattgggcgagatactccgctcggaacactaacagaaattgaaaacgcgggaatagtaaaaagcttggttagaattaacaggtttgttttttttatttttattagatttattttttcatctttgaatgtttagtaattggtatatttcttatatatatgttatgtgtaaatatatgtgatttgtactgtgtgaatatataattttgtttatgtgtatatattatatgtattttatgtaaatgtataatttttaagcaatatatttatatcttatatataatatatgtatatatatattatatatacatataatatattgcttaaaaattttaaatgtgtaaatttgtaaaaatttagatttt

SEQ ID NO: 165347 - DNA, 503 bp, Cannabis sativa
atttttttgggttttaaatttactgcaaaaaagtttgtgttgcagggtgatacatgttttgttatccagcaaagttgaagttttgtcacacgtttttacttgacttcttattatgcttgttgttgttgttgttattagtttttttcttctttggttgaaatttcgattgtggaatgttttgattgcagccgggtggtgtcactgtggacatgctcaaaactttgtgctatatgttttactgttggagtagttgtgggttacactctgaagcgtcgagtacgacgctgggcttctaagcttcttaagcggttgaaagatgaatgaacactattatttgatcctctttatgatgttcagttctaagtctactttaacagttagattgttctcttaattgtaaacatttacgtaacaaaaacatgcgatttggatacagtttttcttgttatttatcattcgagcggtttactggtgatttttggttactcttttttttttttttt

SEQ ID NO: 165348 - DNA, 712 bp, Cannabis sativa
ccatgcatataataaaaagtaagggacaatcttcattttaagtttatttttgaatgtgaacagaagaaaccagctctgatcaactacggacaagttttcctgtatatgaagtgggagacaagttttacagttcattaatttgccttatatatatatttatacaaatatatatatatattaattttcattataattagtatttatatattatatatatgtgtgagtcattttagacttatatggaccactaaaatagtttctttctgtatatatgattgataactatatatattaaatgaagtcatgtatacacacatgatgacaattcagttaattaatacagatctagttagaagacattataagaaaatggaaacaatatgttaaaatgtttaaaagaagacaaatattaaactagctagttagctagaaaattaaatatatatatatacatcaatataagaatagttatatatatatgtcacccaatcaataattaattgtcattactcatgtatgtcacccaatcaataattaattgtcattactcatgtacatatatatatataatgattctcaatttgttaagaataatttagcaaaattatttttgcatgcatgcctatatattagtactagaagaaagttacgtgcaaggcacgtatatttagttttatgttatgtgttctataatttaattaagaaaaattca
